United States Patent Application Publication US 2024/0327476 A1 - sequence listing, part 121

SEQ ID NO: 230662 - DNA, 1353 bp, synthetic construct
  misc_feature 1..1353: note = Description of Artificial Sequence: Synthetic coding sequence
  source 1..1353: mol_type = other DNA
atgagcgccatccaggccgcatggccttccgggactgaatgcatagccaagtacaacttccacggaacagccgaacaggatctccccttctgcaaaggggacgtgttgaccatagtcgcggtcactaaggacccaaattggtataaagccaagaataaagtgggacgtgaaggcattatccctgctaactacgttcagaaaagggagggagtgaaggcgggtactaagctgtctctcatgccttggtttcacggtaaaatcactcgagagcaggcggaaagactgttgtatccacccgagaccggtctttttctcgtgcgggagagtaccaattatcctggcgattacacactgtgtgtgagttgcgacggtaaggtggaacactataggatcatgtaccacgctagcaagttatctatagatgaggaggtgtacttcgagaacctgatgcaattggttgagcactatacctcagatgccgacggcctgtgcacacgtctgatcaaacccaaagttatggaggggacagttgccgctcaggacgagttttaccggtccggatgggctttgaacatgaaggagctgaagttgctgcagacgatcggcaaaggcgaatttggcgacgtgatgttaggcgattacaggggcaacaaagttgcagtcaagtgcattaagaacgatgccactgcccaggcttttctcgccgaagcctcagtcatgacccagctccgtcatagcaacctggtacagcttctgggtgtgatcgtcgaggaaaaaggaggcctttatatcgtgaccgaatacatggccaaggggagcctagtggactatttaaggtctagaggcaggagtgtgcttgggggagactgtctcttgaaattctccctagacgtttgcgaggccatggagtacttagagggaaacaacttcgttcatagggatttggcagcaaggaatgtgctggtgagcgaggataatgtggcaaaggtgtccgactttgggttaactaaggaggcaagttccactcaagacaccggcaagctcccggtgaagtggacagccccagaggcccttagggagaagaagttcagcacaaagtctgatgtatggtcctttgggattctgctgtgggagatttactcctttgggagagttccctacccgaggatacccttgaaagatgtcgtcccgagggtggaaaaaggctacaagatggatgctcctgatggttgccctcccgcagtttacgaagtcatgaagaattgttggcatttggatgccgcaatgcggccaagcttcctgcaactgagggagcaactggaacacataaagacgcatgaattgcacctgtag

SEQ ID NO: 230663 - DNA, 1170 bp, synthetic construct
  misc_feature 1..1170: note = Description of Artificial Sequence: Synthetic coding sequence
  source 1..1170: mol_type = other DNA
atgcgtgtgcttgtaaggcggtgctggggaccaccactcgcacatggagcccgtcggggaagaccctcgccccagtggagggccctggcaagactcggctgggaggactgtcgggattccagggtgcgcgagaagcctccctggcgagtgctgttcttcggaaccgaccagttcgcgcgtgaggccctgcgcgcactacacgcagctagggaaaacaaggaggaggaactgatagataaactagaagtggtgacaatgcctagcccttctcctaaaggtcttcccgttaaacagtacgccgtgcagtctcagctgcctgtgtacgagtggccagacgttgggtctggcgagtacgatgtgggtgtcgttgcctcttttgggaggttactcaatgaggccttaatcttgaagttcccttacggaattctgaacgttcacccaagctgcctgccgagatggcgagggccagcacctgtcattcacacggtccttcatggcgacaccgtcacaggagtaactattatgcagatacggcctaagcggtttgacgtgggacccatcttgaagcaggagacagtgcctgtccctcctaaaagcacagcaaaagagctggaggccgtgttgtcccgtctcggagcaaatatgctgatcagtgtccttaaaaacctgcccgagagtttaagtaatggccgtcagcagcccatggagggcgctacatatgctcccaaaatcagcgccggtacctcatgcatcaagtgggaggagcagacatctgagcagatattccgcctgtaccgggcaattggaaatatcataccactgcagaccttgtggatggcaaataccatcaaactgctggatctggtggaagtcaacagttccgttctggccgacccgaagctgacaggacaggctttgattccaggcagcgtgatctaccacaaacagtctcagatacttctcgtgtactgcaaggatggttggattggtgtcagaagcgtaatgctgaaaaagagtctaacggccactgacttttataacggctacctccacccatggtaccagaagaactctcaggcgcagcccagtcagtgccgcttccagacactgcgcttgcccactaagaaaaagcagaaaaagactgtggcaatgcagcagtgcatcgaatag

SEQ ID NO: 230664 - DNA, 1749 bp, synthetic construct
  misc_feature 1..1749: note = Description of Artificial Sequence: Synthetic coding sequence
  source 1..1749: mol_type = other DNA
atggccgtccctggtgttggcctgctgacccgcttgaacctgtgtgcacggagacgcacgcgggtgcaaagaccgatcgtgaggctgctctcatgtcccggaaccgtggcgaaggatcttcgcagagacgagcagcccagcggatctgtggagaccggattcgaagacaaaattcctaagcggcgattttccgagatgcagaatgagcgccgagaacaggcccagcgcacagttctaatccactgtcccgagaagatctccgaaaacaaatttctgaaatatctatctcagttcggaccaattaacaaccacttcttttacgaatccttcggtctgtacgcggtcgtggaattctgccagaaagaatcaattggatctctgcagaacggaacccacaccccctctactgccatggaaactgccattccatttagatctcgtttcttcaatctgaagctaaaaaaccaaacctcagaacggtcccgcgttagatcgtctaatcagctgcctagatcaaacaagcaattgtttgaactcttatgctacgcagagtcaatagatgaccaattgaacacgttgctcaaggagtttcagttgacggaggagaacactaaactccgctacctcacttgctctcttattgaggatatggccgctgcatacttcccagattgtatcgtgcgcccttttggatcatcggtcaatacatttgggaagcttggctgcgatctcgacatgttcctcgacttagatgaaactcggaatttatctgcccacaaaatttctggtaatttcctgatggagtttcaggtgaagaacgttccttcagaaagaattgccacccagaaaatcttgtctgtgctgggggaatgtctggaccatttcgggcctgggtgcgtgggcgtgcagaaaatattgaatgcacgctgcccattggtgagattcagccaccaggccagcggattccagtgcgacctcaccactaataatcgtatagcgctgaccagctccgagctgctatatatctatggagcactagattctagggtcagggctcttgtgttttccgtcaggtgctgggccagggcgcactccttaacctcttcaatacccggagcttggattacaaatttttccctcacaatgatggttattttcttcctgcagcggcgtagcccccctatcctgccgacactggactctcttaaaacgctagctgacgccgaagacaaatgtgtcatcgagggcaacaattgtacattcgtgcgcgacctctccaggatcaagccctcccagaacaccgaaactctggaactgctgctcaaggagttcttcgagtattttgggaattttgcctttgataagaactccatcaatattcggcagggtagagaacaaaataaacccgattccagcccactgtatatccagaacccgttcgagacatctctgaatatctcgaaaaatgtcagtcagtcacagctccagaagttcgtagatttagcaagagagtccgcctggatcctgcagcaggaagacactgacagacctagtatttcaagcaatcgcccatggggacttgtctccctgctactcccatctgctcccaatcgaaagagttttaccaagaagaagtcaaacaagtttgccatagaaacagtgaaaaaccttctggagtctctgaaaggtaacagaacggaaaatttcacaaagacgtcagggaaaaggaccataagtactcagacttag

SEQ ID NO: 230665 - DNA, 2139 bp, synthetic construct
  misc_feature 1..2139: note = Description of Artificial Sequence: Synthetic coding sequence
  source 1..2139: mol_type = other DNA
atggcttgggcaaagaaggtgggcggtcgggctggacagggaagatctctgtcacgatgtgatccaattattctcgaccccgagtggctgtacggccctcctgaaggcgagggagggccagagggggtggggggagaaacccgagcgagtattcatcctcccctgcggacaggcaggcaccatcaaaaagtcaaccataacattaggggccctgaaggctcagccaaagacgctgcacctggcggaggcggtcatcaccaggctgggccagggcaaagaggggatgaggatggagctctacagcacctgtgcggcggtgggggaggagtcggagtgagcgtgggcagaggcacgggcactagtgtggctgccgagcatccatccctccaggtaaaattgctggaactacaagagctggtcctgcgcctggcaggtgatcacaatgaaggccacggtaaattcctggcggctgcccagaatccagcagacgaccccgctccgggagcccctgcaccccaggaattgggtgcggcagataagcagggtggattcgaagacaagatccccaaacgacgcttctcagaaatgcagaacgaacgtcgcgagcaggctcagcgcacagtgctcatacactgtcctgaaaaaatatctgaaaataaattcctgaagtacctcagccagttcggcccaatcaataaccacttcttctatgagtcgtttgggctttatgcagtggtagaattttgccagaaagagagcatcgggtccctacagaatggcacccataccccctcgacagcaatggaaaccgctatccctttcagatctaggttctttaatctaaagctcaagaatcagacgagcgagaggagccgcgtacgtagttctaaccagctgccccgtagcaataaacaactttttgagctgctctgttatgcggagagtattgatgatcagcttaacaccctgttgaaggaatttcagctcacggaagagaacacaaagctgcgatacctgacctgtagcctgattgaagatatggccgctgcatacttccccgattgcatcgtgaggccattcgggagcagcgtaaacacctttgggaagctgggctgcgatctagatatgttcctggatctggacgaaacacgaaacctgtctgctcataagatttctggcaactttcttatggagttccaggttaaaaacgtaccttctgagaggatcgcaacccagaaaatcctaagtgtcctgggtgagtgtctggatcatttcggacccggatgtgtgggcgtgcagaaaatcctcaacgccagatgccctctcgttcgatttagtcatcaagcctcgggattccaatgtgatctgaccacaaacaaccgaatcgccctgacctcaagcgaattgctgtacatctacggggcactggatagtagggtcagagctctagtgtttagcgtcaggtgttgggctcgtgcgcatagcctcaccagtagtattcccggtgcttggatcacaaacttcagcctgaccatgatggttatattctttctccagcgcagaagcccaccaatcttgcccactctcgacagtctgaaaaccctggccgatgccgaagacaagtgtgttattgagggaaataattgtacatttgtgcgggaccttagtcggatcaagcccagccagaacaccgagacactggaacttctgctcaaggaatttttcgagtacttcgggaacttcgcattcgataaaaattcaattaacattcggcagggaagggaacaaaataaacccgacagtagcccactttacattcaaaatcccttcgaaacatctctgaatatttccaagaatgtctcacaaagtcagttgcagaagttcgtcgatctcgccagggaatcggcctggattctgcagcaggaagacacggaccggccaagtatcagtagcaaccgcccatggggacttgtgagcctcctgctcccatccgccccaaaccgaaaatcgttcacaaagaagaagtctaacaagttcgctatcgaaactgtgaagaacctcctggaatccctgaagggaaaccggactgagaacttcacaaaaacatctggaaagcgaacaataagcacacaaacctag

SEQ ID NO: 230666 - DNA, 660 bp, synthetic construct
  misc_feature 1..660: note = Description of Artificial Sequence: Synthetic coding sequence
  source 1..660: mol_type = other DNA
atgcaaaatgagcgcagggagcaggctcaaaggaccgttctcattcattgtcctgagaaaattagcgagaacaaattcctcaagtatcttagccagttcggcccaattaataaccattttttttatgagtcctttgggctgtatgcggttgtggaattttgtcagaaggaatcgattggatctctgcaaaacgggacccacaccccctcaacggcaatggaaacagctatcccattccgaagtcgttttttcaacctcaaactcaagaaccagacttcggagcgcagtagagtgcgatccagtaatcaattaccaaggagtaacaagcagctcttcgagctcttatgttatgcagaatccattgacgatcagttaaacacattacttaaagagttccagctgactgaggagaatacaaagttaagatatctgacgtgcagcctgattgaggacatggctgccgcatacttcccagattgcatagtgcgcccttttgggtcaagcgtgaacacttttgggaagttgggttgcgaccttgacatgtttctggatttggacgagaccaggaacctgtccgctcacaagattagtggtaactttctcatggaattccaggtcaaaaacgtccccagcgaacggatcgctacacagaaaatctag

SEQ ID NO: 230667 - DNA, 453 bp, synthetic construct
  misc_feature 1..453: note = Description of Artificial Sequence: Synthetic coding sequence
  source 1..453: mol_type = other DNA
gatcttaggcgggacgagcaacccagcggaagtgtcgagaccggttttgaagacaagattcctaaacggagattttccgaaatgcagaacgagaggcgcgagcaggcccagcggacagtactgatacattgccccgagaagatttctgagaacaaattcctgaaatacctctctcagtttggtccaatcaacaatcacttcttttatgaaagttttggtctgtatgccgtggtggagttttgtcagaaagagagcatcgggtctctccagaatggcacccatacacccagcaccgctatggagaccgcaatcccatttcgatccaggtttttcaaccttaagctgaaaaaccagactagcgagcggagcagggtgaggagcagcaaccagctgcccaggtccaacaagcagctcttcgaattgctgtgttacgctgagagtgtgagcttctag

SEQ ID NO: 230668 - DNA, 309 bp, synthetic construct
  misc_feature 1..309: note = Description of Artificial Sequence: Synthetic coding sequence
  source 1..309: mol_type = other DNA
atgttcctgaccgcacttctgtggaggggacgcattcccggtaggcagtggatcggcaagcaccgcagacctcggtttgtttccctgcgagcaaaacagaacatgattcgacggctggaaatcgaagccgagaaccattactggctctcaatgccatatatgacccgcgagcaggaacgcggacatgccgcagtgcgcagaagagaagcctttgaagcgatcaaggccgcagccactagcaaatttcctccccatagatttattgcggatcagttagatcaccttaatgtaactaagaagtggtcatag

SEQ ID NO: 230669 - DNA, 978 bp, synthetic construct
  misc_feature 1..978: note = Description of Artificial Sequence: Synthetic coding sequence
  source 1..978: mol_type = other DNA
atggctgcagctgtgaggtgtatgggcagggcgcttatacaccatcagagacacagtctgagtaagatggtgtaccaaaccagcttgtgttcatgtagcgtaaatattcgagtgccaaacaggcatttcgccgcagccactaagtctgccaaaaagactaagaagggcgctaaggaaaaaactcctgatgagaaaaaagatgaaatagagaaaatcaaggcctacccgtacatggaaggggaacctgaagatgacgtttaccttaaacgcttgtatccccgtcagatttatgaagtggagaaggctgtgcatctgctgaagaagttccagatccttgattttacgtcccctaaacagtcagtctacctcgatctcactctggatatggcattgggaaaaaagaagaatgttgagcccttcacaagcgtcctgagtctgccctaccctttcgccagtgagattaataaggtggccgtgttcacagagaatgcttctgaagtgaagattgccgaggaaaatggagccgctttcgcgggaggtacatctttgattcagaagatctgggacgacgaaatagtcgcagatttctacgtggccgtgcccgagatcatgcccgaattgaaccgtctgagaaagaagttgaataagaagtaccctaagctgagcaggaacagcatcggccgtgatatacctaaaatgttggagctgtttaaaaatggacacgagatcaaagtcgatgaagaacgcgaaaattttctgcaaaccaagatagctaccctcgacatgagtagcgaccagatcgcggcaaacctgcaggcagttatcaacgaggtgtgtcgccatcgcccactcaacctcggaccttttgtggtgagggccttcctacgttcctcaacctcagaggggctgcttctgaagatcgaccctttactgccaaaggaggtgaagaacgaagaatccgagaaggaagatgcttag

SEQ ID NO: 230670 - DNA, 909 bp, synthetic construct
  misc_feature 1..909: note = Description of Artificial Sequence: Synthetic coding sequence
  source 1..909: mol_type = other DNA
atggtatatcagacaagcctgtgttcatgcagtgtgaatatcagagtgcccaaccgccattttgcagcggctacaaagagtgccaaaaagactaagaagggggctaaggagaagacaccagacgaaaaaaaagacgaaatagagaaaatcaaggcctacccatatatggagggagagcctgaggatgacgtctatctgaagaggctctacccaaggcaaatttatgaggttgagaaagcagtccacctgcttaaaaagttccagatactcgattttacttctccaaaacagtctgtgtacctggacctcacacttgacatggccctgggcaagaagaagaacgtcgaaccgttcaccagcgtgttgagcctgccctacccttttgcctccgaaataaataaggtggccgtgttcacagagaacgcctcagaagtgaaaatcgccgaggagaacggggcagcctttgccggtggcactagtttaatccagaagatttgggacgatgagatcgtggccgatttctacgtagccgtacctgaaattatgcctgagcttaatcgtctgcgcaagaaactgaataaaaaatatcccaaactgtccaggaattctatcggcagggacatcccgaagatgctggaactgttcaaaaatggccacgagataaaagtggatgaggagagggaaaatttccttcagaccaaaattgccaccttggatatgtccagcgaccaaattgcagccaatcttcaggcagttatcaatgaggtctgcaggcacagacccctgaacctgggcccattcgttgttagagctttccttaggtccagcacgtccgaagggctcctgctgaaaattgatccgctcctgccaaaggaaatcaagagtcagcctaaaaagaaaaaaaactag

SEQ ID NO: 230671 - DNA, 816 bp, synthetic construct
  misc_feature 1..816: note = Description of Artificial Sequence: Synthetic coding sequence
  source 1..816: mol_type = other DNA
atgatcagcgctcattgcaacctccacttgcctgggtccagtgacagtcccgcttctgcttcacaggtggccggtatcaccggaaggttgcctacgctccagactgtacgctatggcagcaaagccgtcacgagacaccgcagagtcatgcactttcaaagacaaaagcttatggctgttactgagtatatccccccaaaacccgctattcacccatcttgcttacccagccctccttccccacctcaagaagagataggacttatccggctactgaggagggagatcgccgcagtatttcaggataataggatgatagccgtctgtcaaaacgttgctttgtcagccgaagacaaattgttgatgaggcaccaacttagaaagcataagatactgatgaaggtgttccctaaccaggtcctgaaaccctttctagaagattctaaatatcagaatctgctaccgctcttcgtgggccataatatgttgctggtgtccgaggaacccaaggttaaggaaatggtgcggattctaaggaccgtcccattcctgccgttgttaggaggttgtattgatgataccatcctcagcaggcagggatttattaactattctaaactccctagtttacccctcgtccagggcgagctggtcggtggactcacatgtctgacagctcagacgcactctttactgcagcaccagcctctgcaattgaccacactccttgatcagtatattagagaacaacgggaaaaggacagcgtgatgtctgccaatggtaagcctgatcccgacactgtgcccgacagctag

SEQ ID NO: 230672 - DNA, 786 bp, synthetic construct
  misc_feature 1..786: note = Description of Artificial Sequence: Synthetic coding sequence
  source 1..786: mol_type = other DNA
atggctgcagctgttgccggtatgctcaggggcggtctcctgcctcaggcaggcaggctccccaccctgcagactgtgcgttatggctcaaaggcggttaccaggcaccggagagttatgcactttcagaggcaaaagttgatggccgtcacggaatatatcccccctaaacctgccatacatccatcatgccttccttcccctcccagtcctccccaggaggagatcggtctgatccggttgctgcggagagagatcgccgctgtgttccaggataaccgcatgatcgcagtctgtcagaatgtcgccctttcagcagaggacaagttactgatgaggcaccagttgagaaagcataagatactaatgaaggttttcccaaatcaggtcctgaaaccctttttagaggattcaaaatatcagaacttattacccctttttgtaggacacaacatgttactagtcagcgaggaaccgaaagtgaaggaaatggtgcgcattctccggaccgttccattcctccccctgctcgggggatgcatcgacgacactatcttgtcccgacaagggttcatcaactacagcaagttgccttcattaccgctggtgcagggggagctcgtgggtggcctgacctgtctcacggcccaaactcactcactgttgcagcaccagcctttgcagctgacaaccctgctggaccagtatattagagagcagagagagaaggactccgttatgtctgccaatgggaagccagacccggatacagtccctgactcctag

SEQ ID NO: 230673 - DNA, 816 bp, synthetic construct
  misc_feature 1..816: note = Description of Artificial Sequence: Synthetic coding sequence
  source 1..816: mol_type = other DNA
atgatcagcgctcactgtaatctccatttaccgggatcctctgacagtcctgcatcagctagccaggtcgctggcattactggcaggctcccaacactccagactgtccggtacgggtcaaaggcggtcacgcgtcaccgcagggtaatgcactttcagcgccagaagttaatggcagtaactgagtatattccacccaagccagcaattcacccctcatgcttgccgtctccacccagcccaccgcaggaagagataggccttatcagactgcttaggagggaaatcgcggcagtctttcaggataatcggatgatcgcggtgtgccaaaacgtcgccctatcggcagaagacaaattgttgatgcgccaccagctccgtaagcacaaaattttaatgaaggtctttcctaatcaagtgctgaaaccttttctggaggacagtaagtaccagaatttactcccactgtttgtggggcacaatatgcttttggtgtctgaggagcctaaggtcaaagaaatggtgcgaatcctgcggacagtcccctttctaccactcctggggggttgcatagatgatacaatcctaagcaggcagggcttcatcaattattcaaagctgccatccctgcctttagtccagggcgagctggtcggaggactgacctgccttacagctcagacacatagcctgcttcagcaccagcccttacagcttacaactctcctggaccaatacattcgggagcagagggagaaagactccgtcatgagcgccaacggtaaacccgacccggatactgtgcctgatagttag

SEQ ID NO: 230674 - DNA, 579 bp, synthetic construct
  misc_feature 1..579: note = Description of Artificial Sequence: Synthetic coding sequence
  source 1..579: mol_type = other DNA
atgtccaaactggggagagctgcaaggggactgcgcaagcctgaagtcggaggcgtcattcgtgccatcgtgagggctggcctggcaatgcccggtccacccctaggtcccgtgctggggcaacgaggagtgagtataaatcaattctgtaaagagtttaatgaaagaaccaaggacatcaaagaaggcatcccgctgccaaccaagatcctggttaagccagaccggacttttgaaattaagatcggccagccaaccgtgtcatacttccttaaggccgctgcaggaattgagaaaggcgctcgccaaactggaaaggaagttgctggccttgtaacattgaagcatgtgtatgaaatagcgaggatcaaggcacaagatgaagcattcgcactgcaagatgttccgcttagttccgttgtgcgcagcatcatcgggtctgccaggagtttgggcatccgtgtggtcaaggacttgtctagtgaggagctcgctgctttccagaaggagcgagctatatttcttgccgcacagaaggaggctgacctggcagcccaggaggaggcagcgaagaagtag

SEQ ID NO: 230675 - DNA, 546 bp, synthetic construct
  misc_feature 1..546: note = Description of Artificial Sequence: Synthetic coding sequence
  source 1..546: mol_type = other DNA
atgtccaaacttggcagggctgctagggggctacggaagccggaagtgggcggagtgatccgcgctattgtgcgagcaggactggcgatgcccggaccgcctctgggccctgttttagggcaacgcggtgtgagcatcaatcagttttgtaaagagttcaacgaaaggaccaaggatattaaagagggaatccctctgccgactaagatactagttaagcccgatcgaacctttgagatcaaaatcggtcaacccacggtgagttattttcttaaggccgctgctgggatcgaaaaaggggcacgtcaaaccgggaaagaggtggctggcctcgtgacattgaagcatgtgtacgagattgctagaattaaagcccaagatgaggcgttcgcgctacaagatgtgcccctgtcatcagtggtgcggtccatcattgggagtgcgcgaagccttgggattcgcgtcgtgaaggaacgctgctcggcaaatgttttgcggaatgggaagattagcatgaaggatcctagtgggcgaagctcagtgtag

SEQ ID NO: 230676 - DNA, 501 bp, synthetic construct
  misc_feature 1..501: note = Description of Artificial Sequence: Synthetic coding sequence
  source 1..501: mol_type = other DNA
atgagcaagttggggagagccgctcggggactgcggaagcctgagcgcggagtgagtataaatcagttttgcaaggagtttaacgagcgtacaaaagacatcaaggaaggaattccgcttcctacaaagattttggtgaagcccgaccggacgttcgaaattaaaattggccagcccaccgtgtcgtactttttaaaagctgctgcgggaatcgaaaaaggggcaaggcagactgggaaggaggtggcaggactggtgaccttaaagcatgtgtacgagatcgcgcgaatcaaagcacaggacgaggcattcgccctccaggacgttccactcagctctgtcgttcgttccattattggatccgctaggtctctcggcattcgggtagttaaagaccttagttctgaggagctggcagcttttcagaaagaacgtgcgatcttcctggcggctcagaaagaggccgacctggccgctcaagaggaagccgcaaagaagtag

SEQ ID NO: 230677 - DNA, 891 bp, synthetic construct
  misc_feature 1..891: note = Description of Artificial Sequence: Synthetic coding sequence
  source 1..891: mol_type = other DNA
atggccgcagaagcaagggtgtcaaggtggtactttggtgggctcgcttcctgtggtgcagcgtgctgtacacaccctctggatctcctcaaggttcaccttcagacccagcaggaagtaaaactgcgcatgaccgggatggcattgagagtcgtaaggactgacggaatattggccctgtactccgggctctctgcctctttgtgccgacaaatgacttactcccttacacgcttcgccatctatgaaacggtgagagatagggtcgccaaaggttcccagggcccactgcccttccacgagaaggtcctgctgggatccgtttccggcctcgcgggagggttcgtgggcacgcctgccgacctcgtcaacgtgaggatgcaaaatgacgtcaaattaccccagggacagaggcgaaactacgcgcatgctttagatggcctttatagagtagcaagggaagaaggcctccgcagattgttttcaggggcaactatggcaagcagtcggggagcccttgtgactgtgggacagctatcttgctacgatcaggcaaagcagctcgttctgtctactggatacctgagcgacaacatcttcacccactttgtggcctcctttatcgccgcagctggcgacgagcccccaccgcaaggtgggtgcgccacatttctgtgccagcccttagatgttctcaagacacgactgatgaactctaagggtgagtaccaaggggtttttcattgcgcggtcgaaaccgctaagttgggcccactcgcattctataaagggttggtgcccgctggaatcagattaataccccacactgtgctgaccttcgtctttcttgagcagctcagaaagaacttcgggattaaagtcccgtcctag

SEQ ID NO: 230678 - DNA, 537 bp, synthetic construct
  misc_feature 1..537: note = Description of Artificial Sequence: Synthetic coding sequence
  source 1..537: mol_type = other DNA
atgctgcctgctgctgcacggccactctggggcccttgcttggggctgagagccgctgcctttagacttgcccgaaggcaagttccatgcgtgtgcgccgtgcggcacatgaggagcagtggccaccagcgctgcgaggcactggctggtgcgcctcttgacaatgccccaaaggaatatccccctaagatccagcaactcgtgcaggatatcgcttcactgactctgctggagatctctgacttaaatgagctacttaaaaagaccttgaagattcaggatgtcggtctggtccccatggggggtgtcatgagtggcgctgttccggctgccgctgcacaggaggcggtagaagaagacatcccgatcgctaaggagcggacacacttcacagtgaggctgaccgaagccaaaccagtcgataaagtaaaacttataaaagagattaaaaattatattaaagccagcacgtcttccaggcagagaagctggtggagcccctgtccaggcaaccagagccaatgccgacagtcatag

SEQ ID NO: 230679 - DNA, 597 bp, synthetic construct
  misc_feature 1..597: note = Description of Artificial Sequence: Synthetic coding sequence
  source 1..597: mol_type = other DNA
atgctgcctgccgctgccagaccgctttggggtccttgcctcgggcttcgtgccgcagcattcaggttagcacggagacaggttccttgcgtctgtgctgtccggcatatgcgcagcagcggccaccaacggtgcgaggctctggccggagcacctctggacaacgctcccaaagagtaccctccaaagatccagcagctcgtgcaggatatcgccagcctgaccttgttggaaatctcagatctgaacgagctgctgaagaagaccctgaagatccaggatgtgggattggtgcccatgggaggcgtgatgtctggggcagtccccgcagccgcagcgcaggaggctgtggaagaagacattcctattgccaaggaacggacacacttcaccgtccgacttacagaagccaagccagttgacaaggtgaaactgatcaaagagatcaaaaattacatacaaggcatcaatctggtgcaggcaaaaaagttggtggagagcctgccccaggagatcaaggctaatgtggctaaggcagaggcagagaagatcaaagccgcactggaggctgttggcggtacggtcgtcctcgagtag

SEQ ID NO: 230680 - DNA, 864 bp, synthetic construct
  misc_feature 1..864: note = Description of Artificial Sequence: Synthetic coding sequence
  source 1..864: mol_type = other DNA
atggcagccgaggcacgcgtgagccggtggtacttcgggggtctcgcgtcctgcggggctgcttgctgcacacaccctctggatcttctgaaagtccatttgcagacacagcaggaggtaaagctgaggatgactggcatggctctgcgcgtggtccggaccgacggtatcctcgctctctattcagggctgtcagcctctctgtgtaggcaaatgacttactcactcactagattcgcgatctatgaaaccgttcgggatcgcgtcgcgaagggctctcaaggaccgctgcccttccatgaaaaagtcctgctgggaagcgtgtctggactcgcaggcggtttcgttggcaccccagccgacttagtgaatgttaggatgcagaacgacgtcaaactgcctcaggggcagaggaggaattatgcccatgccctggatggcctttatagggtggctagagaagagggcctacgcaggcttttttccggggcaacaatggctagcagtaggggagcactggttaccgtaggccagctttcatgctacgatcaggccaagcagctggtgctctccaccggatacctgagcgacaacatttttactcacttcgtggcctccttcatcgccggaggatgcgcaacattcctgtgccagccactcgacgttcttaaaacaaggctgatgaattcgaaaggcgaataccaaggtgtgtttcattgcgctgttgagacggctaagctaggcccactggcattttataaagggctggtcccagccggaatcaggttgatcccgcataccgtcctgacatttgtgtttctggaacagctccggaaaaactttgggatcaaagtaccttcgtag

SEQ ID NO: 230681 - DNA, 1329 bp, synthetic construct
  misc_feature 1..1329: note = Description of Artificial Sequence: Synthetic coding sequence
  source 1..1329: mol_type = other DNA
atgctgccagctgcagcccgtcctctctggggaccttgtctgggcctgagggccgctgcgttcagactggcaagacgccaagtgccttgtgtgtgtgctgtacggcatatgaggtcctctgggcaccaaaggtgcgaagctctcgctggcgcaccgctggataacgcacccaaagaatatcctccaaaaatccaacaattggtccaggacatagccagcttgacactgctggagatctccgatttgaacgagctcctgaagaaaaccctaaagatccaagacgttggtctcgtgcctatggggggagtcatgagcggggcagtgccagccgctgccgctcaggaggcagtggaagaggacatcccaatagcaaaggagagaacacactttactgtgcgccttacagaagccaagccagtagacaaagtgaagctaatcaaggaaattaaaaactatatccaggggatcaacctggtacaggctaaaaaacttgttgagagtctcccacaagaaattaaggccaacgtggctaaggcagaggcagaaaagattaaggccgcactcgaagccacccaacaggaagtgaaactccggatgacaggaatggccctcagggtcgtgcgcactgacggcattttggcactgtacagcggcctgtcagcatcactttgtcggcagatgacctattcacttacccggtttgccatctacgaaactgtgcgggatagggtggccaagggaagccagggaccactgccgtttcacgaaaaagtgctactgggctccgtgtcaggtttggctggtggattcgttggtacgcccgctgatctcgtgaatgtgcgcatgcaaaatgatgttaaactgccacaagggcagaggcgcaactacgcccatgctcttgatggcctctatcgggtcgcaagagaagaaggccttcgccgactcttcagcggcgctactatggcatcttcgaggggtgcactcgttaccgtaggccagctgagttgctatgatcaggccaaacaactagtgctctcaacaggctacctgtccgacaatatcttcacacactttgtcgcaagcttcatcgcgggagggtgcgccacatttctgtgccagccactggatgtgctaaagacacgcctcatgaacagtaagggagaataccagggagtgttccattgcgcagtggagaccgcaaagcttggccctcttgcattctataaaggtctggtcccagcgggaatccgcctgattccccacaccgtgctgacttttgtattcttggagcagctccgcaagaatttcggaattaaagttcctagttag

SEQ ID NO: 230682 - DNA, 735 bp, synthetic construct
  misc_feature 1..735: note = Description of Artificial Sequence: Synthetic coding sequence
  source 1..735: mol_type = other DNA
atgaccggcatggccttgcgggtggtgaggactgacggtattctggccctctattccggacttagcgctagcctttgcagacagatgacgtattcattgacccgttttgccatctacgagaccgtcagagaccgagtcgccaagggctcccagggccctttgccgtttcacgaaaaagttctcctggggtctgtgagcggacttgctggaggctttgtgggaaccccagccgatctggtcaacgtgaggatgcaaaacgacgtcaaactgccccaaggacagcggcgaaattatgctcatgccctggatggcctgtacagggtggctcgggaagagggcttgcggaggctgtttagcggagctaccatggcgagttccagaggagccctcgttacagttggacagctgagctgctacgatcaggctaagcaattggtgcttagtactggatacctgagtgacaatatcttcacgcatttcgtagcttctttcattgccggaggatgcgccacttttctgtgtcagcctctagacgttttgaaaacaaggctgatgaactcaaagggagaataccagggggtcttccactgtgccgtagaaactgccaagttgggacctctggcgttctataaggggctcgtgccagctggaatccggctgatcccacatacagtgctgacatttgtattcctggaacagttgcggaagaacttcgggatcaaggtgccctcctag

SEQ ID NO: 230683 - DNA, 438 bp, synthetic construct
  misc_feature 1..438: note = Description of Artificial Sequence: Synthetic coding sequence
  source 1..438: mol_type = other DNA
atggcatttttcacaggactgtggggaccctttacatgcgtctcgagggtgttatcccaccattgtttttcaaccacagggtccctatccgcaattcagaagatgaccagggtacgagtcgtagataactccgcgcttggtaattctccttaccatagagcgccaaggtgcatccatgtgtacaaaaagaatggcgttggcaaagtgggggaccagatcctcttggctatcaaggggcagaagaaaaaggccctgatagttggccattgtatgcccggacctcggatgacccccaggtttgattcaaacaacgtagtactgattgaagacaacggtaatcccgtcggtacccggatcaaaacccctattccaacctcacttagaaaacgggagggggagtactccaaggttttggcaattgcccagaactttgtctag

SEQ ID NO: 230684 - DNA, 891 bp, synthetic construct
  misc_feature 1..891: note = Description of Artificial Sequence: Synthetic coding sequence
  source 1..891: mol_type = other DNA
atggcaggcccactgcaggggggaggcgctcgcgcactggacctgcttcgaggcctgcctagagtcagcctagccaatctgaagcccaaccctgggtctaagaaaccagaaagacgcccacggggaaggcggagaggacggaaatgcgggagggggcacaaaggcgaaaggcaacgagggacacggccacggttaggcttcgaagggggtcagacaccgttctatattagaattcctaaatatggcttcaacgaggggcacagcttccgacggcagtacaagcctctttccctcaatcgccttcaatatctgatcgacctcggccgagtcgacccttctcagcccattgacttaacgcagctggtgaacggcaggggcgtgactatccagcccttgaaacgtgactacggggttcaattagtggaggagggcgcagatacgttcacggcaaaggtgaacattgaagtgcagcttgcgtcagagctggctatcgcggctatcgagaagaacggcggagtcgtgactacggccttctatgaccctcgctccctagacatcgtttgcaagccagtgcccttttttttgagagggcagcccatccccaagaggatgctcccccctgaggagctagtgccttattataccgacgccaagaatcgcggttatctggccgaccccgcaaagttcccagaagcacgactggagctcgccagaaaatacggatacatcctgcccgatattacaaaggatgagctgttcaaaatgctatgtacccgtaaagatccgaggcagatcttttttggactggcacctggttgggtggtcaatatggctgacaagaagatcctgaagccgactgatgaaaacttgcttaaatattacacaagctag

SEQ ID NO: 230685 - DNA, 756 bp, synthetic construct
  misc_feature 1..756: note = Description of Artificial Sequence: Synthetic coding sequence
  source 1..756: mol_type = other DNA
atgtggcgactgctggccagagcttccgcacccctattgcgcgtccctctgtctgactcctgggctttacttcccgcttctgcaggggttaagactttgctgcccgtcccatccttcgaggacgtgagtattcccgagaagcccaaattacgtttcatcgaacgggctcctctggttcctaaagttagacgggagccaaagaacttgagcgacatacgcggaccttctacagaagcgactgagttcaccgagggcaatttcgccattctggcactaggaggaggctacctccactggggacattttgagatgatgcgcttaacaatcaacagatcgatggatccaaagaacatgttcgctatttggcgggtgccggcacctttcaagcccatcacccgcaagagcgttgggcaccgaatgggagggggaaaaggggctatagaccattatgtcactcccgtgaaggcgggacgtctggtcgttgaaatgggcggaagatgcgagttcgaggaggtgcagggctttctggatcaggtagcgcataagttgccctttgccgctaaagccgtgtcccggggtaccctagagaagatgcgcaaagaccaggaggaaagagaacggaacaaccaaaatccatggacgttcgagcggattgctaccgccaacatgctgggtattagaaaagtgctctcaccctatgatctgacccataaggggaagtactggggcaagttctacatgcctaagcgtgtgtag

SEQ ID NO: 230686 - DNA, 528 bp, synthetic construct
  misc_feature 1..528: note = Description of Artificial Sequence: Synthetic coding sequence
  source 1..528: mol_type = other DNA
atgaggttgtcagtagccgctgctatatcccacgggagagtatttcgccgaatggggctgggacctgaaagccgcattcacctcctgcggaacctgcttaccggcctcgtgcgccatgagcggatcgaagccccatgggctcgcgttgatgagatgcggggatacgccgagaaactgatagactacggcaaactcggcgacactaacgagagagctatgcgcatggcggacttttggcttactgagaaggacctaattcccaaactatttcaggtgttggcccctcgatacaaagaccagaccggaggctatacaaggatgttacagatcccaaatcgatcacttgatagggctaaaatggctgtcattgaatataagggcaactgtctaccgcctctgccccttccgcgacgggacagccatttaactctcttgaatcagttactgcaggggttgagacaggatctgcggcagagccaggaagcatcaaaccactcaagccatacagcacaaacccccggtatctag

SEQ ID NO: 230687 - DNA, 543 bp, synthetic construct
  misc_feature 1..543: note = Description of Artificial Sequence: Synthetic coding sequence
  source 1..543: mol_type = other DNA
atggctctgcgctcgaggttctggggactgttttcagtgtgtcgaaatcctggatgtaggtttgcagctctttctaccagtagtgaacctgccgcaaagcctgaggtggaccccgtcgagaacgaggcagtggcccctgagttcactaatcggaacccgagaaatttagagctgctgagcgttgccagaaaagaacgtggttggcggactgtgttcccttcacgagagttctggcaccggctgagggtaatcagaactcaacatcatgtcgaagccctggtcgagcatcagaacggcaaagtggtggtgtccgcctccaccagagagtgggccattaagaagcacctttactcaacccggaatgtagtcgcgtgcgaaagcattggtagggtgctggcccaaagatgcctggaagctggcataaattttatggtttatcaacccaccccctgggaagcagcctctgactcaatgaagaggttgcagtctgcgatgaccgaaggcggtgttgtgctgcgggaaccacaaaggatctatgagtag

SEQ ID NO: 230688 - DNA, 879 bp, synthetic construct
  misc_feature 1..879: note = Description of Artificial Sequence: Synthetic coding sequence
  source 1..879: mol_type = other DNA
atggctgcctgcatcgcggcaggacattgggccgctatgggactgggtagatctttccaggctgctcggacgctgctgccaccgccagcttctattgcctgcagagtacacgcaggtcctgttcggcagcaatcaaccgggccaagcgaacctggggctttccagccccctcctaagcctgtcattgtggacaagcatcggccagtcgagcctgaacggaggttcttgtccccagaatttatcccgagacggggtagaacggacccattgaaatttcagattgaaaggaaagacatgcttgagcgacgaaaggttctacatattcctgaattctacgtagggagcattcttcgtgtcactaccgctgacccttacgcaagcggcaaaatcagccagtttctcggtatttgcattcagagaagcggaagaggacttggcgctacctttatattgagaaacgtgatcgagggccagggtgttgaaatctgcttcgagctctataacccacgcgtgcaggagatccaggtagttaaactggagaaacgcctggacgactctttactgtatcttcgcgatgccctgcccgaatatagcacatttgatgtgaacatgaaacccgtagtgcaagaaccgaaccagaaggtcccagtgaatgagctgaaggtcaagatgaagcctaaaccctggagcaaaagatgggaaagacccaatttcaatattaaggggatccgatttgacctgtgcctgacagagcagcagatgaaagaagcacaaaagtggaaccagccatggttagagttcgatatgatgcgggaatatgacaccagtaagatcgaggccgcaatttggaaagaaattgaagcgtccaagagaagctag

SEQ ID NO: 230689 - DNA, 879 bp, synthetic construct
  misc_feature 1..879: note = Description of Artificial Sequence: Synthetic coding sequence
  source 1..879: mol_type = other DNA
atggcagcatgcattgctgcaggccactgggccgctatggggcttgggagatcattccaggctgcccgtactctattacctcctcctgcatcaatcgcttgcagggttcacgccggtcctgtgagacagcagtctactggtccaagcgagcctggcgcttttcagcctcccccaaaacctgtgattgtggacaaacaccgacctgtcgaacctgagcgtcggttcctttctcctgagtttataccgagaagaggccgtaccgaccctctgaaattccagatcgagcggaaggatatgttagagcggcgaaaggtattacatatcccggagttttacgtcggttcaattttgagggtgacgactgcggatccctatgcttcagggaagatttcccaattcctcggcatctgtatacagagaagtgggcgtggattaggggcaacatttattctcagaaatgttatcgaagggcaaggtgtggaaatctgctttgagttgtataaccccagagtgcaggaaatccaggtcgttaaacttgagaaacggctagatgattctctgctttacttaagagacgctctgcccgaatactctacattcgatgtgaacatgaaaccggtagtgcaggagcctaaccagaaagttcctgtgaatgagctgaaagttaagatgaagccaaagccctggtctaaacgatgggagcggccaaactttaatataaagggtattagattcgatctgtgcctcaccgaacagcagatgaaggaagcccagaaatggaaccaaccgtggctggaatttgacatgatgcgggaatatgacaccagtaagattgaggccgctatttggaaggagatcgaggcttcaaagcgatcctag

SEQ ID NO: 230690 - DNA, 240 bp, synthetic construct
  misc_feature 1..240: note = Description of Artificial Sequence: Synthetic coding sequence
  source 1..240: mol_type = other DNA
aaagtgccagtcaacgaacttaaagtgaaaatgaaacccaaaccatggtcgaaacgatgggagaggcctaacttcaatatcaagggcattcgattcgacttgtgcctcaccgaacagcagatgaaggaggctcaaaaatggaatcagccctggctggaatttgatatgatgcgggaatatgatacatctaagatcgaagccgcaatatggaaggaaatcgaagccagcaagcgaagttag

SEQ ID NO: 230691 - DNA, 918 bp, synthetic construct
  misc_feature 1..918: note = Description of Artificial Sequence: Synthetic coding sequence
  source 1..918: mol_type = other DNA
atggccctctgtgcccttaccagggcactgcgaagccttaatcttgcaccccctaccgtcgcggctccagcgccttctctgtttccagccgcacagatgatgaataacgggctgctacagcagccttctgccctgatgcttctcccttgccgcccagttctgaccagcgtggcgctcaatgctaacttcgtgagctggaagtctcgcacaaagtacactataacaccagtgaaaatgaggaagagcgggggtcgcgaccataccggtagaattcgagtgcacggtatcgggggtggtcacaaacaacgctaccgcatgatcgactttctgcgattccgccctgaggagactaaatccggacctttcgaagagaaggtaatacaagtaagatatgatccttgcaggtcagccgatatcgcattagtggcaggtggctcgcgaaagcgctggattatcgccactgagaacatgcaggccggagatacgatcttgaactcaaaccatattggcaggatggctgttgcagctagggagggtgacgcccacccccttggagcccttccagtgggaaccctcattaacaacgtagaaagtgaacccggtcgcggtgctcaatacatccgggctgccggtacctgcggagtcctcctcaggaaggtgaacgggacggccattattcagctcccttctaaaagacagatgcaggtacttgagacctgtgtagctactgtgggcagagtttctaatgtggaccacaacaagagggtgattgggaaagccggtcggaatcggtggctggggaaacggcctaacagcggcagatggcatcgaaagggcggttgggccggaaggaaaattagaccgctccccccaatgaaaagctacgtgaagctgccttcagcttcagcgcagagctag

SEQ ID NO: 230692 - DNA, 450 bp, synthetic construct
  misc_feature 1..450: note = Description of Artificial Sequence: Synthetic coding sequence
  source 1..450: mol_type = other DNA
atggtgtttctcacagcccagctgtggctccgaaatagggtgactgaccggtactttaggatccaagaggtcctaaaacacgctcgtcactttcgaggtagaaagaacaggtgctaccgcctggctgtgcggactgtgatccgcgcatttgtgaagtgcactaaggccagatacctgaagaagaagaacatgcggactttgtggattaatagaataaccgccgcttcacaagagcacggattgaagtatcccgcattgatcggtaacttggttaaatgtcaggtggagctgaataggaaagtgctggcagaccttgctatttacgagcctaagaccttcaagtccttggctgctctggccagtagacggcgacacgagggttttgccgctgccctgggcgatggtaaggagcctgaaggcatcttcagtcgggtcgtgcagtatcactag

SEQ ID NO: 230693 - DNA, 618 bp, synthetic construct
  misc_feature 1..618: note = Description of Artificial Sequence: Synthetic coding sequence
  source 1..618: mol_type = other DNA
atggccgcaagttccctgaccgtgacactcggtaggctggcctcagcctgcagtcactccattctgcggccaagcggaccaggggctgccagtctttggtcagcatctcggagatttaacagtcagagtacctcttacctaccgggttatgtgcctaagacatcactctcatctccgccatggcccgaggtggtcttacccgatcccgtagaagagactcggcaccacgccgaagtcgttaaaaaagttaacgaaatgatcgtgacgggacaatacgggagactttttgctgtggttcacttcgcctccaggcagtggaaggtcacttctgaggatttgatactgatcggcaacgagctcgatttggcctgtggcgaacgaatcagactggagaaagtcttgctcgtgggcgctgacaatttcaccctgctgggcaaaccactcctcggtaaggaccttgttagagtggaggcaacagtgattgagaagacagagagctggccgaggatcatcatgaggttcaggaagcgtaagaattttaaaaagaagaggatcgtaacgacccctcagacagtgttgagaattaactcaatcgagatagccccatgtcttctgtag

SEQ ID NO: 230694 - DNA, 843 bp, synthetic construct
  misc_feature 1..843: note = Description of Artificial Sequence: Synthetic coding sequence
  source 1..843: mol_type = other DNA
atggcagcatcatcgctgacagtgactctgggccgtcttgcctcagcttgctcacacagtatactccgcccatctggacctggcgctgcatctctttggtccgcgtctcgtcgatttaattcacagtccacctcatacctgcctggatacgtgcctaagacgtcgctgagcagtcctccatggcccgaggtcgtattgcctgacccagtcgaagagacacgccatcacgccgaagtagtaaagaaagtaaacgagatgatcgtgaccggtcagtatgggaggttgttcgcggtggtgcatttcgcgagcaggcagtggaaagtgacgtctgaagacctgattctgatcggcaacgaactagacttggcttgtggtgaacggattcgtctagaaaaggtgctgctggtgggcgctgacaattttactctgttaggcaaacccttactgggaaaagacctcgttcgcgtggaagccacagtcatagagaagacagagtcctggcccagaatcatcatgcgctttagaaaacgtaaaaactttaagaaaaaacggagcaagctggagaaggtgccactcggccctgttgccagatgctggttgcctcgacgtatgcgaactgaaggagtagggcacgtgggcctgggaactggctcacccggtagatcgcagcctgggtgccactgtcctcttgctaccttgatcctcgagggggcaccacgcggtagcagtctggcccctctcctgctgcacgctccgagggtgacacctcctcggtcgccttctccaccaaggtccgctcgggatcctactagcctgccgttctcctccactcttcgcgcatag

SEQ ID NO: 230695 - DNA, 363 bp, synthetic construct
  misc_feature 1..363: note = Description of Artificial Sequence: Synthetic coding sequence
  source 1..363: mol_type = other DNA
atgatcgtgacgggacagtacgggcgtctgtttgctgtcgtgcattttgcttctcgacagtggaaagtaacttctgaagatttgatactcattggaaacgagctggaccttgcttgcggggagagaatacggctggagaaagttttactggtgggcgctgataacttcaccttgctcggcaaacctctcttaggaaaggatcttgtgagagtagaagccactgtaattgaaaaaactgaaagttggcccaggatcattatgcgctttaggaaacgcaaaaactttaagaaaaagcgcatcgtgactacaccacagaccgtgttacggatcaattccattgagatcgccccatgcctgttatag

SEQ ID NO: 230696 - DNA, 381 bp, synthetic construct
  misc_feature 1..381: note = Description of Artificial Sequence: Synthetic coding sequence
  source 1..381: mol_type = other DNA
atgtggtaccttgccaagctcatcagaggaatgagcatcgatcaggcacttgcgcagctggagtttaatgacaaaaagggcgcaaagattatcaaagaagtgctgctggaagctcaggacatggccgtgcgtgatcacaatgtcgagtttaggagcaacctgtacatcgctgagtcgacgtctggcagaggccagtgcctcaagagaatccggtatcatggccgagggaggtttggtatcatggaaaaagtgtactgtcactactttgtaaagctcgtcgaaggacctccaccccctcctgagccaccgaaaacagctgttgcgcacgcaaaggagtatatccagcagctacggagccgtaccatcgtgcacactctatag

SEQ ID NO: 230697 - DNA, 699 bp, synthetic construct
  misc_feature 1..699: note = Description of Artificial Sequence: Synthetic coding sequence
  source 1..699: mol_type = other DNA
atggccgcagcagtcctgggccaactgggaaaggatttcctggttgtaaaaaggcagaaaggagttgagatggagtcggagctgacggcctgcgtggatgtcgcaggcgctctgtggatccacaatttgaggagccgtggcaagttggccttgggcgtcctgccgcagtcctacattcacacgtcagcgagtctggacatcagcaggaagtgggaaaagaaaaacaaaattgtctacccccctcagcttccaggcgagcctcggcgtcctgctgagatttatcattgtaggcgacaaattaagtactccaaggacaagatgtggtaccttgctaaacttatcaggggcatgagtatcgaccaggcgctggctcagctggagttcaacgataagaaaggcgctaaaattatcaaggaagtcctactggaggctcaagacatggctgtgagggaccataacgtggagtttagatccaacctttacatcgccgaaagcacctcagggagaggccaatgcttaaagcggattcggtaccacggccgaggaaggttcggcatcatggaaaaggtttattgccactattttgtgaaactagtggagggccctccccctcctccagagccccctaaaaccgccgtggcccacgcgaaggagtacatacaacagctccgcagcaggacaattgtgcatacactgtag

SEQ ID NO: 230698 - DNA, 639 bp, synthetic construct
  misc_feature 1..639: note = Description of Artificial Sequence: Synthetic coding sequence
  source 1..639: mol_type = other DNA
atggctgctgctgttctagggcaactgggcgcactttggattcacaacttgcgatcccgagggaagctcgcgctgggactgctatcattccattcggtgctgccacagtcatatatccacacttccgcttccctggatatctctagaaaatgggagaagaagaacaagatcgtctatccaccacaactgcctggagaaccccgtagacctgcagaaatttaccattgcagacgtcagatcaaatacagcaaggacaaaatgtggtatttggctaagttgatacggggtatgtccatcgatcaagctttggcccagctggaatttaacgacaagaaaggcgcaaagatcatcaaggaggtgctgttagaggcccaggacatggctgtgagggaccacaacgtcgagttccgctccaacctgtatattgccgaatcaacatcaggaagaggccaatgcctcaaacggatcagatatcatggccgaggacgcttcgggatcatggaaaaggtttattgccattacttcgtcaagctggtggagggtccaccaccacctcccgagcctccaaagacagcggtcgcccatgcaaaggagtatatccagcagctgcgctcacgcacaatcgtacacacgctgtag

SEQ ID NO: 230699 - DNA, 621 bp, synthetic construct
  misc_feature 1..621: note = Description of Artificial Sequence: Synthetic coding sequence
  source 1..621: mol_type = other DNA
atggcggctgccgttttgggacagctcggcgctctttggatccataacctgcgatcccgaggcaaattggctctgggagttctgccccagtcatacatccatacttctgctagcctggatatcagtcggaaatgggagaagaagaacaaaatcgtgtatccaccccagctgcccggtgagcccaggcgtccggctgaaatatatcactgtcgtcgtcagatcaaatactctaaggataagatgtggtatctggcgaaactgatccgcggaatgagcattgatcaggcccttgcacagctggaattcaatgataagaagggagccaaaattatcaaggaggtcctactggaggcccaggacatggctgtgcgggatcataatgtggaatttcgcagcaatttatacatcgccgagagcacctccggcagggggcagtgtctgaaacgtattaggtatcatggccgaggcaggtttggcattatggagaaagtatactgccactactttgtcaagttagtggaaggcccaccaccacctcccgagccaccaaagacagccgtggcgcacgcgaaggaatacatccagcagttaagatcgagaacaatcgtgcacaccctgtag

SEQ ID NO: 230700 - DNA, 462 bp, synthetic construct
  misc_feature 1..462: note = Description of Artificial Sequence: Synthetic coding sequence
  source 1..462: mol_type = other DNA
atggcaaggaatgtggtataccctctgtatcgcctaggcggaccccagctaagggtttttaggaccaacttttttattcagcttgttagacctggtgtggcccagcccgaagacaccgtgcagttcagaatccccatggaaatgactagggtggacctgagaaactatctggagggtatttataatgtgcccgtggcagcagtccgaactcgggtacaacacgggtcgaataaaagacgagaccatcggaacgtgagaataaaaaagccagactacaaagtagcctatgttcagttagctcacggtcagactttcacctttccagacttgttccctgaaaaggacgagagcccagaagggagtgccgctgacgatctctatagcatgctggaggaggagcgccagcagagacagtccagcgatcctaggcgcggaggagtgccctcatggtttggactgtag

SEQ ID NO: 230701 - DNA, 462 bp, synthetic construct
  misc_feature 1..462: note = Description of Artificial Sequence: Synthetic coding sequence
  source 1..462: mol_type = other DNA
atggccagaaacgttgtctacccactgtatcgcttggggggtcctcagttaagagtcttccgcaccaacttctttatccagctcgtgcgaccaggagtggcccagcctgaggacactgtgcagttccggatccccatggaaatgactagagtggacctgcggaactaccttgaaggtatctataacgtgcccgttgccgcagtaagaacccgagttcagcacggtagcaataagcgaagagatcaccgcaacgtccgcattaagaagcccgattacaaagtagcatacgtacagttggctcatggtcaaacttttacatttccagatctgttccccgaaaaagacgagagcccagagggctctgctgcggacgacttgtatagcatgctcgaagaggagaggcagcagcgccagtcgagcgacccgaggagaggcggtgttcccagctggttcgggctgtag

SEQ ID NO: 230702 - DNA, 651 bp, synthetic construct
  misc_feature 1..651: note = Description of Artificial Sequence: Synthetic coding sequence
  source 1..651: mol_type = other DNA
atgcgactctcagctctcttggccctcgccagtaaggtgaccctcccgccacactacagatatgggatgtcccctcctggatccgtcgccgataagcgtaagaacccaccgtggattcgtcggaggcctgtagtggtggagcctattagcgacgaagattggtacttgttctgtggagatacagtggagatcttggagggaaaggacgcaggaaaacaggggaaggtcgtccaagttatccggcaacggaattgggtggtggtgggtgggctgaacacacactacaggtatattggaaagactatggattacagggggacgatgattccatctgaggcccctcttttacaccgccaggtcaagctcgttgatccaatggatagaaagcccaccgaaattgaatggcgatttaccgaggcaggagaaagggtgcgcgtgtccacccgaagcggtcgcatcattccgaagcctgagttcccaagggcagatggtatcgttcccgaaacctggatagacggcccaaaggatacaagcgtggaggatgccctggaaaggacatacgtgccatgcctgaagacgctgcaggaagaagtgatggaggcgatgggtatcaaggaaacaaggaaatacaagaaggtgtattggtattag

SEQ ID NO: 230703 - DNA, 651 bp, synthetic construct
  misc_feature 1..651: note = Description of Artificial Sequence: Synthetic coding sequence
  source 1..651: mol_type = other DNA
atgaggctgagtgcactgttagctttggccagtaaagtgaccctccccccacactacaggtatggcatgtcgccacctgggagtgtcgcggacaagcgaaagaaccccccatggattagacgcaggcccgtcgttgttgagcctatctcggacgaagactggtatcttttctgcggcgacaccgtggaaatcctcgagggcaaagatgcgggtaaacaggggaaggtggtgcaggtcatccggcagaggaactgggttgtggtgggagggttgaatacccactatcgctacattggaaagaccatggactatcggggaacaatgatccccagcgaagcaccattactgcatcggcaggtaaagttagtggatccgatggataggaaacccactgaaattgagtggagatttactgaggcaggggaaagagtccgcgtgtccacaagaagcgggagaattattcctaagccagagttccctcgcgcagatggaatcgtccctgaaacctggattgatggacccaaggacacttccgttgaggacgccctcgagagaacttacgttccatgcttgaagactctgcaggaggaggtcatggaagcaatgggaattaaggaaacacgcaaatacaagaaggtgtattggtattag

SEQ ID NO: 230704 - DNA, 300 bp, synthetic construct
  misc_feature 1..300: note = Description of Artificial Sequence: Synthetic coding sequence
  source 1..300: mol_type = other DNA
atgcgtctctccgccctgctggcccttgcatccaaagtcaccctgcctccccattaccggtatggtatgtcacctccaggttccgtcgctgacaagcgcaagaatcccccatggattaggcggcgacccgtcgtggttgagccaatctctgatgaggactggtacctgttctgtggggacacagtggagattctggaggggaaggacgccggaaagcaagggaaggtggtgcaggtcatacggcagcgtaattgggtagttgtgggtgggcttaacactcattataggtatatcggctag

SEQ ID NO: 230705 - DNA, 207 bp, synthetic construct
  misc_feature 1..207: note = Description of Artificial Sequence: Synthetic coding sequence
  source 1..207: mol_type = other DNA
atgcggctctctgccctcctggctctggccagcaaagtgactctgccacctcactatcggtatgggatgtcccccccaggctcagtagccgacaagagaaagaatcctccgtggattcggagaagacccgttgtggttgagcccatctccgatgaagactggtatttattttgtggcgacaccgtcgagatactggagggtaagtag

SEQ ID NO: 230706 - DNA, 522 bp, synthetic construct
  misc_feature 1..522: note = Description of Artificial Sequence: Synthetic coding sequence
  source 1..522: mol_type = other DNA
atgagattaagcgcacttctggccttagcctccaaggttaccctgcctccgcactacagatacggcatgtcacctcccggatctgtggctgataagcgcaagaatcctccatggattcgtagacggcctgtggtagtggagccaataagcgacgaggactggtatctgttttgtggggacaccgtggaaatcctggagggcaaagatgctgggaaacagggaaaagtcgtacaggttattagacagagaaactgggtcgtggtgggcggactgaacacccattatcgctacatagggaagacaatggactacagaggtactatgatcccctctgaagcgcctctgctgcatcggcaggtaaagctggtagatcctatggacagaaaacctactgagatcgagtggagatttaccgaggcaggcgagagggttagggtgtccactaggagtggacggatcattccaaaacccgagtttcccagagcagacggcattgtacccgaaacatggattgacggatag

SEQ ID NO: 230707 - DNA, 4395 bp, synthetic construct
  misc_feature 1..4395: note = Description of Artificial Sequence: Synthetic coding sequence
  source 1..4395: mol_type = other DNA
atgttctccttcgtggatctgcggctcctcctcttactggccgctacggcattgctaacccacggccaagaagagggacaggttgagggacaggacgaagacataccccctataacctgtgttcagaacggccttagataccacgaccgtgatgtgtggaaaccagagccctgtagaatctgcgtctgtgataatgggaaggtgttatgtgatgacgtgatttgtgatgaaactaaaaattgccccggagccgaggttcccgagggcgagtgctgcccggtctgccctgacggctctgagtcacctactgaccaggagactaccggagtagagggcccaaaaggggacaccgggcctaggggcccaagaggcccagctggccctcccggtcgggacggcataccaggacagccaggccttcctggccctcctggccctccagggcctcctggccctccagggctgggcggaaactttgcccctcaactcagctacggctatgacgaaaagtcaaccggcggtatcagtgttcccggtcctatgggcccatctggcccacggggtctccccggaccacctggggcacctgggcctcaggggttccagggacctccaggcgaacctggtgaacctggcgcatccggacccatgggcccaaggggtccccctggacctcccggtaaaaacggagatgatggtgaagctgggaagccaggacgaccaggagagcgcggtccacccggaccacagggagccagaggactgccaggaacggctgggctccccggaatgaaggggcaccggggttttagcggtctggatggggctaaaggcgacgccggaccggcaggtcctaagggggagcccggatcacccggtgagaacggtgctcccggacagatgggaccccgtgggctccctggcgaaagaggtcgcccaggcgctcccggacctgccggagctcggggaaacgacggggctacaggcgcagcgggtccccctggacctaccggtcccgctggccctcccggattccctggggctgttggcgcaaagggggaggcagggcctcaaggtccaagaggctccgagggccctcagggcgtgcgcggtgagccgggaccccctggaccggctggggctgccggacccgctgggaaccccggagcagatggccaacccggagccaagggcgctaacggggctccgggtattgctggcgctcctggcttccccggtgctagagggccaagcggtccacaggggcctggaggtcctcccggtccaaaagggaacagcggcgaacctggagcgccaggctcaaaaggcgatacgggtgccaaaggggaacctggacctgtcggggtgcaaggtcctcccggaccggcaggcgaggaaggcaagcggggagcgaggggcgaacccggacccaccggcctgcctggccctccaggagagcggggaggtccaggctcccggggatttcccggagcggatggcgtggccggacccaagggacctgccggagaaagaggcagcccgggaccagccggtccaaaggggtccccaggagaggctggcagacctggggaagctggcctgccaggtgccaaaggtctcacagggagccctgggtctcccggtccggatgggaagactggcccaccagggcctgccggacaggacgggcgtcccggtccgcctggacccccaggagcccgtggacaggctggcgtaatgggatttcctggccctaaaggtgctgcgggagaaccaggcaaggccggagagcggggtgtcccgggtcctccaggagccgtcggacccgcaggaaaagacggagaggccggagctcagggccctcccggtccagctggtccagccggagagcggggagagcagggacctgcagggagtccagggttccagggactaccaggtccggcagggcctccgggagaggcaggaaagccaggagagcaaggtgtccccggtgacctcggagcaccagggccttccggagctaggggggagaggggctttcctggagaaagaggagtgcagggaccccctggtccagcgggaccaagaggcgcaaatggcgcaccagggaatgatggggcaaagggcgatgccggtgcacccggtgccccaggtagccagggggctcctggcctacaggggatgcccggagagcgcggtgccgctggactgcccggacctaagggggatcgtggagacgctgggcctaaaggcgcagacggctctcctggcaaggacggcgtgagaggcctgacaggccctattggccctcccggaccagccggtgccccaggggataagggcgagtcaggcccatcaggcccagctggacccacgggggctagaggagcccctggggataggggggagcctgggccacccggacctgccggttttgcagggcctccgggagccgatgggcagcccggagcgaagggagaacctggcgatgcaggcgctaagggagacgcgggacctccaggacccgcaggaccagccggaccaccaggcccaatcggaaacgtgggcgcacccggtgccaagggcgcacggggaagtgcagggcctcccggagccaccgggttccctggagccgcaggaagagtgggtccccctggcccttcaggcaacgctggccctcccggaccccctggtcccgctggcaaagagggcggtaagggcccacgcggagagactgggcctgctggaaggccaggcgaggtggggcctccaggccctcccggtcctgctggagagaaagggagccctggggctgatggccctgcaggggctccaggaaccccaggccctcaggggatcgccggtcaacggggagtggtcggcctgccgggacagagaggggaaagaggatttccaggcctaccaggcccaagcggcgaaccgggtaagcaaggccctagcggggcttctggagaaagaggacccccaggacccatgggccctcccggactggcagggccacccggtgaaagcggcagagaaggagcccctggcgctgagggctcacctggcagagacggatctcccggagcaaagggcgatagaggagaaactggcccagccggacccccaggagcccctggcgctccaggcgctccaggccctgtgggaccagcgggaaaatcaggcgatagaggcgagactggccctgctggacccacggggcctgtagggccagtgggagcaaggggtccagctggccctcaagggcctaggggggacaagggcgagaccggcgagcagggagatcgcggaatcaaaggccatcggggattctcgggacttcaggggcctcctgggcctccaggaagtcccggtgaacaagggcctagtggggcaagtgggccagctggtcctcgtggaccccctggatccgccggagctcccggaaaggacggtctcaatggattacccggtcctatcggaccgcctggtccgagaggccgaactggcgatgccggaccggtcggcccaccaggccctccgggacctcctggaccccctggcccaccatccgccggttttgactttagttttctgcctcagcctccccaggagaaggcccatgacgggggtcgctattaccgagctgatgacgcaaacgtggtccgcgacagggatctcgaagtagataccactctgaagagcctgtcccagcagattgagaacatccgaagtccagaaggaagtcggaagaatcccgctcggacgtgtcgtgatctgaagatgtgccatagtgattggaagagtggggagtactggattgatcccaatcagggctgtaaccttgatgcaattaaggtcttttgtaatatggaaaccggcgagacctgtgtctatccaacccagccatcagtggctcagaaaaattggtacatcagtaaaaatcctaaagataaaaggcatgtttggtttggagagtccatgactgatgggtttcagttcgagtatgggggtcaaggctccgatcccgcagatgtggctatccagctgacattcctgaggctgatgagcaccgaggctagtcagaatatcacataccactgcaagaacagtgtagcctacatggatcaacaaacgggcaacctgaaaaaggccctgctcctccagggctccaacgaaatagagatccgcgcagagggaaatagccggtttacctacagtgtcaccgtggacggttgcacttcccacactggagcctggggcaagacagtgatcgaatataaaacaacaaaaacaagccggctgcctataatcgatgtagcaccccttgacgtgggtgcccctgaccaggagttcggattcgacgtggggccagtctgttttctgtag

SEQ ID NO: 230708 - DNA, 285 bp, synthetic construct
  misc_feature 1..285: note = Description of Artificial Sequence: Synthetic coding sequence
  source 1..285: mol_type = other DNA
atggcatctgtggtcttggccctgaggaccagaactgccgtgactagcctgctctcccccacccctgcgaccgcactggcggtgcggtacgcctctaaaaagtcaggaggctcatctaagaacttgggtggcaagtcaagcgggagacgccaggggataaagaagatggagggccattacgtacacgcaggcaacatcatcgccacacagcgtcactttcgctggcaccccggtgcccacgtaagctgttcggtggccgctcctttatttccctttctggggtag

SEQ ID NO: 230709 - DNA, 282 bp, synthetic construct
  misc_feature 1..282: note = Description of Artificial Sequence: Synthetic coding sequence
  source 1..282: mol_type = other DNA
atggaagggcactatgtgcatgctgggaacattatcgcaacgcaacgtcattttagatggcacccgggagcacacgtgggtgttggcaaaaataaatgtctttatgctcttgaggaaggaatcgttcggtacacaaaggaggtatacgttcctcatccgagaaacacagaagctgtggacctcattacaaggctcccaaagggggcagttctgtacaagaccttcgtccacgtggtgcctgcaaaacctgaaggcacttttaagctggtggccatgctgtag

SEQ ID NO: 230710 - DNA, 282 bp, synthetic construct
  misc_feature 1..282: note = Description of Artificial Sequence: Synthetic coding sequence
  source 1..282: mol_type = other DNA
atggagggccactatgtgcatgccggtaatatcattgccactcagcgccacttccggtggcacccaggagcccacgtgggtgtgggcaagaacaaatgcctatacgctctggaggaggggatcgtgaggtacaccaaagaagtgtacgttcctcatccacgcaacacggaagctgttgacctgattacccgattgcccaagggagcagtattatacaagaccttcgtgcacgttgtacccgctaaacccgaaggtacctttaaacttgtcgcaatgctttag

SEQ ID NO: 230711 - DNA, 771 bp, synthetic construct
  misc_feature 1..771: note = Description of Artificial Sequence: Synthetic coding sequence
  source 1..771: mol_type = other DNA
atgcccctccataagtaccctgtttggttatggaagaggcttcaactgcgtgaaggcatctgcagcagactgcccggtcattatctccgcagcctggaggaggagcggacgcctacccccgttcactaccggcctcacggggctaaattcaagattaatcccaaaaatggacagagggagcgtgtggaagacgtgcccatccccatatactttccccctgagtcccaaaggggtctgtggggtggcgaaggttggattttgggacagatctacgctaacaacgataagctcagtaaacgtcttaagaaagtgtggaaaccccagctgttcgaacgcgagttttattcagagatcctcgacaagaagtttaccgtgactgtgacaatgcgaaccttggacctcatcgacgaggcttatggactggacttttatattttaaaaacccccaaggaagatttgtgctccaaattcgggatggatcttaagagaggaatgcttctccgtctagctagacaggatcctcaattgcatcctgaagaccccgagcgacgcgctgcaatttatgacaaatataaggaattcgccatacctgaagaggaggccgagtgggtcggtctcacactggaagaagcaatcgaaaagcagcggttgctcgaggaaaaagaccccgtccctctgttcaaaatctatgttgcggagctgattcaacagctccagcagcaggccctgagtgagcccgctgtggtccagaagagggcttcgggacagtag

SEQ ID NO: 230712 - DNA, 771 bp, synthetic construct
  misc_feature 1..771: note = Description of Artificial Sequence: Synthetic coding sequence
  source 1..771: mol_type = other DNA
atgccactgcataagtatcctgtctggctgtggaaaaggcttcagcttcgagagggaatttgttctcgcctgcctggacattacctgaggagtttggaggaagaaaggaccccaactccggtgcactaccgccctcatggagcaaaatttaagatcaaccccaagaatgggcagcgagagagagtagaagatgtgccaatccctatctactttccccctgagagtcagcggggtctgtggggtggcgagggctggattctaggccagatatatgctaataacgacaagctgtcaaagaggctcaagaaggtatggaaaccccaactctttgaacgggaattctactctgagatcttagataaaaagttcacagtcacagtgacaatgcgcacacttgatctgatcgatgaagcctacggtctcgacttctacatcctgaagaccccgaaggaggacttatgtagcaaattcggaatggacctgaaaagaggcatgctgcttaggttggcacggcaggatccacagcttcatcctgaagatcccgaaagacgcgcagccatctatgacaagtataaggaatttgcaattcccgaggaggaggccgaatgggtaggtctgactctggaagaagccattgaaaagcaacgcctcttagaggagaaagatcctgtgccactgtttaagatctatgtcgcagaactcatccagcagcttcaacagcaggcgctcagtgagcctgccgttgttcaaaaaagagcaagcggtcagtag

SEQ ID NO: 230713 - DNA, 771 bp, synthetic construct
  misc_feature 1..771: note = Description of Artificial Sequence: Synthetic coding sequence
  source 1..771: mol_type = other DNA
atgccacttcacaagtaccccgtctggctgtggaagagactgcagctgcgcgaagggatctgttctagactgcctgggcactacctgaggagtctggaagaggagagaaccccaacacccgtacactacaggcctcacggtgctaagttcaagataaatcctaagaacggacaaagggaaagagttgaagatgtcccaattccaatctattttccgcctgagtcacagcgaggactatgggggggagaaggttggattctggggcagatctacgccaacaatgacaagctgagcaaacgtctgaagaaggtttggaaaccacaactgttcgaaagagagttctatagcgagatcctcgataagaaatttacggtgacagtaacaatgaggacactggacttgatcgatgaagcatatgggctggacttctacatactcaaggcttcaggcgaagatctctgttccaagttcggtatggatctgaaaagaggaatgctcctgcgtttagccagacaggaccctcagttacaccccgaggacccggagcgacgtgccgcaatttatgataaatacaaggagttcgctatccctgaagaggaagccgagtgggttgggctgacactcgaggaagccatcgaaaaacagcgattgctggaggagaaagaccccgtccccctgttcaagatttacgtggcagagctgatccaacagttacaacagcaagccctgagtgaacccgctgtcgtccagaagcgggcaagcggtcaatag

SEQ ID NO: 230714 - DNA, 771 bp, synthetic construct
  misc_feature 1..771: note = Description of Artificial Sequence: Synthetic coding sequence
  source 1..771: mol_type = other DNA
atgcctttacacaagtacccagtctggctgtggaagcggctgcaacttagggaaggcatctgttctcggctgcccggacattacctcaggtcacttgaagaagaaagaacacccacaccagtccactatcggcctcatggagctaaattcaaaatcaaccccaagaatggccaacgggaacgtgttgaggacgtcccaatcccaatctacttccccccagagtcacagagaggtctctggggcggagaagggtggattctgggtcagatctacgccaataatgataagcttagtaaaaggctcaagaaggtttggaaaccacagctcttcgagagggaattttattctgagattctggacaagaaattcaccgtaacggtgactatgagaactctcgacctcatcgacgaagcttacggattggatttttacattctgaaagcttccggcgaagatctctgctcaaaatttggcatggacctgaagaggggcatgctgctcaggctggctaggcaggacccgcagctccacccagaggacccagaacggcgagccgctatctatgataagtacaaggagtttgccattcccgaggaggaggctgagtgggttgggctgaccctggaggaggccatcgagaagcagagactgcttgaggagaaggacccagtacctctgtttaaaatttacgtagctgagctgatacagcagcttcagcagcaggcgctgtcggaacccgctgtggtacagaaaagggccagtggtcagtag

SEQ ID NO: 230715 - DNA, 147 bp, synthetic construct
  misc_feature 1..147: note = Description of Artificial Sequence: Synthetic coding sequence
  source 1..147: mol_type = other DNA
atgagcagagctggcggaagaggagaacagtctaggtggggtagacgagccgagctgagaggcctcggtcgtcctgaggcacctctacgtctgggaccggatgtctgtggctctgtcccatgtgcaaggggcgctgggtccgaatag

SEQ ID NO: 230716 - DNA, 723 bp, synthetic construct
  misc_feature 1..723: note = Description of Artificial Sequence: Synthetic coding sequence
  source 1..723: mol_type = other DNA
atgccactgcataaatacccagtttggctctggaagaggctccaactgagagaaggcatctgctcccgactgccagggcactatcttaggtctttagaagaggagcggacgcccacacccgtccactatcgaccgcacggcgcaaagtttaaaataaatcctaagaatggtcagagagagcgcgtcgaagacgtaccaatccccatatattttccacctgaatctcagaggggtctgtggggaggagagggttggatcttaggccagatctacgcaaacaacgataaactgagcaagcgcttaaaaaaggtatggaagcctcagctcttcgagcgggaattctactctgagatactcgataaaaaatttacagtgaccgtgacgatgcgtacgcttgatcttatcgatgaagcatacgggttggatttttatatcttaaagaccccaaaggaggatctgtgttccaagtttggcatggatctgaaacgtggaatgctgttaaggcttgccaggcaggacccccagctgcaccccgaggatcccgaacgtcgggctgcaatatatgataagtacaaggagtttgccattcccgaagaagaagctgaatgggtgggtctcaccctagaagaggccatcgagaaacagagactccttgaggaaaaagatcccgttcccttatttaagatttacgtggctgaactgattcagcaactgcagcagtag

SEQ ID NO: 230717 - DNA, 657 bp, synthetic construct
  misc_feature 1..657: note = Description of Artificial Sequence: Synthetic coding sequence
  source 1..657: mol_type = other DNA
atgccgttacataagtatcccgtgtggctgtggaaacgcttgcagctgcgggaggggatctgctctcgactgcccggacactatctcaggtctttggaagaggaacggaccccgaccccggtccactaccggccacatggagccaagttcaaaatcaatccgaagaacggccagcgtgaacgtgttgaagatgtcccaatccctatctatttcccccctgagtcccagagaggcctgtggggtggagagggctggatccttggtcagatatatgcaaataacgataagctgtctaaacgcctgaagaaagtgtggaagcctcagctttttgagagagaattctactctgagatcctggataagaagtttaccgtgacagtgacaatgcgcactcttgaccttattgatgaagcatatggactcgatttttacattttaaagacacccaaggaggacttgtgcagcaaatttggtatggatctcaagaggggaatgctgttgcgactggccaggcaagatccacagctccacccagaagaccccgagaggcgggcagcaatctacgataagtacaaggagttcgcaatacctgaggaggaggccgaatgggtgggtttaacgttggaggaggctatcgaaaagcagcgcttgctctag

SEQ ID NO: 230718 - DNA, 585 bp, synthetic construct
  misc_feature 1..585: note = Description of Artificial Sequence: Synthetic coding sequence
  source 1..585: mol_type = other DNA
atgcccttacacaaataccctgtctggttatggaagcggctgcagctgagggaaggcatctgtagtcgtctacctgggcattatctgcgttctctggaggaagagcgaacccctacacctgtccactacaggccccacggcgcaaagttcaagatcaaccccaagaatggtcaacgcgagagggtcgaggatgtgccaattcccatctatttccctcccgagagccagcggggactttggggcggagagggttggatcctaggacagatctacgcaaacaacgataagctgagtaaacgtctgaaaaaggtgtggaaaccgcagctcttcgagcgtgagttttattcagaaatcttagataaaaagtttactgtgactgtgactatgcggactctggacctgatcgatgaggcctacggcttggacttctacatacttaagaccccgaaagaggatctgtgctccaagtttggaatggacttaaaaagggggatgctgctgagacttgccaggcaagatccacagctgcatcccgaagaccctgaaagacgagccgcaatatacgacaaatataaggaattctag

SEQ ID NO: 230719 - DNA, 1047 bp, synthetic construct
  misc_feature 1..1047: note = Description of Artificial Sequence: Synthetic coding sequence
  source 1..1047: mol_type = other DNA
atgccgggttggaggctactcacccaagtgggggcacaggtgctcggcaggctgggcgacgggctgggggctgccctggggcctggaaaccggactcatatatggctgttcgtgagagggttgcatggaaagtccgggacctggtgggatgaacatctgagcgaagagaatgtgccattcataaagcaattggtgtccgatgaagacaaagcccagttggcctcaaagctgtgccccctcaaagatgaaccctggccaattcatccgtgggagccgggaagcttcagagtgggtctcatcgcactaaaactggggatgatgccattatggacgaaggatggccaaaagcacgtggtgacactgctgcaggtgcaggattgtcacgtgctgaagtacaccagcaaagaaaattgcaacggcaaaatggccaccctcagtgtgggcggaaagacagtgtcccgcttccgcaaagctacatctatcctcgagttttacagagagctggggctgccaccaaaacaaactgtaaaaatcttcaacataacagataatgccgctatcaagcctgggacgccactctacgctgcacactttcgtcctggccaatacgttgacgttactgccaagacaattggaaagggcttccagggcgtcatgaagcgttggggattcaaggggcaaccagccactcatgggcagaccaagacgcacagacgccctggtgcagtagcaaccggagacattgggagggtttggccagggaccaagatgcccggtaagatgggaaacatttatcgcaccgagtatgggttaaaggtgtggcggatcaataccaaacacaatatcatctacgtaaacggttcagttcccggtcataaaaactgtcttgttaaggtgaaggacagtaagctgcctgcttataaagatttagggaagaatttgccatttcctacctactttccagacggcgacgaggaagaacttccagaagacctatacgatgagaatgtgtgtcagcccggtgctcctagtataacctttgcttag

SEQ ID NO: 230720 - DNA, 1128 bp, synthetic construct
  misc_feature 1..1128: note = Description of Artificial Sequence: Synthetic coding sequence
  source 1..1128: mol_type = other DNA
atgccgggatggcgtcttctcacacaggtcggagcccaggtgcttggcaggctgggagacggcctgggcgcagcactagggcctggaaaccgagttaccacaaattccctcaatgttagtttgatccggagaaatgttgggtcagaggagaaggtaggggacctgaagaagcgcactcacatttggctctttgttagaggcttgcatgggaagagcggcacatggtgggatgagcacctgagcgaggagaatgtacccttcattaagcagttggtgagcgacgaggataaagctcagttggccagtaagctttgcccactgaaagacgagccttggcccatccacccttgggagcctggatcctttcgagtcggcttaattgccctgaaactgggcatgatgccactgtggaccaaggatggacaaaagcatgtggttaccctcttgcaagtccaagattgccacgttttgaagtatacatcaaaggagaactgtaacggtaagatggcaaccttgagcgtcggcggaaagacagtatctaggttccgcaaggcaacgtctatccttgagttctaccgggagctcggattgccccctaaacagactgtaaagatcttcaacattacagacaatgccgctattaagcctgggacccctttgtacgctgcccatttcaggccagggcagtatgttgatgtgaccgctaagacaatcggaaagggctttcagggtgtgatgaaacgatgggggttcaagggacagccagctacacacgggcagactaagacccacaggcgccctggagcagttgccaccggggacatcgggcgagtgtggccagggaccaagatgcctggaaagatgggaaacatctatcgcaccgaatacggccttaaagtctggcggatcaacacaaaacacaatatcatctacgtgaacggcagtgttccgggtcataagaactgcctcgtcaaggtcaaagatagcaaacttcccgcttacaaggatctggggaagaacctccccttccccacttactttcccgatggtgacgaagaggaattgccagaggacctgtacgatgaaaacgtctgtcagccaggcgcaccaagtatcacgtttgcttag

SEQ ID NO: 230721 - DNA, 1092 bp, synthetic construct
  misc_feature 1..1092: note = Description of Artificial Sequence: Synthetic coding sequence
  source 1..1092: mol_type = other DNA
tagttttttccttcgcaacgggcttccgccggagaccgctctggcggacattgtgagaactttcctacggccaccgcctccacctggaggtggcgaggagattcactgaaggccgagcggcagggagcaaggaaatctacacacatttggcttttcgtgaggggcctacatggcaagtctggaacgtggtgggacgagcacctgtcagaggaaaacgtgccttttatcaagcagctggtgtcagatgaagacaaggcacaactcgcttcaaagttgtgcccactgaaagatgagccctggccaattcatccgtgggagcctggctcttttcgagtaggccttattgccctcaaactcggcatgatgcctctttggaccaaagatggtcaaaagcatgtggtgactctgcttcaggtccaggactgtcacgtcctgaaatacacctctaaggaaaactgtaatggcaagatggccaccttgtcagtgggaggaaagaccgtgtcccgctttaggaaggctactagcatcctcgagttctatcgcgagctgggattgcctcccaaacaaaccgtgaagattttcaacattactgacaacgccgctattaagccgggaacgccactctacgcagcacatttccgacccggacaatacgtggacgtgactgcaaaaacaattggcaaaggctttcagggcgtgatgaagcggtggggttttaaaggtcagccagctactcatggacaaacgaagacccacagaaggcctggcgcagtggccactggcgacatcggacgcgtatggcccggaactaagatgcctggcaaaatgggaaatatctacagaaccgagtacgggcttaaagtgtggcgcatcaatacaaagcataatattatctacgtgaacgggtctgttcctggccacaagaattgtctggtgaaggtgaaagatagcaaattacctgcttataaggatctggggaaaaatctgcctttcccaacgtatttcccggatggggatgaagaagagctgccagaagacctctatgacgagaacgtatgccagcctggggctcccagcattactttcgcctag

SEQ ID NO: 230722 - DNA, 486 bp, synthetic construct
  misc_feature 1..486: note = Description of Artificial Sequence: Synthetic coding sequence
  source 1..486: mol_type = other DNA
atggcaggcatcctgcgactcgttgtccagtggccaccgggacggctccagacagtgacaaagggggttgagagtctgatctgcacggattggataagacataagttcaccagaagtcgtatacctgagaaggtgttccaggcgtccccagaagaccacgagaaatatgggggagacccacagaacccacacaagctgcacatcgtcactagaatcaaatccacaagacgaagaccttactgggaaaaggatatcatcaagatgctaggactagaaaaggcacacactccacaggtgcacaagaatatcccgagtgtgaacgccaagctcaaggtggtcaagcacctaataaggattaaaccactgaaactgcctcagggcctgcccgctgaggagaatatgagcaacacttgccttaaatcaaccggtgagctggttgtccagtggcatctcaagccagtcgagcaaaaggcacacgagagctag

SEQ ID NO: 230723 - DNA, 486 bp, synthetic construct
  misc_feature 1..486: note = Description of Artificial Sequence: Synthetic coding sequence
  source 1..486: mol_type = other DNA
atggccggtatcctccgactcgtcgttcagtggccacccggacgcctgcaaaccgttactaagggggtcgagtcacttatttgtactgattggattaggcataagtttacaagatcaaggattccagagaaggtttttcaggcatcgccggaggaccacgagaagtatggtggggatccgcagaatccgcacaagctgcatatagtgactagaattaaaagcacccggagaaggccctattgggaaaaggatattatcaagatgctcggcctggagaaggctcacacaccccaagtgcataagaatatcccctccgtgaacgctaaactgaaggtcgtcaagcatctgattaggatcaagcctctaaagctcccccaaggcttgcccgctgaagagaacatgagcaacacatgtctgaaatccacgggggagctggtggtccagtggcacttaaagccagtagaacaaaaggctcatgagtcctag

SEQ ID NO: 230724 - DNA, 705 bp, synthetic construct
  misc_feature 1..705: note = Description of Artificial Sequence: Synthetic coding sequence
  source 1..705: mol_type = other DNA
atggccgagagaggttactccttcagtctaaccacgttctcccctagcggaaaactggttcagattgagtacgccctcgctgctgtcgccggtggcgcaccgagcgtgggcatcaaggcggcaaatggagtcgtactagcaactgagaagaagcagaagtccattctctatgatgagcgctctgtgcacaaggtcgagcccattaccaagcatatcggactagtgtacagtggaatggggccagattacagggtgcttgtacatagagcccgaaagttggcccagcaatactacctcgtgtatcaggagcctattcccaccgcccaactcgtccagcgggtcgccagcgtgatgcaggagtacacacagtctggaggtgtccggccattcggggtgagcttgctgatttgcggctggaatgaagggcgaccttacctgtttcaatcggacccgagtggagcatattttgcgtggaaagcaactgctatgggcaagaattatgttaacgggaagacgttcttagagaagcgctacaatgaggaccttgaattggaggatgccatccatacagccatactgactctcaaagaaagtttcgaaggacagatgaccgaggataacatcgaggtcgggatctgcaatgaagcaggatttaggcgactgaccccaaccgaggtgaaggattatcttgcagctatcgcatag

SEQ ID NO: 230725 - DNA, 324 bp, synthetic construct
  misc_feature 1..324: note = Description of Artificial Sequence: Synthetic coding sequence
  source 1..324: mol_type = other DNA
atggcattagccatgcttgttctggtcgtatctccttggtccgctgctaggggggtgctcaggaattactgggagagacttctcagaaagctgccacaatctagaccaggctttccctcgccaccttggggcccagccctggcagtccagggaccagccatgttcactgaacctgctaatgatacatccggatccaaagagaatagctctctgttggactcaatcttttggatggcagccccaaaaaacaggcggaccatcgaggttaacaggtgtcgccgaaggaacccgcaaaaactgatcaaagtcaaagtgatgcattag

SEQ ID NO: 230726 - DNA, 279 bp, synthetic construct
  misc_feature 1..279: note = Description of Artificial Sequence: Synthetic coding sequence
  source 1..279: mol_type = other DNA
atggccgtcttggccggatcactgttaggtccaacctccagatccgcagcgttactggggggtcgctggctgcagcctagagcctggctcggctttcctgatgcctgggggctcccgacccctcaacaggccagagggaaggctcgaggcaacgagtatcagccttcgaatattaagagaaagaacaaacatggttgggtaaggcgtcttagtaccccagctggggtgcaggttatcctccgaagaatgctcaagggacgcaagagcctgtcgcactag

SEQ ID NO: 230727 - DNA, 513 bp, synthetic construct
  misc_feature 1..513: note = Description of Artificial Sequence: Synthetic coding sequence
  source 1..513: mol_type = other DNA
atggcagcttctgcatttgcaggggcagtaagggcagccagcggcatccttagaccgctgaatatactggcttcgagcacctaccgcaactgcgtgaagaacgcttcacttatcagcgcactgtccaccggtcgctttagccacatccagaccccggttgtgtcaagcaccccccgtttgacgaccagcgaaaggaaccttacatgtggccacacttccgtcatcttgaaccggatggctccagtgcttccttcagtgttaaagttgcccgttcgcagcctgacctatttctctgccagaaaaggcaagagaaaaaccgttaaagcagtgatagaccgcttcctgcgtctgcattgcggcctgtgggtgaggagaaaagccggatacaaaaaaaaactgtggaagaagacccccgcaaggaaaaaaaggttacgggaattcgtgttttgtaataagacacagagtaaactcctggataaaatgaccacatctttctggaagaggaggaattag

SEQ ID NO: 230728 - DNA, 567 bp, synthetic construct
  misc_feature 1..567: note = Description of Artificial Sequence: Synthetic coding sequence
  source 1..567: mol_type = other DNA
atggctgcgtccgcctttgctggcgctgtgagagccgctagcggaatactccgacccctgaacatcctggcctcaagcacctataggaactgtgtaaaaaacgcttccctgataagcgccctgtcgacagggcgattttcccacatacaaacccccgtggtgagcagtactcctaggctgacaacctcagagcgcaatctgacctgtgggcatacctcagtgattctaaatcgaatggctccggtgctgccttcagtccttaagctccccgttaggtctctgacttacttttctgctagaaagggcaaaaggaagaccgtgaaagccgtcattgatagattcctgcgtctgcattgcgggctgtgggtgcggagaaaagccggttataaaaaaaaactgtggaagaagactcccgctcggaagaagcggctgagagagttcgtgttttgcaacaagacacagagtaaattgcttgataagatgaccacatccttttggaaaagacgcaattggtacgtagatgacccttaccagaagtaccacgacaggacgaatctgaaggtctag

SEQ ID NO: 230729 - DNA, 312 bp, synthetic construct
  misc_feature 1..312: note = Description of Artificial Sequence: Synthetic coding sequence
  source 1..312: mol_type = other DNA
atggccaacctcttcatccgaaagatggttaatccactgctgtacctgtctagacacacagtgaaaccacgtgccctcagcacctttcttttcgggtccatcagaggcgcagctcccgttgccgttgagcctggagccgcagtgagaagccttctgagtcccggtctccttccccacctcctgcccgcactaggatttaagaataaaactgtcctgaaaaaacgctgtaaggactgctatctcgtcaaaaggaggggtcggtggtacgtgtactgtaagacacaccctcgacacaaacagaggcaaatgtag

SEQ ID NO: 230730 - DNA, 312 bp, synthetic construct
  misc_feature 1..312: note = Description of Artificial Sequence: Synthetic coding sequence
  source 1..312: mol_type = other DNA
atggcaaacctatttattcggaagatggtcaaccctttgctgtacttgtcccgccacaccgtgaaaccgcgtgcgcttagtactttccttttcgggagcatcagaggcgctgcccctgttgcggtcgaaccgggtgctgctgttagatcactcctgagtccgggactgctacctcacctgctgccagcactcggtttcaagaacaagacggtactcaaaaagcgctgcaaggattgctacttggtgaaacgacggggtcggtggtatgtatattgtaagacccaccctcggcacaagcaaaggcagatgtag

SEQ ID NO: 230731 - DNA, 312 bp, synthetic construct
  misc_feature 1..312: note = Description of Artificial Sequence: Synthetic coding sequence
  source 1..312: mol_type = other DNA
atggctaacctttttatcaggaaaatggtcaaccctcttctttatttatctaggcacactgttaaaccccgagccctctccacatttctttttggcagcattagaggggctgcccctgtcgctgtcgagccaggagcagcagtgcggagcctgctgtccccaggactgctcccgcacctccttccggctctgggcttcaagaataaaacggtgttgaaaaaacgatgtaaggactgctatcttgtgaaaaggcgaggacgctggtatgtatactgtaagacgcatcctcgccacaaacagcgccagatgtag

SEQ ID NO: 230732 - DNA, 312 bp, synthetic construct
  misc_feature 1..312: note = Description of Artificial Sequence: Synthetic coding sequence
  source 1..312: mol_type = other DNA
atggcgaatctgtttattcgcaagatggttaatcctttactctacctgagtcgccacactgtgaagcccagggccttaagcacgttcctcttcggcagtatcagaggggctgctccagtggccgtggagccaggggcagcggtccgctcactactaagcccaggcctattgccccacctcctgccggctttggggtttaagaataagactgtgctgaagaaaagatgcaaagattgctaccttgtcaaacgtagagggagatggtatgtgtattgtaaaacccaccctcggcacaaacaaagacaaatgtag

SEQ ID NO: 230733 - DNA, 1251 bp, synthetic construct
  misc_feature 1..1251: note = Description of Artificial Sequence: Synthetic coding sequence
  source 1..1251: mol_type = other DNA
atgcactttgttccctggctggctcggcctatcttccctccctgggataggggctacaaggatcctcgattctataggagtccacccttacatgaacacccactgtataaggaccaggcttgctatatatttcaccaccgatgcagattattggaaggcgtgaaacaggcgctctggttgaccaagacgaaactgatcgaagggttgccagagaaagtgctgtcgctggtcgacgatccgagaaaccacattgaaaatcaggatgagtgtgtattgaatgtcatcagtcatgctaggctgtggcagaccaccgaggagatccctaagcgcgagacatactgccccgtgatagtagataacctaattcagctgtgtaagtctcagattcttaaacatccctctttggctagacggatatgcgtacaaaacagtactttttccgctacctggaacagggagtccctacttctgcaggtgcggggaagtggaggcgcaagattgtcgacaaaagaccccctaccaactatcgcatcacgcgaggagatcgaagctaccaagaaccacgtgcttgaaaccttttatcctattagcccaattattgacctgcacgagtgcaatatctatgacgtcaaaaacgatacggggtttcaagaaggatatccctacccatacccccacacgctctacctactggataaggccaatcttcgaccccatcggcttcagccggaccaactgagagcgaagatgattttatttgcatttggcagtgcgcttgctcaggccagactcctgtatggcaacgacgccaaagttttagagcagcccgtcgtggtgcagtcggtagggaccgacgggagagtctttcatttcctcgtcttccagctgaacactactgatctggactgcaacgagggggtaaagaacctggcctgggtcgattcggatcagctcctttatcagcatttttggtgcctgcctgtgatcaaaaagcgtgttgtcgttaccggcccttgctttagtaaatctcaaatgtctacctcttttgttctcactccttcattcaatgccggagaggaggtaatgcagcgcaaccttcgagcaagtgcctccctcccaccttcaaccggctcgccagccagcgaactagtgaaagagcaggagcacgccgcaggacgagttctgcgcagggtgatgcttgactctgagacacctcgcgaagaactccctgctgccgatttttggaagtag

SEQ ID NO: 230734 - DNA, 879 bp, synthetic construct
  misc_feature 1..879: note = Description of Artificial Sequence: Synthetic coding sequence
  source 1..879: mol_type = other DNA
atgagcggagcttgcgctccacggggatcaagatccctgctgccttggatcggatgtacaaggagcctggactggagcccctctccattgcgaggccgttgcacctcctgtcccggatggagagggcgatcctttcgccctggaacagccgctacgcgtacacaggggtcgacggccagaccactgtttacaagtatccggtgtaccaagactaggccagctatctcgtttaccactgtcgccgcatttagtaggtcactcctcctgcaagtaagggggtccggtggggcaagactgtcaaccaaggatccactgccaacaatagccagcagagaggagatcgaagcaacaaagaaccacgtgctggagacgttctaccccatctcgccaattatcgacctgcatgaatgcaacatttatgatgtgaaaaatgataccggttttcaggaagggtacccctacccctacccccacactctctatctactggacaaagcaaacctgcgtccacaccgccttcagcctgaccaactacgagcaaagatgatactgttcgcttttggctctgctttggctcaggcaaggctgttatatggaaacgacgctaaagtacttgaacagcccgtagtagtgcaatccgtagggacagacggcagagtgtttcacttcctggtgtttcaactgaatacgacggacttggactgcaacgagggtgttaagaacctggcctgggttgattccgatcagctgctctaccagcatttttggtgtctccccgttataaagaaaagagttgttgtggaaccggttggccctgtgggatttaagccagagactttccgtaaatttctggccctgtacctccatggcgcagcctag

SEQ ID NO: 230735 - DNA, 1272 bp, synthetic construct
  misc_feature 1..1272: note = Description of Artificial Sequence: Synthetic coding sequence
  source 1..1272: mol_type = other DNA
atggctttagcatccggcccagccaggcgagccttagcagggagcggtcagcttggactgggcggtttcggcgcacccaggagaggcgcatacgaatggggggtgcggagtacgagaaagtcggaacccccaccccttgatcgggtttacgagattccaggactggagccgatcaccttcgccggtaaaatgcacttcgttccctggcttgctagaccaatctttcccccttgggaccggggttacaaagacccccgtttttatagaagcccccctctgcatgaacacccactgtacaaagaccaggcttgttatattttccaccacagatgccgactgctggagggagtgaagcaggccttatggctgacaaaaacaaagctgatcgagggacttccggagaaggtcctttcactagtcgacgaccctaggaatcacatcgagaatcaggatgaatgtgttcttaacgtgatatctcatgcaaggttgtggcagaccacggaagagatccccaaacgggaaacctattgccctgtgatagtggacaaccttatccagctttgtaagtctcaaatccttaaacatccaagcttggccagaagaatatgcgtccagaactcgaccttttccgccacgtggaatcgggagagcctcctcttacaagtgaggggtagcggtggagccaggttgtctactaaagatccacttcccacaatcgccagtcgggaagagattgaagcaaccaagaatcatgttctcgaaactttctaccctattagccccatcatcgatctccacgagtgcaatatctatgatgtcaagaatgatacagggttccaagagggttacccttacccctacccacacactctgtacctgctcgataaggccaatttgaggcctcacagactgcagccagatcagctgcgagcaaaaatgatcctgttcgcctttggatccgccctggcgcaggccagactgctatatgggaacgacgcaaaagtcttggaacagcctgtcgtggtgcaatccgtcgggactgatggacgagtgttccattttctggttttccagctgaacacaactgatctggactgcaatgagggcgttaaaaacctcgcctgggtggacagcgatcagctactataccagcatttttggtgtctgcccgtcatcaagaaacgggtggtggtggagcctgtggggcctgtgggcttcaagcccgagactttccggaagttcctcgccctgtatttgcacggcgctgcgtag

SEQ ID NO: 230736 - DNA, 795 bp, synthetic construct
  misc_feature 1..795: note = Description of Artificial Sequence: Synthetic coding sequence
  source 1..795: mol_type = other DNA
tagtctctgttgttacaggtgcgaggctcaggaggcgcaagattgagtactaaggatccactccccaccattgcctcacgagaggagattgaggcaaccaagaaccatgtgcttgaaacgttttacccaatatccccaattatcgatttacatgaatgtaacatctacgacgtcaagaatgataccggcttccaggagggttacccgtacccttatccacatactctgtatttattggataaagcaaacctgcgacctcacaggttgcagcctgatcagctgcgggcaaagatgatccttttcgcttttggcagcgccttagcccaggccaggcttctgtatgggaatgatgcgaaggtccttgagcagcccgtagtggttcagtcagtggggaccgacggaagagtctttcattttctggtctttcagctcaacacgaccgatctggactgcaacgagggggtcaagaacctggcatgggtggactctgaccagctcttataccaacacttttggtgtctccccgttattaaaaagcgcgtggtagtgacagggccttgcttttccaagagccagatgagcacaagcttcgttctgacccccagttttaatgcaggggaggaagtcatgcagagaaatctgcgggcttcagcgtctctgcctccctcgactggatcacccgcaagtgaactggtcaaagagcaagagcatgccgctgggcgtgtgctaaggcgggtgatgctggatagcgagactcctagagaagaactcccagcagccgatttttggaagtag

SEQ ID NO: 230737 - DNA, 1143 bp, synthetic construct
  misc_feature 1..1143: note = Description of Artificial Sequence: Synthetic coding sequence
  source 1..1143: mol_type = other DNA
atggcagctccttggtggagagcagccctgtgtgagtgcaggaggtggcgcggtttcagtacatcagccgttctgggccgaaggacgcctcccctggggcctatgccaaactcagatatcgatttgagcaacctagagcggctggaaaagtacaggtcatttgaccgctaccgacgtcgagccgagcaggaggcacaggcccctcattggtggcgcacataccgggagtactttggcgaaaagaccgaccccaaagagaagatagatatcggcctacccccaccaaaagtcagccggactcagcaactactggagcgtaagcaggctatccaggaactccgagccaacgtggaggaggagagagccgcacgcctgcggaccgcgtctgttcccttggacgccgttcgcgctgagtgggaaaggacctgtggtccttaccataaacagagactggctgagtattatgggctttatcgtgacctgtttcatggtgccacattcgtgccccgtgtcccactgcatgttgcctacgccgtgggagaggacgacttgatgccagtgtactgtggcaacgaggtgaccccaacggaggctgcacaggcccctgaggtgacatatgaagctgaggaagggtctttatggacgctgttgctgacctccctcgacggccacctgctcgagcctgatgccgaatacctccattggttacttacaaacattcccggtaacagggtcgcagaaggccaggttacatgcccctatttaccacctttccctgccaggggaagtggaatccaccgcctagccttcttgctgttcaagcaggatcagcccatagatttcagtgaagatgcacgaccatccccgtgttaccagctggctcagagaactttcagaacatttgacttttataaaaagcaccaggaaactatgacacccgctggcttgagttttttccagtgcagatgggacgactccgtaacctatatctttcaccagctgttagatatgagggagccggttttcgaattcgttaggccgccaccctatcatccaaagcaaaagcgctttccacaccgacagcctctgcgctacctggaccgctatcgggatagccatgaaccaacctacgggatatattag

SEQ ID NO: 230738 - DNA, 591 bp, synthetic construct
  misc_feature 1..591: note = Description of Artificial Sequence: Synthetic coding sequence
  source 1..591: mol_type = other DNA
atgcccgtttattgcggaaacgaggtcactcccacagaggctgcccaggccccagaagtgacttatgaggcggaagaagggtcattgtggacactgctgctcacttccctagacggacatctgctggagccagatgccgagtatctacactggctcttgacaaatattcctgggaatagagtagctgagggacaggttacatgtccctatttgccgccatttcccgcaaggggctctggaattcatagactcgccttcctcctgtttaagcaggatcagcctatagactttagcgaggatgctagaccgtctccatgttaccagctggcacaacggacatttcgaacctttgacttctacaagaaacatcaggagactatgaccccagccggtctttcattctttcagtgtcgatgggacgatagcgtcacatacatttttcaccagctcctggatatgagggaacctgtctttgaatttgtacgccctcccccttatcatcctaagcaaaagcgatttccccatcgccagccgctcagatatctggacaggtatcgggatagtcatgagccaacgtatggcatttattag

SEQ ID NO: 230739 - DNA, 1062 bp, synthetic construct
  misc_feature 1..1062: note = Description of Artificial Sequence: Synthetic coding sequence
  source 1..1062: mol_type = other DNA
atggaagccttggccatgggttcccgagcattgaggttatggctcgtagccccaggtggcggtataaaatggcgcttcattgccacgtcatccgcctcccaactcagtccaactgagcttactgagatgcgtaatgatctgttcaataaagagaaggcacggcagctttcgctgactccgcgaacggaaaagattgaggtgaagcacgtgggcaagacggaccccggaaccgtgtttgtgatgaataagaacattagtactccctactcatgtgccatgcacctgtctgagtggtattgtagaaagtccattctcgccctggtcgatggacagccatgggatatgtacaagccattgaccaagtcttgcgagatcaagtttcttacattcaaggattgtgacccaggcgaagtaaataaagcgtactggcgaagctgcgcaatgatgatgggatgcgttattgagagggctttcaaagacgagtatatggtaaacctagtgcgggctcccgaggtgccggtgatttccggcgcattctgttacgatgtcgtgctggacagcaagctagacgagtggatgccaactaaggaaaacctcagatcattcactaaggacgctcacgcgttgatctacaaagacttaccctttgaaacattagaggtcgaggccaaagtggctctggagatattccagcatagcaagtacaaggtcgattttatcgaggaaaaggcttctcagaatcccgagagaatcgttaaattgcacagaataggagatttcattgacgtctccgagggacccttgataccaagaacctccatctgcttccaatacgaggtgtcggccgttcacaacttgcagccaacccaacccagcttgattcggaggttccagggcgtaagcctccccgtgcatttgagagctcactttacgatctgggacaaactactagaacgtagccgcaaaatgaccccctttcctatcctgctgctgtttacaacccagagttttttcactacatcacctgaatcctatctgctccacggtaccgttagcgagtag

SEQ ID NO: 230740 - DNA, 1017 bp, synthetic construct
  misc_feature 1..1017: note = Description of Artificial Sequence: Synthetic coding sequence
  source 1..1017: mol_type = other DNA
atggaggcccttgcgatgggttctagggctctgagactctggttggtggcccctggcggaggaataaaatggagattcattgccacatcgtccgcgtctcagctgtctcctaccgagctcaccgaaatgcgcaatgacctgttcaacaaagaaaaggcccgtcagttgagcctgacgcccagaactgagaagatcgaggtgaagcacgttggcaaaacggatccagggaccgtctttgtaatgaacaagaatattagcacaccctactcctgcgctatgcacctgtctgagtggtactgtcggaagtccatcctcgctctggtggatggccaaccttgggacatgtataaacccttgactaagtcgtgcgaaatcaagttcctgaccttcaaggactgcgacccaggcgaagtcaacaaggcctactggagatcatgtgctatgatgatgggctgtgtgattgagagagcattcaaggacgaatacatggttaacctcgtcagggcacctgaggtcccagtgatctctggtgcgttttgctacgatgttgtactcgacagtaagctagacgaatggatgcccacaaaagaaaatttgcggagcttcaccaaagacgcccacgcattaatttacaaggacctcccatttgagacactagaagtcgaggccaaggtcgctttggaaatctttcagcactccaaatataaggtcgactttatcgaagaaaaagcttcacagaatccggagcggattgtaaaactgcatcgcataggggacttcatagacgtttcagaggggccattgatcccgcgtacgagcatctgtttccagtatgaggtgtcagccgtgcacaatttacaaccgactcagcccagtctgatccgaagattccagggggtttctctgcctgtccacctgcgagctcattttactatctgggataagctcctggaacggagtcggaagatggttactgaagaccagtcgaaggctacagaagaatgcaccagcacctag

SEQ ID NO: 230741 - DNA, 936 bp, synthetic construct
  misc_feature 1..936: note = Description of Artificial Sequence: Synthetic coding sequence
  source 1..936: mol_type = other DNA
atgttgcaatttgtgagggctggcgcacgggcatggttgaggccgactggctcccagggcctgtcctccctagctgaagaggctgccagagctacagagaatcccgaacaggtggcctccgaggggctgccagagcccgtcctgcgcaaagtggaactgccagtacccacccatcgcagaccagtgcaggcttgggtggaatcacttcgcggattcgagcaggaaagggtgggtctggctgacctgcatccggacgtatttgccaccgcacctcgattggacatcctgcatcaagtcgcaatgtggcagaagaactttaaacggatctcttacgcaaagacaaaaaccagggccgaggttagaggcggaggtcgaaaaccatggccacaaaaagggacaggacgggctcgccacggaagcatacgaagccctctgtggaggggcggtggcgtggctcatggcccacgcggaccaactagctactattatatgctccccatgaaggtacgtgctcttggtttaaaagtcgccctgacagtgaagctcgcacaggacgacctccatattatggacagtttagagcttcccacaggagacccacaatacctcacagaactggcccactatcggagatggggagactccgtgctcttggtggacctgacgcacgaggagatgccccagtccattgtggaagctacctcccgcctcaaaaccttcaaccttatccccgctgtgggcctgaacgttcattctatgctcaaacaccagacactggtactcaccctgcctaccgtagcattcctcgaggacaagttgttatggcaggattctaggtatcggccattgtaccctttcagcttgccttatagcgactttccccgacctctgcctcatgcaacgcagggtcctgcggcaacaccctaccactgttag

SEQ ID NO: 230742 - DNA, 936 bp, synthetic construct
  misc_feature 1..936: note = Description of Artificial Sequence: Synthetic coding sequence
  source 1..936: mol_type = other DNA
atgctgcagttcgtgcgagccggagccagggcatggttacggcctacaggctctcagggcctctcctcgctggccgaagaagccgctcgcgcaacagaaaacccagaacaggtggctagcgaggggttacctgaacccgttctgcggaaggtagagctgcctgtgccaacacataggaggcctgtccaggcatgggtggaaagtctccgaggattcgaacaggagcgggtgggtctcgcagatctgcatcccgacgtatttgcgaccgcacctagactggatattctccaccaggtggcgatgtggcagaaaaactttaagagaatctcttatgccaaaactaagactcgggctgaagtcagggggggaggcaggaagccttggccccagaaggggacaggaagagcccgacacgggagtatccggtcccccctgtggcgcggtggaggtgttgctcacggtcctagaggaccaacatcctactattacatgcttccaatgaaagtcagggcccttggcttgaaagtcgccctgaccgttaagctggcccaagatgacctgcatatcatggatagtttagaactcccaactggagaccctcagtatctaaccgagctggcccattacaggagatggggcgattcagtgctgcttgtcgatctgacccatgaagagatgcctcagagcattgtagaagctacgtcccggttgaaaaccttcaatctcatccctgcggtcgggctgaatgtgcattcaatgcttaagcatcaaacacttgtgctgaccctccccacagtagcgttccttgaggacaagcttttgtggcaagacagtcgctaccgtcccctgtatcctttttcactcccttattccgatttcccgaggccactcccccacgccactcaaggccctgctgcgactccctaccactgttag

SEQ ID NO: 230743 - DNA, 792 bp, synthetic construct
  misc_feature 1..792: note = Description of Artificial Sequence: Synthetic coding sequence
  source 1..792: mol_type = other DNA
atgctgcaatttgtccgggctggagctcgcgcttggctgcggcctaccggatcacagggactttcctccctcgcagaggaggcagcaagagctactgaaaatcctgaacaggtagccagtgaaggtttgcctgaaccagtattgcgaaaggtagaattgccagtgcccactcatcggaggcctgtgcaggcatgggtggaatccctccgcggattcgaacaggaacgtgttggtctggccgatctccacccagacgtcttcgccactgcacccagattagatatcttacatcaagtcgccatgtggcagaagaactttaaacggataagctacgcaaagactaaaacccgggcagaggtgcggggtggcggtagaaagccctggccacaaaaagggacaggaagagctaggcatggtagtatccggagtccgctctggcggggagggggtgtggcacacgggcctcggggacctaccagctattactatatgcttcctatgaaggtgcgcgcattaggcctgaaagtcgctcttacggtaaaactcgctcaagacgacctgcacattatggattcacttgagctgccaaccggtgacccccagtacctgacggaattggctcactatcgtcgttggggggactctgtgctgctcgtggacctcacccacgaggagatgcctcaatccatcgtggaagccacgagtcgccttaaaaccttcaacctgattcctgctgtcggcgagcagcgagcccaggctcctagagtgaggatgtgtaggctccgttgttag

SEQ ID NO: 230744 - DNA, 792 bp, synthetic construct
  misc_feature 1..792: note = Description of Artificial Sequence: Synthetic coding sequence
  source 1..792: mol_type = other DNA
atgctgcagttcgtgcgcgcaggcgcaagagcctggctgagaccgacgggttctcagggactgtccagcctggcagaggaggcagctcgtgctacggaaaacccagaacaggtggccagtgaaggcctgcccgaacctgtgcttagaaaagtagaacttcccgttcccacgcatagacgtcccgttcaagcatgggttgagagtctgcgcggatttgagcaggagcgggttgggctggctgatctacacccggatgtgttcgcaaccgccccaaggctcgatattctgcaccaggtggctatgtggcagaagaatttcaaaaggattagctacgcgaagacaaagaccagagccgaagtccgcggtggaggacggaaaccatggccccagaaaggaacaggccgtgctcggcacggttctataagatctccactttggagaggaggcggtgttgcacatggacctcgtgggccaacttcctactactatatgttgccaatgaaggtgagagcactcggtctaaaggtcgcactgactgtcaagcttgcgcaggacgacctgcatatcatggactcgcttgaactgccgacgggcgatccacagtacctcaccgagttggcccactacagaaggtggggggatagtgttctattggtcgacctgactcatgaggagatgccgcagagcatcgtcgaggctacatcgcggttaaagacttttaatctgattcctgctgtgggcgagcagcgagcgcaggcaccaagagtccgcatgtgccgcctgaggtgctag

SEQ ID NO: 230745 - DNA, 414 bp, synthetic construct
  misc_feature 1..414: note = Description of Artificial Sequence: Synthetic coding sequence
  source 1..414: mol_type = other DNA
atgggggtgttggcggctgccgcaaggtgcctagtcaggggagccgaccgaatgagcaaatggaccagtaagaggggtcccaggtccttccgtggaaggaaagggagaggagcgaaagggattggcttcctgactagtgggtggaggtttgtgcaaattaaagagatggtgcccgagttcgtggtccctgatcttactggcttcaaactaaagccctatgtctcctacctcgcccctgagagcgaggagactccactcacggccgctcagctcttctctgaagcagtcgccccagccatcgagaaagacttcaaggacggaactttcgaccccgacaatctggaaaagtacggatttgaacctacccaggagggcaagctttttcagctgtatccaagaaattttttaaggtag

SEQ ID NO: 230746 - DNA, 429 bp, synthetic construct
  misc_feature 1..429: note = Description of Artificial Sequence: Synthetic coding sequence
  source 1..429: mol_type = other DNA
atgggagacgtgaaggagaattacctagagaccttcatcagttcccctaagttcgggaggacctgtgctgatggtgcgctttattgcgtgtgccacaagtccacctacagccctctgcctgacgactacaactgtaatgtggagctggcattaacttcagacggcaggaccattgtatgttaccacccaagtgtggatatcccatatgagcacacaaaacctattcccaggccggaccccgtacacaacaacgaggaaacgcatgaccaggtcttgaagacccggctggaagagaaagtggagcatctcgaggagggacctatgatcgagcaactgtctaaaatgttttttaccacgaaacatcgctggtatcctcatgggagatatcacagatgccgcaagaacctgaacccccctaaggaccggtag

SEQ ID NO: 230747 - DNA, 429 bp, synthetic construct
  misc_feature 1..429: note = Description of Artificial Sequence: Synthetic coding sequence
  source 1..429: mol_type = other DNA
atggcggtggcagccgtaaaatgggtgatgagtaagagaacaatccttaaacaccttttccccgtccaaaacggggctttgtattgtgtatgccataagtccacatattcgcccctcccggacgactacaattgtaatgtcgagttggctctcactagcgatgggagaaccatcgtatgctatcacccaagcgtcgacattccatatgagcatactaaacctatccctcgcccagaccctgtgcataacaacgaggagactcacgaccaggttctgaaaactagacttgaagagaaggtcgaacacctggaggaggggcctatgatagaacagttgagtaagatgttctttaccactaagcaccggtggtatccgcacggccgataccacagatgtcgaaagaatctgaaccctcctaaagatcgatag

SEQ ID NO: 230748 - DNA, 429 bp, synthetic construct
  misc_feature 1..429: note = Description of Artificial Sequence: Synthetic coding sequence
  source 1..429: mol_type = other DNA
atggctgtagctgcagtcaaatgggtcatgtccaagagaaccatccttaaacacctgttcccagttcagaacggagcattatactgcgtgtgtcacaagagcacctattcacctctaccggatgactataattgtaatgtcgagctggccctcacatccgacggtcggactatagtctgctaccatccttctgttgacatcccctatgaacatactaaacccattcctagaccggatcccgttcacaataatgaagaaacccacgatcaggtcttaaagacacgcctcgaagagaaggtggaacacctcgaggagggccctatgattgagcagctgtcgaagatgttcttcaccaccaagcaccggtggtatccacacggtcggtaccatagatgtaggaaaaacctgaaccctcccaaagatcgctag

SEQ ID NO: 230749 - DNA, 429 bp, synthetic construct
  misc_feature 1..429: note = Description of Artificial Sequence: Synthetic coding sequence
  source 1..429: mol_type = other DNA
atggcagtcgccgctgtcaagtgggtgatgtctaaaaggacaattctgaagcacctcttcccagtccagaatggagctttatactgtgtttgtcataaatccacgtatagccccctgccggatgattacaactgtaacgtggaattggcccttacctctgacggcagaaccatcgtgtgttaccaccctagcgtggatattccttacgagcatactaagccaatccctcgacctgatcctgtccataataatgaggagacacacgaccaggtgctgaaaacaagactggaagagaaggtggagcatctcgaagaaggcccaatgatcgagcagctctcaaagatgttctttacaacaaagcaccgctggtatccacatgggcgatatcatcgttgccgtaaaaatctcaatccacccaaggaccggtag

SEQ ID NO: 230750 - DNA, 609 bp, synthetic construct
  misc_feature 1..609: note = Description of Artificial Sequence: Synthetic coding sequence
  source 1..609: mol_type = other DNA
atgaccgccagaggaaccccctcgaggttcctcgcgagcgtactgcacaacggcctgggaaggtatgtacagcagcttcagaggcttagcttttctgtctcacgcgatggagcctctagtaggggcgctcgcgaattcgtcgagcgcgaggtcattgactttgcccgtcgcaatccaggcgtagtcatttacgtcaactccagaccctgttgcgtgccccgtgtcgttgcagagtatctgaacggcgcagtgcgggaagaaagtatccactgcaagagcgtcgaggagatatccacgctggttcaaaaactcgcagatcagtctggtctggatgttataaggatcagaaagccatttcacacagataacccatcaatccaggggcagtggcatccatttactaataagccaaccactttccgcggtctccgacccagggaagtgcaggaccctgcccctgctcaagatactgggctgaggctgagcgcggtcgccccacagatattgctgccagggtggcccgatcctataagcgtccagagctccgatctaccttggggcaatacacattaccgtccagaacctctgagctcaactacctggctgtag

SEQ ID NO: 230751 - DNA, 648 bp, synthetic construct
  misc_feature 1..648: note = Description of Artificial Sequence: Synthetic coding sequence
  source 1..648: mol_type = other DNA
atgacagccagagggacacctagtaggttcctggcatccgtgttacataacgggctggggagatacgttcagcagcttcagcgcctttctttttccgtttcgagagacggagcctctagtaggggggctagggagtttgttgagcgggaggtcattgacttcgccagaagaaacccaggcgtcgttatatatgtgaactcacgtccgtgttgcgttccccgtgtcgtcgccgaatatcttaatggggcagtacgcgaagagtcaatacactgtaagagtgtggaggagatcagtaccctggttcaaaagctggctgatcagagtggcctcgatgttattcgtatccgtaagccattccacacagataatccctccattcaggggcagtggcatcctttcactaataaaccaaccactttccggggacttaggccacgtgaggtgcaggacccagcaccagcccaagacacaggtctgaggctgagtgccgtggctcctcagatccttctccccggatggcctgaccccccagatctcccaaccgtcgacccaatatcttcatccctaacaagtgccccagctccgatgctgtccgcggtgtcatgtctcccaatcgttcctgcactcactactgtgtgttccgcctag

SEQ ID NO: 230752 - DNA, 480 bp, synthetic construct
  misc_feature 1..480: note = Description of Artificial Sequence: Synthetic coding sequence
  source 1..480: mol_type = other DNA
atgacagcccgtggcacccccagtcggtttcttgcttcggtgctgcataacggtctcggccgttatgtccaacagcttcaaagactctccttctcggtgtcaagggacggggcatcctctcgcggtgctcgcgagtttgtagagagagaggttatagattttgccagacgaaaccccggagtggtgatctacgttaattcaaggccttgttgcgtgcctagagttgtagccgagtaccttaacggagccgtgagagaggagtctattcattgtaagagcgtggaagaaatttctacgctggtgcagaagctcgccgatcagagtgggctggatgtgattagaatcagaaagccatttcatacagataatccatccattcaggggcagtggcacccctttacaaataagcctactacatttagagggctacgcccacgggaggttcaggatcctgcccctgcccaggtacaggctcaatag

SEQ ID NO: 230753 - DNA, 708 bp, synthetic construct
  misc_feature 1..708: note = Description of Artificial Sequence: Synthetic coding sequence
  source 1..708: mol_type = other DNA
atgacagctcggggaactccaagccgtttcctggcttccgtgttgcacaatggcctgggtcggtacgtccagcagctgcagaggttgtcgttttcagtgagccgagacggcgcatccagtaggggagccagggagtttgtggaacgtgaagtgattgacttcgcaagacggaatcctggcgtggtcatttacgtgaactctagaccgtgttgtgtgccccgtgtcgtagcggagtatctcaacggagctgtgcgggaggagagcattcattgcaagtccgtcgaggaaatctccaccctggtgcagaaactcgctgatcagagcgggctcgacgtgatcagaatacggaaacctttccatacagataatccctccatacaggggcaatggcacccattcaccaacaagcctaccacctttagaggactcagacccagggaggtgcaggatcctgctccagctcaagatgccgcagaattcctgggagagggcgcaggtccctgctggtactccatcgtcgctctcccacagaagcacatagccattgcaattcaccctccccagccagcaggccagtgccatcaggccatcggccactggcccgaaaccgtctgttcctgcacggcggaccctcccgcacggctggccaggcctaatattagctccgtcattcggtcttccctaggaaagtatcctctgccgtcttag

SEQ ID NO: 230754 - DNA, 495 bp, synthetic construct
  misc_feature 1..495: note = Description of Artificial Sequence: Synthetic coding sequence
  source 1..495: mol_type = other DNA
atgaccgcccgaggcaccccctcaagattcctagcctcggttttgcataacggcttggggaggtatgtccagcaacttcagcgcctgagcttttcagtgtctcgcgatggtgcctcatccaggggtgcacgcgaattcgtggaaagagaagtaatagacttcgcccgaaggaacccaggggtggtgatctacgtgaacagtcgaccctgttgcgtgcccagggtggtggctgaatatctgaatggagccgtgagagaggagagtattcactgcaaatctgtcgaggagatatctactctggtccaaaagttagcggaccagtctggcctggacgtgatcaggatccgcaaacctttccataccgacaacccgtcaatacagggtcagtggcatccatttacaaataaacctaccacttttaggggactccggcctagagaagtccaagacccggctccagcacagtgcctactgctaggagcggtgaccctgtag

SEQ ID NO: 230755 - DNA, 480 bp, synthetic construct
  misc_feature 1..480: note = Description of Artificial Sequence: Synthetic coding sequence
  source 1..480: mol_type = other DNA
atgaccgctaggggaacgccaagcagatttttggcgtctgttttacacaacgggctgggtcgctacgtgcagcagctgcagcggctgagcttcagcgtttcccgagatggtgcctcttccaggggggctagggagtttgtggaacgggaagtgatagacttcgccagacgaaatcccggagtggtgatttacgtcaacagtcgcccatgctgcgtgccacgcgttgtggccgagtacctgaatggggcagttcgcgaagaatcgatacattgcaaaagtgttgaggagattagtaccctggtccagaaactggccgatcaatctggcctagacgtcatcaggatccgaaagccattccacacagacaaccctagtatccaggggcagtggcaccctttcacaaataaacccactaccttccgcggactgaggccaagggaagtgcaggatcctgcacctgcacaggtgcaggctcagtag

SEQ ID NO: 230756 - DNA, 555 bp, synthetic construct
  misc_feature 1..555: note = Description of Artificial Sequence: Synthetic coding sequence
  source 1..555: mol_type = other DNA
atgactgcacgcggaaccccatctcggtttctggcatcagtcttgcataatgggcttggacgctatgttcagcagctgcagcgattaagcttttcagttagccgagacggggcttcttcacggggtgcccgagagtttgttgagcgcgaggtcattgattttgctcgcaggaacccaggcgtggtgatctatgtcaactcgcgcccatgctgtgttcccagagtggtagctgagtaccttaacggcgcagttcgcgaggagtcaatccattgtaaaagcgtggaggagatttcaactctcgtacaaaaacttgcagatcaatcaggcctcgacgtcatacggatccggaagccttttcacactgacaacccctccattcagggccagtggcacccatttacaaacaagccaaccacattccggggtttacgcccacgggaagtgcaggatcctgctcccgcacaggacacgggactgaggttatccgcagtggccccacagatattgctacccggttggccggatccaacgagggctactagagctactcgctag

SEQ ID NO: 230757 - DNA, 786 bp, synthetic construct
  misc_feature 1..786: note = Description of Artificial Sequence: Synthetic coding sequence
  source 1..786: mol_type = other DNA
atgacagcaagaggaactcccagcagattcctcgctagcgtgcttcacaacggcctggggaggtatgttcagcagctgcagaggctgtctttcagtgttagtcgtgacggcgcaagctcacgcggagctagggaattcgtggaaagagaagtcattgacttcgcacggcgaaaccccggtgttgtcatctatgtaaattctcgcccttgctgtgtgcccagagtggttgctgaatacttgaatggggcagtgcgggaagagtctattcattgtaagagtgtggaggaaatctccaccctggttcagaagctcgccgatcaatccggtttggacgtgattcgtattcggaaaccatttcacactgataatcctagtatccagggccagtggcacccctttaccaacaaacctactacatttcggggtctccgacctagagaggtccaggaccccgcaccggcacaagacgcagccgaattcctgggcgaaggggctggcccttgttggtattccattgtcgccttacctcagaaacacatcgctatagctatccaccccccacagcccgctggacaatgccaccaggcaataggacactggcccgaaaccgtgtgttcatgcactgccgacccaccggctaggctggcgagacctacgagacctccgcatagtgggtcctacctcatcctgattgatttgtgctccagcccgtacgctgttcggtcctttttacctcctgactgcccctgcacagatcattgtgtcctcagtgttaaggcagcgtag

SEQ ID NO: 230758 - DNA, 510 bp, synthetic construct
  misc_feature 1..510: note = Description of Artificial Sequence: Synthetic coding sequence
  source 1..510: mol_type = other DNA
tgaggaacgccgtctcgctttttggcttctgtcctgcataatggactggggcgttatgtccagcagcttcagaggttatctttttccgtcagcagagatggagcttcttcccggggtgcacgggagttcgtcgagcgcgaggtaatagatttcgcacggcgtaatccgggagtggttatatatgtgaactcccggccttgctgtgtacccagggtggtcgccgagtacttaaatggagccgtgagagaagaatcaattcattgcaagagtgtggaggagatctctacattggttcaaaagctagccgatcagagcggactggatgtgattagaattcgcaagccctttcacacagataacccatctatccagggccagtggcacccttttaccaataagcccactacattcagggggctccgccctagagaggttcaagatccggctccagcacaggacgccgctgaattcctaggggaaggggcaggcccttgttggaccctggcctag

SEQ ID NO: 230759 - DNA, 999 bp, synthetic construct
  misc_feature 1..999: note = Description of Artificial Sequence: Synthetic coding sequence
  source 1..999: mol_type = other DNA
atggcaagcgggctggtgaggttactccagcagggacatcgctgtctgctggcccctgtggcaccaaagttggtccctccagttagaggcgtgaaaaaggggttccgcgctgcttttcgatttcagaaagaattggaacggcagagattgttgcgctgccccccaccccctgtccggagatccgagaagccaaactgggactaccatgccgaaattcaggctttcggacaccggctgcaggagaattttagtctagatctgctcaaaacagcgttcgttaattcatgctacatcaaaagcgaagaagcaaagcgtcagcagctgggcatcgagaaggaggccgttctgttgaacttaaaatcaaaccaagagctgagcgagcagggcacctccttctctcagacatgcttaactcagttcctcgaggacgaatatccggatatgcccactgagggcattaagaatctggtggactttttaacaggggaggaagtagtctgtcacgtggctcgcaatctggcggttgagcagctgaccctgtctgaagaattccctgtgccaccagctgtactgcagcagaccttctttgccgttataggagcactgctgcagtcctctggccctgagcgcactgccttattcattcgggatttcttgattactcagatgaccggtaaggagctctttgaaatgtggaagattatcaaccctatggggcttctcgtggaagagctgaaaaagaggaacgtgtctgcacccgagagccgtctcaccagacagtcagggggaacaaccgcgttgcccctgtattttgtgggtttatattgtgataagaagctaatcgctgaaggacctggggagaccgtcctcgttgctgaagaagaggccgctcgagtggctttaaggaagctgtatggtttcactgagaaccgtagaccatggaactactctaaacctaaagagactcttcgcgcagaaaaatcaattactgcctcatag

SEQ ID NO: 230760 - DNA, 921 bp, synthetic construct
  misc_feature 1..921: note = Description of Artificial Sequence: Synthetic coding sequence
  source 1..921: mol_type = other DNA
atggctgcccctattccgcagggtttttcatgtctgtccaggttccttggctggtggtttaggcaacccgtcttggtcacccaatcggctgccatcgtcccggttagaacaaagaagaggttcacccccccaatatatcagccaaagtttaaaaccgagaaggagttcatgcagcacgctcgcaaagccggactggttatcccgcctgagaagagcgatcgcagcatccacctggcctgtactgcaggaatattcgacgcatatgtgccaccagagggcgacgccagaattagcagtctcagcaaagaaggcctcattgaaagaactgagcgaatgaagaaaaccatggcctctcaagtaagtatccggaggattaaagattacgatgctaatttcaaaatcaaggactttcccgagaaggcgaaagatatatttatcgaggcccacctgtgcctcaacaattccgatcacgatcggttacacacgctggtgacagagcattgttttccagacatgacctgggatatcaagtataagaccgtacgatggagttttgtggagtccctggaaccaagccacgtcgtccaggtaagatgcagcagcatgatgaaccagggaaacgtttacggccagataaccgtcaggatgcatacacggcagactctcgccatttatgataggtttggtcggcttatgtacggacaagaggacgtcccaaaagatgttcttgaatacgtcgtgttcgagaaacaattgactaacccctatggaagttggaggatgcacacaaagatagtgccaccctgggcaccgcctaaacagccaattttgaaaaccgtgatgatcccaggaccccaactgaagccagaagaggagtacgaagaagcccagggtgaagcccaaaagccccaactcgcctag

SEQ ID NO: 230761 - DNA, 693 bp, synthetic construct
  misc_feature 1..693: note = Description of Artificial Sequence: Synthetic coding sequence
  source 1..693: mol_type = other DNA
atggctgctgcagggctggcactactgtgtcgaagggtaagctctgcattaaagtccagccggagcctaatcactccccaggttcccgcttgcacaggcttgttgcataccaccctgtcccgtaaagggttagaggaattcttcgacgaccccaaaaattggggccaagagaaagtgaagtctggagcagcttggacttgtcagcagctgcgcaacaagagtaatgaagacctccataaactgtggtacgtgctcctgaaagagcgaaatatgctgctgacactggagcaggaagctaaaaggcaaagattgcccatgccatctcctgaacgtctagacaaagtcgtggactctatggacgccctggacaaagttgtccaggaacgtgaagatgctctacgattgttacagacaggtcaggagagagctagacccggagcatggcgtagggacatcttcgggaggatcatctggcataagttcaaacagtgggtcataccctggcacctgaacaagaggtataataggaaaagatttttcgccttgccatatgttgaccattttcttagacttgaaagggagaagcgcgcacgaatcaaggccagaaaagagaacctggaacgcaaaaaggctaaaatattgttgaagaagtttccacacctggccgaagcccaaaagtcaagtctggtgtag

SEQ ID NO: 230762 - DNA, 423 bp, synthetic construct
  misc_feature 1..423: note = Description of Artificial Sequence: Synthetic coding sequence
  source 1..423: mol_type = other DNA
atgttgctgactctggaacaggaggctaaacgacaaagacttcccatgccctcacccgagagactcgataaggtcgtggatagtatggatgccttggataaagtggttcaggagcgagaggacgccctgcggctactgcagacagggcaggagcgggcacggcctggagcctggcgtagagatattttcggcaggatcatatggcataagttcaagcagtgggtcatcccctggcacctcaataaaaggtataacagaaaacgattctttgcgcttccttatgtagatcatttcctgcgcctcgagcgagaaaagcgcgcaagaatcaaagcaagaaaagaaaatctggaaaggaagaaggctaaaatcctgctgaagaagtttcctcacctggccgaagcgcaaaagtccagcctggtctag

SEQ ID NO: 230763 - DNA, 753 bp, synthetic construct
  misc_feature 1..753: note = Description of Artificial Sequence: Synthetic coding sequence
  source 1..753: mol_type = other DNA
atggcggcagctggactcgctctgctttgcagaagagtcagtagtgcactaaagtcgagtagaagcctgattaccccacaggtccctgcttgtactggcttcttcctttccctactacctaagagcacgcccaacgtaacgtcttttcaccagtatcgcttactgcatactactctaagtaggaagggactcgaggaattttttgatgaccccaagaattggggtcaggaaaaagtgaagagtggggcagcctggacatgtcagcagctacgcaacaagtccaacgaagacctgcacaagctgtggtacgtgttgctgaaagaacggaacatgctactgaccttggaacaggaggccaagaggcaaagactcccaatgcccagcccagaaaggttggataaagtagtagacagcatggacgccctcgataaagtggttcaggagcgagaagacgccctccggctgctgcaaacaggacaagagcgagcgagacccggagcatggaggcgggatatctttgggaggattatctggcacaagttcaaacagtgggttattccttggcacctgaataaaagatacaaccgaaagcggttcttcgctctcccgtatgtggaccactttcttcgtttagagagggaaaagagagcgagaatcaaagcccgaaaagaaaatctggaacgtaaaaaagcaaagatactcctgaaaaagtttccgcatttggccgaggcgcagaagagctccttggtctag

SEQ ID NO: 230764 - DNA, 639 bp, synthetic construct
  misc_feature 1..639: note = Description of Artificial Sequence: Synthetic coding sequence
  source 1..639: mol_type = other DNA
atgagcggaaccctcgagaaagtattgtgcctcagaaacaacaccatttttaagcaagccttcagcctattgcggtttagaacaagcggggaaaaacctatttatagcgtagggggaattctcttatccattagtcggccatataaaacgaagcccactcacggaattggaaagtataagcacttgatcaaagccgaagaacccaagaagaagaagggaaaagtggaggtgagagccatcaaccttgggacggactacgaatacggagtgctgaatatacacctgaccgcatatgatatgacacttgcagaaagttatgcacagtacgttcataacctgtgtaactctttatccattaaagtggaagagtcttacgctatgcctactaagaccattgaggtgctgcagttgcaggaccagggctccaagatgctgctagactccgtgctgaccacccatgaacgggttgtccagataagcggcctgagtgctacatttgccgagatctttctggagattatccagtcctcccttccagaaggtgttagactctctgttaaggaacacacagaggaggatttcaaaggacgattcaaagcccgacccgagctggaggagctgctagccaaactgaagtag

SEQ ID NO: 230765 - DNA, 585 bp, synthetic construct
  misc_feature 1..585: note = Description of Artificial Sequence: Synthetic coding sequence
  source 1..585: mol_type = other DNA
atgggactgagtagctgcagaaaaacaagtagcggtctgccgctgatactgcattatgggggaatcttgctgagtattagccgaccctacaaaacgaagcctacccacgggattggcaaatataaacacctgatcaaggccgaggagcccaaaaagaagaagggaaaggtggaagtgcgtgccatcaatctagggacggattatgaatacggagtgctcaatatacacctaaccgcctacgacatgaccctggcagagtcctatgctcagtacgttcataacctctgtaactccctgtctattaaagtcgaggaatcttatgcgatgccaacaaaaacgatcgaggtgttacaacttcaggatcagggatccaagatgctgctggattccgtgcttaccactcatgagcgggtggtacagattagtggtcttagcgccacattcgctgaaatcttcttagaaattattcaatctagcttacccgaaggagtgcggctgtctgttaaggagcacaccgaggaggattttaaggggaggtttaaagcccgtccggagcttgaggagttgctcgccaagctcaagtag

SEQ ID NO: 230766 - DNA, 501 bp, synthetic construct
  misc_feature 1..501: note = Description of Artificial Sequence: Synthetic coding sequence
  source 1..501: mol_type = other DNA
atggcagcaactatgttccgcgcaacgctgcgcggatggagaacgggggtgcagagagggtgcgggctccgactgctgagtcaaacccagggacctcctgactacccacgcttcgtggaaagtgttgacgagtaccaatttgtggagcgcctgttgcctgccactcggatccccgatcctcctaagcacgaacattacccgacaccatcaggctggcagccccctagggaccctccacccaacctgccatacttcgtccggaggtcgcgtatgcacaacatacccgtgtataaggacatcacccacggtaatcggcagatgacagtgattcgtaaggtggagggtgatatttgggcgctccagaaagatgtcgaagatttcttgtcacctctcctcgggaaaaccccagttacacaggttaacgaggtgacagggacactgagaatcaagggatacttcgaccaggaactgaaagcctggctactcgagaaaggattctag

SEQ ID NO: 230767 - DNA, 501 bp, synthetic construct
  misc_feature 1..501: note = Description of Artificial Sequence: Synthetic coding sequence
  source 1..501: mol_type = other DNA
atggccgcaaccatgtttcgggcaacactccggggttggcgcacaggcgtgcagagaggctgcggacttcgactgttgtcacaaacccaaggtccaccggactacccccgatttgtggaatccgtcgacgagtatcagttcgttgagcggctgctgcccgcaacaagaattccagatccaccaaagcacgaacactaccccaccccctctggatggcaaccacctcgcgatcctccccctaatctgccatacttcgtgcgacggtctagaatgcataatatccccgtgtacaaggacatcacccacggaaatagacagatgactgtgataagaaaggtggagggagatatatgggctctgcagaaagacgttgaggacttcctgtccccactgttgggcaaaacccccgtgactcaggttaatgaggtgacaggaacgctgcgaattaaagggtatttcgatcaggagttaaaagcctggctgctggagaaaggcttttag

SEQ ID NO: 230768 - DNA, 477 bp, synthetic construct
  misc_feature 1..477: note = Description of Artificial Sequence: Synthetic coding sequence
  source 1..477: mol_type = other DNA
atggcagctcgctccgtctccggcattacccgtagggtttttatgtggacggttagcggaaccccatgtcgagaattttggtctaggttccggaaggaaaaggaaccagtggtagtggagacagtcgaagagaagaaggagccgattctcgtgtgcccgccactgaggtcaagagcatacaccccacccgaggacctccagtcccggcttgaatcttatgttaaggaggtgttcggctcaagcttacccagtaattggcaagatatttccctggaagattcccgcttgaagtttaacctgctcgctcatctagcagatgacctgggccatgtcgtgccaaacagcagactccatcagatgtgcagggtgagggatgtactcgacttttataatgtccctatacaggataggtcaaagtttgatgagctcagcgccagcaacctcccgcctaatttaaagatcacctggagctattag

SEQ ID NO: 230769 - DNA, 408 bp, synthetic construct
  misc_feature 1..408: note = Description of Artificial Sequence: Synthetic coding sequence
  source 1..408: mol_type = other DNA
atggcggctcgctccgtaagcggaattaccaggcgcgtttttatgtggactgtgtccggcactccttgtagggagttctggagcaggtttcgaaaggagaaggagcccgtggtagtagaaacagttgaagaaaagaaagagccaatactggtgtgcccgcctttgcgatcacgagcatatactccacccgaagatcttcagagtcggctggagagctatgtgaaggaggtgttcgggtcatccctcccttccaactggcaggacatcagcctggaggactctcggcttaagttcaacctccttgcccaccttgccgacgacctggggcacgtggtacctaatagtcgactgcatcagatgtgcagggggtactcattcgaagagggcaaaatccagctagggatttag

SEQ ID NO: 230770 - DNA, 1146 bp, synthetic construct
  misc_feature 1..1146: note = Description of Artificial Sequence: Synthetic coding sequence
  source 1..1146: mol_type = other DNA
atggcttctccgtcacttgagcggcctgaaaagggggctggtaaaagcgagttcaggaaccagaaacctaagcccgagaatcaggacgagagcgaattgttgacagtgccggatgggtggaaagagccagcctttagcaaagaggacaatccaagaggccttctggaagagtcctctttcgcaaccctctttcctaaataccgcgaggcctatctgaaggaatgctggcccctggtccagaaggctctaaacgagcaccatgttaatgcaacgctggacctcatagaaggttccatgaccgtctgcacgaccaaaaagacctttgatccatatattattattcgcgctagagatctcataaagctgctggctaggagcgtcagcttcgaacaggctgtccgaatactgcaggatgacgtggcgtgtgatataataaaaatcgggtcactggtccgtaacaaggagagattcgtcaaacgccgtcagagactgattggcccaaaggggagtacacttaaagcattggagcttcttacaaactgttatatcatggtgcagggcaacacagtgtccgccataggccctttttcgggcttaaaagaagtgagaaaggtggtgctggacactatgaaaaacatacaccccatttacaatataaagtctctgatgatcaaacgggagcttgcaaaggacagtgagctgcggtcacagagttgggagcggtttctacctcagtttaagcacaagaatgtcaataaacgtaaagagcctaagaaaaagacagttaaaaaagaatatactccatttccaccacctcagcctgaaagccaaatcgataaggagttggccagtggtgagtacttcctgaaggccaaccagaagaagcggcagaaaatggaggccattaaagcgaagcaggctgaggccatttccaagcgccaggaggagcgcaacaaagcattcataccacccaaagagaaaccgatcgtcaagcctaaggaggctagtactgagaccaaaatcgatgtggctagtattaaagaaaaggtgaaaaaggccaagaataagaaactcggagcgctcaccgctgaagaaatcgccttaaagatggaggccgatgaaaaaaagaagaaaaaaaagaagtag

SEQ ID NO: 230771 - DNA, 372 bp, synthetic construct
  misc_feature 1..372: note = Description of Artificial Sequence: Synthetic coding sequence
  source 1..372: mol_type = other DNA
atggccgcacttgggacagtgctgttcacgggcgtgaggaggctgcattgttccgtcgccgcttgggctgggggtcagtggaggctacagcaagggttggcagccaatcctagcggttatggtccgctaacggagttgcctgattggagctacgccgatggccgaccagcacctccaatgaaaggccagcttaggcggaaagcagaaagggaaacctttgcaaggagggtggtgctcctttcacaggagatggatgcaggtcttcaggcctggcagttgcgccagcagaagttacaggaggagcagcgcaaacaggagaatgcccttaagccgaagggagcaagtctgaaaagccctttgccatcccagtag

SEQ ID NO: 230772 - DNA, 369 bp, synthetic construct
  misc_feature 1..369: note = Description of Artificial Sequence: Synthetic coding sequence
  source 1..369: mol_type = other DNA
atggccgcactcggaaccgttctgttttctgtgaggcgcctgcactgcagtgtagccgcttgggctggcggtcagtggaggctccagcagggcctcgccgcaaatcccagcggttacggccctctgactgagttaccagattggagctacgccgacggacgacccgctccaccgatgaaaggacaactcagacggaaagcagaaagggaaaccttcgcccgaagagtagtattgctcagccaggagatggatgccggtctccaggcatggcagctgcgtcaacagaagttacaggaagaacagcgtaaacaggagaacgcgctgaagcccaaaggcgcatctctgaaatctccattgcctagccagtag

SEQ ID NO: 230773 - DNA, 264 bp, synthetic construct
  misc_feature 1..264: note = Description of Artificial Sequence: Synthetic coding sequence
  source 1..264: mol_type = other DNA
atggctgcattagggaccgtcctttttaccggcgtgagacgtctgcactgcagcgttgccgcttgggccggtggccagtggcggttgcagcagggactggctgccaacccttccgggtacgggcctttgacagagctccctgattggtcttacgccgaaacatcttgtactgccgtgactggcaacggtcgttggatcacttcaatggccgcacaggctgctgaagtagccggaagaaccaaggaagccggtaagtgttcctag

SEQ ID NO: 230774 - DNA, 195 bp, synthetic construct
  misc_feature 1..195: note = Description of Artificial Sequence: Synthetic coding sequence
  source 1..195: mol_type = other DNA
atgaaggggcaattacgccgaaaggcagagcgggagacattcgccaggcgggtcgtgctcctgtcgcaggaaatggatgcgggactccaggcctggcagctgaggcagcagaaacttcaggaggaacagcgaaaacaggaaaatgcactgaagcctaagggagcttctctcaaatctcctctaccctctcaatag

SEQ ID NO: 230775 - DNA, 195 bp, synthetic construct
  misc_feature 1..195: note = Description of Artificial Sequence: Synthetic coding sequence
  source 1..195: mol_type = other DNA
atgaagggacaactccgccgtaaggcagaacgcgaaaccttcgcaaggcgtgtggtcctcttgtctcaggaaatggacgccggactgcaagcctggcaactcagacaacaaaagttgcaggaagagcagaggaagcaggagaatgctcttaaacccaaaggggcatcactgaagagcccgctgccctcccagtag

SEQ ID NO: 230776 - DNA, 195 bp, synthetic construct
  misc_feature 1..195: note = Description of Artificial Sequence: Synthetic coding sequence
  source 1..195: mol_type = other DNA
atgaaaggccagttgcgcaggaaggccgagcgagagactttcgctaggagagtagtcttactgtcgcaagaaatggacgccggtctccaggcatggcagttaaggcagcaaaagctccaggaagaacagcgaaagcaggagaacgctttgaaaccaaaaggagcaagtctgaagagcccgcttcctagtcagtag

SEQ ID NO: 230777 - DNA, 339 bp, synthetic construct
  misc_feature 1..339: note = Description of Artificial Sequence: Synthetic coding sequence
  source 1..339: mol_type = other DNA
atggccgctgctttggcccgactaggtctcaggccagttaagcaggtgcgcgtccaattctgtcccttcgaaaagaacgtggagtccaccagaacatttttgcagaccgtctccagtgagaaggtacgaagtaccaatctgaactgctcagtgattgcagacgttcgccacgatggatcagagccgtgtgtggacgtgctgttcggggatggacatcggctgataatgagaggtgcacacctgaccgctctcgaaatgttgacggccttcgcctcgcatataagagcgagagacgctgctggttctggtgataagcctggcgctgatacagggagatag

SEQ ID NO: 230778 - DNA, 417 bp, synthetic construct
  misc_feature 1..417: note = Description of Artificial Sequence: Synthetic coding sequence
  source 1..417: mol_type = other DNA
atggcaactaaaagactgtttggcgcaacaagaacctgggcagggtggggcgcttgggaacttctgaaccccgctaccagtggacggctgctagctcgggattacgccaagaaacccgtaatgaagggcgctaagagcggcaagggggcagtcacttcagaagcactgaaagatcctgatgtatgtaccgaccccgtgcagttaacaacctacgccatgggtgtaaacatttacaaggaagggcaagatgttccgctaaagcccgacgccgagtaccccgagtggctcttcgagatgaatctgggaccgccaaagactctcgaggagctggaccctgagagccgggagtactggcgccgactcaggaagcagaatatctggaggcataatcgattgtccaaaaacaagcggctctag

SEQ ID NO: 230779 - DNA, 387 bp, synthetic construct
  misc_feature 1..387: note = Description of Artificial Sequence: Synthetic coding sequence
  source 1..387: mol_type = other DNA
atggctgccgtgggctcactgctcggccgattaaggcagtctacagtgaaggccactggccctgcgcttcggaggttacatacgagcagctggagagccgattccagccgagccagtctcacacgagtccaccgccaagcctatgctcggctatacccagtgctcctagttaagcaggacggttcaacaatccatatccggtacagagaacctaggcgaatgctcgccatgcctatcgacctggatactctgtctccagaagagcgacgcgcaagactgaggaagcgggaagcccagctgcagagccgaaaagagtatgaacaggagttgagcgacgatcttcacgtggaaaggtatagacagttctggacacgcacgaaaaaatag

SEQ ID NO: 230780 - DNA, 387 bp, synthetic construct
  misc_feature 1..387: note = Description of Artificial Sequence: Synthetic coding sequence
  source 1..387: mol_type = other DNA
atggccgctgtgggatccctgctgggacggctgcggcaaagcaccgtaaaagcaaccgggccagccctcaggagactacacacatcgtcatggcgagccgacagctccagggcatcactgacaagggtgcatcggcaggcctacgcacgcctgtaccctgttctgctcgtcaaacaggatggttctacaattcacattcgttacagggaacctcgaaggatgctcgcaatgccaatcgacctggatacgctttcccccgaagaacggcgagccagacttcgcaaaagagaggcccagctgcagtcaagaaaggaatatgaacaagaactgtcagatgatttgcacgttgaacggtaccgacagttttggacaagaacgaagaagtag

SEQ ID NO: 230781 - DNA, 387 bp, synthetic construct
  misc_feature 1..387: note = Description of Artificial Sequence: Synthetic coding sequence
  source 1..387: mol_type = other DNA
atggcagctgtgggtagcctccttgggcgattaaggcagtctactgtgaaggcaaccggacctgctttacggcgactccatacttcatcctggcgcgcagactccagtagagcgagtttgaccagagtgcaccggcaggcctatgctaggctatacccggtgcttctggtgaaacaggacgggagtaccatccacattaggtatcgggaaccacgtagaatgttagccatgcccattgatttggataccttgtctcctgaggagcgacgagcccgactgcgcaagcgcgaggcacagttacaaagtcgcaaagaatacgagcaagaactcagtgacgacttgcatgtggagagataccgccagttctggacacggactaaaaagtag

SEQ ID NO: 230782 - DNA, 387 bp, synthetic construct
  misc_feature 1..387: note = Description of Artificial Sequence: Synthetic coding sequence
  source 1..387: mol_type = other DNA
atggccgctgtgggcagccttttaggtaggctacgccagtcaacagtgaaagcaaccggcccagcacttcgaaggctccatacatccagctggcgcgctgatagctccagagcatctctcaccagggtgcacaggcaagcatacgccaggctgtacccggtccttctggttaagcaggacggtagcaccattcacatacggtatagggaacctcggcgtatgcttgcaatgcctatcgatctggacactctgtcacctgaagagcgtcgagctagactgaggaagcgggaagcgcagctccaaagcaggaaagaatacgagcaggagctgagcgacgacctgcatgtcgagcggtaccgccaattctggacacgtactaagaagtag

SEQ ID NO: 230783 - DNA, 495 bp, synthetic construct
  misc_feature 1..495: note = Description of Artificial Sequence: Synthetic coding sequence
  source 1..495: mol_type = other DNA
atggccgcagtgggctcacttcttgggctggctgcatcctcttggctggggggacagaacgcaagtgaccattcattgtggctgcttcgaaagcccaggggcagctcttgccctggaaccggtcaccagttgtgtagacttagacaatctacggtcaaagcaacgggtcccgctctgcggaggctccacacgtcatcttggcgggcagattctagtagagcctccctgacaagagtccaccggcaggcgtatgctagattgtaccctgtgctgctggtgaagcaagatggcagcaccattcacatcagataccgagaacctcgaagaatgctcgccatgccaattgaccttgatacgctatctcccgaagagcgcagagccagactgaggaagcgggaggcacagctccagagtaggaaagagtacgagcaagaactcagtgacgatttgcacgtagaaagataccgtcaattctggacaaggacaaaaaagtag

SEQ ID NO: 230784 - DNA, 378 bp, synthetic construct
  misc_feature 1..378: note = Description of Artificial Sequence: Synthetic coding sequence
  source 1..378: mol_type = other DNA
atggcagcggttggatctctactgggacagtccaccgtcaaggctaccggtcctgcactcagaaggctgcacacatcaagctggcgggcagatagctcacgcgctagcttgacacgcgttcacagacaggcttacgccagactgtaccccgtccttctggtgaaacaggatgggtccactattcatattaggtacagagaaccccgacgcatgctggccatgccgattgaccttgacaccctgagcccagaagagaggagggcaaggttgaggaaacgcgaggctcagctgcagagtagaaaagagtacgaacaggagctgtccgacgatctacatgtggagcggtacaggcagttctggactagaaccaaaaaatag

SEQ ID NO: 230785 - DNA, 387 bp, synthetic construct
  misc_feature 1..387: note = Description of Artificial Sequence: Synthetic coding sequence
  source 1..387: mol_type = other DNA
atggcagctgtggggtcattgcttggaagactcagacagtctaccgtgaaggcaactggcccagccctgagacggcttcatacctcgtcctggcgtgccgactccagtagggcttctttgacacgcgtccaccgacaagcctatgcacggctgtatcccgtcctgttagtaaagcaggacggatccacaattcatatccgttatagggagccacgccgtatgctcgcgatgcctatcgatctggacactcttagccccgaggaacgtagagcgcgactgaggaaaagggaagcgcagctccagagtcgaaaagagtatgaacaggagctgagcgacgacctccacgtggaaagataccgtcagttttggacccgaacgaagaaatag

SEQ ID NO: 230786 - DNA, 387 bp, synthetic construct
  misc_feature 1..387: note = Description of Artificial Sequence: Synthetic coding sequence
  source 1..387: mol_type = other DNA
atggcggcagtaggatccctcctggggagactcagacagtccaccgtgaaagctaccggcccagctctccgcagactccatacgtccagctggagggccgattcgagtagggccagtctgacccgtgtccatcgccaggcctacgcccgtctttacccagtactgctcgtgaaacaggacggctcgacaatacacatccgttaccgcgaacctcggagaatgctcgctatgcctatcgacctggacaccctgtctcccgaagaacgacgggcaagactacgcaaacgcgaggcccagctgcagtcacggaaggagtatgaacaggaactgagcgatgacctccacgttgaacggtaccgacaattttggactcggacaaaaaagtag

SEQ ID NO: 230787 - DNA, 387 bp, synthetic construct
  misc_feature 1..387: note = Description of Artificial Sequence: Synthetic coding sequence
  source 1..387: mol_type = other DNA
atggccgctgtcggatcacttcttggcagattaaggcaaagcaccgtcaaagccaccggccctgcacttcgccgactccatactagctcttggagagctgacagcagcagagctagcctgacaagagttcacaggcaagcctatgccaggctgtatccggtactcttggtaaaacaggacggctctaccattcacatacgctatcgggaacccagacgtatgttagccatgccgatagacctcgacactctaagccctgaggagcggagggccagactccggaagcgcgaggcacagctccagtctcgaaaagagtacgagcaggagctgagcgacgacttgcacgttgagcggtacagacagttctggaccaggaccaagaaatag

SEQ ID NO: 230788 - DNA, 387 bp, synthetic construct
  misc_feature 1..387: note = Description of Artificial Sequence: Synthetic coding sequence
  source 1..387: mol_type = other DNA
atggccgctgtcgggagtttgctgggacggctgagacagagcactgtgaaggctactgggcctgccctgagacgacttcatacctcctcatggagggccgattctagcagagcgtccctgactagagtacatcgtcaagcttacgcgaggctctaccctgtgctgcttgttaagcaggatggcagcactattcacattcggtatcgcgaacctcgcaggatgctagccatgcccattgacctggacactctcagcccagaggaacgtcgagcgaggctcagaaagcgggaagcccagcttcaaagccggaaggagtacgagcaggagcttagcgatgatctccatgtcgagaggtaccgccaattttggacccgcactaaaaaatag

SEQ ID NO: 230789 - DNA, 495 bp, synthetic construct
  misc_feature 1..495: note = Description of Artificial Sequence: Synthetic coding sequence
  source 1..495: mol_type = other DNA
atggctgccgtcgggagtctgcttggattagcggcaagctcctggctgggagggcagaacgcctcagatcattctctctggctgctccggaaacctcgcggaagcagctgtcccggtacaggccatcagctgtgtaggcttcgacagagtaccgttaaagccacgggacccgctctaagacgcctgcacaccagctcatggagagctgactcttctcgggcttccctgaccagagtccataggcaggcgtatgccagactttaccctgtcctgctggtgaagcaagacggcagtacaattcacattagataccgcgagcctcgcagaatgttagccatgcctatcgatttggacacactgagtcccgaggaaaggcgagccagactgaggaagcgagaagcacaactgcagtcccggaaggagtacgaacaggagctctcagacgacttgcatgtggagaggtatcgacagttttggacccgaaccaagaaatag

SEQ ID NO: 230790 - DNA, 387 bp, synthetic construct
  misc_feature 1..387: note = Description of Artificial Sequence: Synthetic coding sequence
  source 1..387: mol_type = other DNA
atggcggctgtaggaagcctgctagggcgtcttcggcaatctacggttaaggctactgggcctgccttacggaggttgcacaccagctcttggcgcgctgacagctccagggctagcctgacccgggtgcaccgtcaagcctatgctcggctataccctgtgctcctcgtcaagcaggatggcagcacaatccacatccggtatcgcgaacctaggcgcatgctcgctatgcctattgacctggacaccctgtcacccgaagagagacgagcgaggttgcggaaaagagaagcccaactgcaaagccgaaaggagtatgagcaagagcttagtgacgatttacatgttgaacgataccgacagttctggacacgtactaagaagtag

SEQ ID NO: 230791 - DNA, 387 bp, synthetic construct
  misc_feature 1..387: note = Description of Artificial Sequence: Synthetic coding sequence
  source 1..387: mol_type = other DNA
atggccgcagtgggcagcctccttggcagactacgccagagcacagtcaaagccactgggcctgccctccgtaggctgcatacctccagttggcgtgccgactcatctcgcgcatccctaactcgggtgcataggcaagcatatgctaggctataccccgtgctgctcgtgaagcaggacggctctacaattcatattcgatatagggagcctcgccgaatgttggctatgcccatagatctggacacactttctcctgaagagagacgggcacgcctgagaaaacgggaggcccaactgcaaagtcgaaaagaatacgagcaagagctctcagatgatctgcatgtggagcgctaccggcagttctggactcgtactaaaaagtag

SEQ ID NO: 230792 - DNA, 387 bp, synthetic construct
  misc_feature 1..387: note = Description of Artificial Sequence: Synthetic coding sequence
  source 1..387: mol_type = other DNA
atggctgcggtgggaagcttactaggcagacttcggcagtctaccgttaaagctaccggccctgccctgcggcgattacatacatcaagttggcgtgctgattctagcagggcatctctgacgcgggtgcacaggcaagcctacgcgagattatatcccgtactgctggtgaaacaagatggcagcaccatccatatccggtaccgcgaaccaaggcgcatgctggcaatgcccattgaccttgacactctcagccctgaagaacgccgtgctcggctgaggaagcgagaagctcagctacagtccaggaaggaatacgagcaggagctatccgatgatctgcatgtggaaagatataggcagttctggacgcgaactaagaaatag

SEQ ID NO: 230793 - DNA, 387 bp, synthetic construct
  misc_feature 1..387: note = Description of Artificial Sequence: Synthetic coding sequence
  source 1..387: mol_type = other DNA
atggctgccgtcgggagtttgttaggcaggctgcgccagtcaactgttaaagctacaggaccggcactaaggaggctccacacttccagttggcgggcagatagctccagagccagcctgactcgcgtccatagacaggcctatgcacggctgtaccccgtactgctggtgaagcaagatggcagtacaatccatattaggtaccgagagccacgcaggatgctggcaatgccgatcgacttggacacgttgagcccggaagagcggagggctcggctccggaagagagaagcccagcttcagtctcgcaaggagtacgagcaggaactgtcggacgatttgcacgttgagcggtaccgccaattttggactaggactaaaaaatag

SEQ ID NO: 230794 - DNA, 387 bp, synthetic construct
  misc_feature 1..387: note = Description of Artificial Sequence: Synthetic coding sequence
  source 1..387: mol_type = other DNA
atggcggctgtcggcagcctgctgggaaggctcagacagagcaccgtgaaagctactggtcctgccttaagacgcctgcatacttctagctggagggcagactccagcagagcgtcactgaccagagtgcaccgccaggcgtatgcacgcctgtaccctgtgctgttagttaaacaggacggttcaacaattcatattcggtatagagagccccgtaggatgcttgccatgcctatagatttagatacactgagccccgaggagagacgcgctcgtctccggaaacgcgaagcccagctccaatctaggaaagagtatgagcaggagttgtcagacgacttgcacgtagagaggtatcgccagttttggactaggactaaaaagtag

SEQ ID NO: 230795 - DNA, 387 bp, synthetic construct
  misc_feature 1..387: note = Description of Artificial Sequence: Synthetic coding sequence
  source 1..387: mol_type = other DNA
atggctgctgtgggttccctgttgggccgtctgcggcagagcactgtcaaagccactggcccagctctgcgcagactgcatacatcctcatggcgggctgatagtagccgcgcaagcctcacccgtgtgcaccgtcaggcctacgcccgactgtatcccgtactgctggtcaagcaggacggatctactattcatattaggtacagggagcccaggaggatgctggccatgccgattgaccttgatacactcagccccgaagagcgccgagcacgcctgcggaaaagagaagctcagcttcaaagccgaaaagagtatgagcaggaactgagcgatgatttacatgtcgagcgttacaggcagttctggactagaactaagaaatag

SEQ ID NO: 230796 - DNA, 387 bp, synthetic construct
  misc_feature 1..387: note = Description of Artificial Sequence: Synthetic coding sequence
  source 1..387: mol_type = other DNA
atggcagcagtgggctctctgctcgggaggctgcggcagtcaactgtaaaggctactggtcccgctcttcgccgattgcacacctcctcttggagagctgacagctcgcgggcttccttgacgagggtacaccgtcaggcctatgctagactttacccggtgctgcttgtgaaacaagacgggtcaactatccatatccgttaccgtgagccccgtcgtatgcttgcaatgcccatcgacctggacacactttctcccgaggaacgaagagcacgccttagaaagcgggaggcacagctgcagtcccgcaaggaatacgagcaggagctgagcgatgacctgcacgttgagcgctataggcagttttggacgcgaacaaagaagtag

SEQ ID NO: 230797 - DNA, 387 bp, synthetic construct
  misc_feature 1..387: note = Description of Artificial Sequence: Synthetic coding sequence
  source 1..387: mol_type = other DNA
atggctgctgtcggctcccttttgggaaggctgagacagtcgaccgttaaagctactggaccagctttgagaaggttgcacacgtcttcatggagagcggattctagtcgcgctagcttgacccgagtccatagacaagcctacgccaggctgtacccagtgctactagtcaagcaggacggtagtacaatccacatcagataccgagaacccagacgcatgctggccatgcccattgacctcgacactctctctcccgaagagagacgggcacggcttcgcaagcgtgaagcacagttacagtcccgtaaggagtacgagcaggaattaagcgacgacctacatgtggaaaggtatcggcaattctggacccgcactaaaaagtag

SEQ ID NO: 230798 - DNA, 387 bp, synthetic construct
  misc_feature 1..387: note = Description of Artificial Sequence: Synthetic coding sequence
  source 1..387: mol_type = other DNA
atggccgcagtgggctctttactcggcaggctgagacaatccaccgtaaaggcgactggccctgccttgcgaagactgcacacctccagctggcgcgctgatagcagtagagcatcactgacacgggttcacaggcaggcttacgccaggctgtaccccgtgctcctggtcaagcaagatgggtccacaatccacatccgatatcgagaaccacggaggatgctggctatgcctatcgatttagataccctttcacccgaggagcggagggccagactcaggaaaagggaggcgcaactgcaatcccggaaagagtatgagcaggaacttagcgatgatcttcacgtggaacgttatagacagttttggacacggacaaaaaaatag

SEQ ID NO: 230799 - DNA, 495 bp, synthetic construct
  misc_feature 1..495: note = Description of Artificial Sequence: Synthetic coding sequence
  source 1..495: mol_type = other DNA
atggccgctgtcgggtctttgctcggacttgccgcatcttcgtggctgggtgggcagaatgcctcagatcatagcctgtggctactcagaaaacccaggggttcgagctgtcccggaaccggccatcagttatgtcggctgaggcagtccactgtgaaggcaactggccctgctctgcgaaggctacatacatcctcatggagggcagacagtagtagggctagtcttacccgggtccaccggcaggcctatgccaggctgtaccccgtactgctggtgaagcaggacgggtctacaatccatattcgatatagagaacccaggcgcatgctcgctatgcccatcgacctggacacgctctcacccgaagaaagacgagccagactccgcaagagggaggcccaactgcagagtcggaaggagtatgaacaggagctgtcagatgacttacacgtggagagatacaggcagttttggactcgcacaaagaagtag

SEQ ID NO: 230800 - DNA, 231 bp, synthetic construct
  misc_feature 1..231: note = Description of Artificial Sequence: Synthetic coding sequence
  source 1..231: mol_type = other DNA
atggctgctgtcgggtcgcttctcggtaggcttcgccagagtactgttaaagccaccgggcctgcattgcgaaggctccacacttctagttggagggccgactcttctcgtgcaagcctgactcgtgtgcataggcaggcctacgcaaggctctacccagtgctgcttgtcaagcaggatgggtctactattcacatcaggtacagagaaccacggagaatgctagcttag

SEQ ID NO: 230801 - DNA, 702 bp, synthetic construct
  misc_feature 1..702: note = Description of Artificial Sequence: Synthetic coding sequence
  source 1..702: mol_type = other DNA
atggctgcgccagtcgttactgccccaggcagagcattgctgcgcgctggtgcaggccgactgcttaggggcggagtacaagaactccttagaccgcgtcacgaggggaacgcgccagacctcgcctgcaatttttctctgagtcagaaccggggaaccgtcatcgtcgagcgctggtggaaagtcccgctggccggtgaaggtaggaaaccaaggctgcatcgacgtcatagagtatacaaactggtggaggataccaagcaccggcctaaagaaaacttagaactcatcctcacacagagcgtcgaaaatgtgggcgtacggggagatctggtgagcgttaaaaagagcctgggcagaaaccggctcctgccccaggggcttgcagtatacgcctcccccgaaaacaagaaactgttcgaagaagagaaacttctgcgacaggaggggaagttggaaaaaatacagaccaaggcgggagaggcgctgggagttgtcgttgctccacacactctgaaacttcctgaggaacccataaccagatggggggaatactggtgtgaggtcactgtaaatggactggacactgttagggtgcccatgagcgtggtcaacttcgagaagccaaaaacaaagcgctacaaatactggctggctcaacaggcagccaaggcgatggcaccaaccagcccccagatctag

SEQ ID NO: 230802 - DNA, 804 bp, synthetic construct
  misc_feature 1..804: note = Description of Artificial Sequence: Synthetic coding sequence
  source 1..804: mol_type = other DNA
atggcagcccctgtggtcacagcacctggaagggccctactgcgtgctggggcaggcagacttctccggggaggagtccaggagttactcagaccacgccatgagggaaatgcccctgacctggcgtgtaatttctccttgagccaaaatcgaggcaccgtgattgtcgaacggtggtggaaggtgccgctggccggagagggcagaaaaccccgactacaccgaaggcaccgtgtgtacaagctggtcgaggatacaaagcatagaccaaaggaaaacctcgaactgatcctgacacagtctgtggagaacgttggtgtgagaggtgacctggtctcggttaaaaagagcctgggtcgcaaccgcctgttgccacagggcctagctgtttacgcatccccagagaacaaaaagttgttcgaagaggagaaactgcttagacaagaaggcaaactggagaagatacagaccaaggcaggagaagccacagtcaaatttttgaaatcttgcagattagaggtgggaatgaaaaataacgtcaagtgggagctcaatccagagatcgttgccaggcacttctttaagaacttgggtgtcgtggtagcgcctcacacattgaagttgccggaagagcctatcacacggtggggagaatactggtgtgaggtcacagtcaatgggctggataccgtccgggtacctatgtccgtcgtaaatttcgagaaaccaaagacaaagaggtacaagtactggttggcccagcaggcggcaaaggcgatggccccaacatcaccccagatatag

SEQ ID NO: 230803 - DNA, 606 bp, synthetic construct
  misc_feature 1..606: note = Description of Artificial Sequence: Synthetic coding sequence
  source 1..606: mol_type = other DNA
atggctgccaggacagcttttggagcagtgtgcaggcgcctgtggcagggactggggaacttcagcgtgaatacgagtaaaggcaacaccgcaaaaaacggcggtctcctgttaagtaccaatatgaagtgggtgcagttctctaatctgcacgtagacgttcctaaagacttgactaagcctgttgtgacaattagcgatgaacctgatatcctgtacaaaaggctttctgtgctcgtgaagggacacgacaaagcagtactggatagttatgagtactttgccgtcctcgccgctaaagagctgggcatatcaataaaagtccacgaaccccctagaaaaattgaacggttcactctcttgcaaagcgtacatatttataagaaacacagggttcagtacgagatgcgcaccctctaccgctgcctggagctggaacacctgactggatctactgccgacgtataccttgagtatatacagcgaaatcttccagagggtgtggctatggaggtgacaaagacccaactggaacagcttcctgagcacattaaggagccaatttgggagacactctccgaagagaaggaagagagcaaaagttag

SEQ ID NO: 230804 - DNA, 585 bp, synthetic construct
  misc_feature 1..585: note = Description of Artificial Sequence: Synthetic coding sequence
  source 1..585: mol_type = other DNA
atgcaggctgtgcggaacgccggttcgaggttccttaggagttggacatggccacagacagcaggcagagtggtcgccaggactcctgctggaaccatctgcactggggcacggcagctgcaggacgcagccgctaagcagaaggttgaacagaatgcggcaccatcccatactaagttcagcatctatccccctattccaggagaggagagctctctgcggtgggccggaaagaagtttgaagaaatacctatagcacacatcaaagcctcgcacaacaacacccaaatccaagttgtgtcagctagtaacgagccattagcatttgcaagctgtggcaccgaaggattcaggaacgccaaaaagggcactggtatcgccgcacaaaccgctgggatcgcagctgccgcacgggctaaacaaaagggagtgattcacatccgagtcgtggtgaaaggtctgggacccggtagattatcggccatgcatgggctaatcatgggaggactggaggtgattagcatcactgataacactcccataccccataacggctgccgcccaagaaaagcaagaaagctgtag

SEQ ID NO: 230805 - DNA, 486 bp, synthetic construct
  misc_feature 1..486: note = Description of Artificial Sequence: Synthetic coding sequence
  source 1..486: mol_type = other DNA
atgcaggccgttcgaaacgccggatcacggttcctcagaagttggacatggccgcagactgccggacgtgtcgtggcccgaactccagcgggtaccatttgcactggcgctcggcagctgcaggatgcagcagccaagcaaaaggttgaacagaatgcagccccatctcacacaaaatttagtacacaaatccaggtggtcagcgcgagtaacgagcccctggccttcgcttcgtgtggaacagaggggtttcggaacgccaagaaaggcaccggcatagcagcacaaacagcaggtatcgcggcagcggctagggcaaagcagaagggagtgattcacatccgggtggtggtcaagggcctcggcccaggtagacttagcgccatgcatggcctgattatgggaggcctggaggtgatttcaattacggataatacccctatccctcacaacggatgcagaccacgaaaagcgaggaaattgtag

SEQ ID NO: 230806 - DNA, 417 bp, synthetic construct
  misc_feature 1..417: note = Description of Artificial Sequence: Synthetic coding sequence
  source 1..417: mol_type = other DNA
atgagctggagcggcctgttgcatggacttaacacatcattaacatgcgggcctgctctcgtgccacgactgtgggcgacctgctcaatggccactcttaatcagatgcatagactgggaccccctaaacggccaccacggaaactgggacccaccgagggcagaccacagctaaaaggagtcgtgctgtgtacgttcacccggaaacccaaaaagcccaacagcgccaaccggaaatgctgcagagtgcgactgtctacgggcagagaggcagtgtgttttattccaggggaaggtcacacgctgcaggaacatcagatcgtgttagtagaggggggacgaacacaagacctgccgggtgtgaaactgacggtggtgagaggcaagtacgactgtggtcatgtgcaaaaaaaatag

SEQ ID NO: 230807 - DNA, 417 bp, synthetic construct
  misc_feature 1..417: note = Description of Artificial Sequence: Synthetic coding sequence
  source 1..417: mol_type = other DNA
atgtcctggtccggactactgcacggtctaaatacgtccttgacctgtggcccagccctcgtgccaaggctgtgggcaacatgtagcatggccaccctgaaccaaatgcatcggctcggtccacctaagagacctccccgtaagctaggacctactgaggggagaccgcaacttaaaggagtggttctctgcacttttactcgcaaacctaaaaaacctaacagtgctaatcggaaatgttgcagagtccggctgagcacggggagagaggccgtttgctttatcccaggagagggccacactctccaagagcaccagatagtgctcgtcgaaggaggtcgtacacaggacctacccggagttaagctgaccgtcgtgcgcggaaagtatgattgcggccacgtacagaagaagtag

SEQ ID NO: 230808 - DNA, 417 bp, synthetic construct
  misc_feature 1..417: note = Description of Artificial Sequence: Synthetic coding sequence
  source 1..417: mol_type = other DNA
atgtcttggagcggacttcttcacggcctgaatacctccttaacatgcggccctgccctggtccctcgcctctgggcaacttgtagcatggccactctcaaccaaatgcaccggttggggccacctaagcgtcccccacgcaaacttgggccaacagagggccgacctcaactaaagggcgtcgtgctctgtacatttactcgcaaaccgaagaagccaaacagcgccaaccggaagtgttgtagagtgcggctcagtacaggccgtgaagctgtctgttttattcccggtgaaggccacacccttcaagaacatcagatcgtcttggtcgaggggggacgcacgcaggatctgccaggtgtgaaactgactgtggtgaggggtaagtacgattgtggacacgtacagaagaagtag

SEQ ID NO: 230809 - DNA, 387 bp, synthetic construct
  misc_feature 1..387: note = Description of Artificial Sequence: Synthetic coding sequence
  source 1..387: mol_type = other DNA
atggctgccttcatgctcggcagcctcctgaggacctttaaacagatggtaccttcctctgcatcaggacaggtgcgatctcactatgtagactggaggatgtggagagatgtgaagagacgcaagatggcctatgagtatgccgatgaaaggctgcggattaattcactacgtaagaataccattctaccaaagatcctacaggatgtggcagatgaggagattgccgctctccctcgggacagctgtccagttcgcattaggaaccggtgcgtgatgacttctaggcccagaggtgtgaagcggaggtggaggttgagtaggattgtgtttcgccacctggcagaccacggccagttaagcggcatccagagagccacttggtag

SEQ ID NO: 230810 - DNA, 774 bp, synthetic construct
  misc_feature 1..774: note = Description of Artificial Sequence: Synthetic coding sequence
  source 1..774: mol_type = other DNA
atgctgcgggtcgcctggagaacactatccctcatcagaacgagggcagtgactcaggtgcttgtccccggattgcctgggggtgggtcagccaagttccctttcaatcagtggggcctgcagcctcgtagcctcttgttacaagcagctcggggatatgtagtacggaagccagctcagagcaggttagacgatgacccccctccatctacccttctgaaggactatcagaatgtgccaggaattgagaaggtcgatgacgtcgtgaagagactgctgagcctcgagatggcgaataagaaggaaatgcttaagatcaagcaagaacagtttatgaagaagatcgtggctaatcccgaggacacacgatctttagaggccaggattatcgccctgagtgtgaaaataaggagctatgaggaacatctggagaagcatcggaaagataaggcacataagaggtacctgttgatgtccatcgatcaacgaaaaaaaatgttgaagaacctccgcaataccaattacgacgtgtttgagaagatttgctggggccttggaatcgagtacacctttcctccgctgtattacaggcgtgctcacagaagatttgtcaccaaaaaggctctctgcattagagtgttccaagagacccagaagctgaagaagcggaggagagctctgaaggccgcagccgcagctcagaagcaagctaaaaggaggaacccagactctcccgctaaggcgattcctaaaactctgaaagattctcagtag

SEQ ID NO: 230811 - DNA, 300 bp, synthetic construct
  misc_feature 1..300: note = Description of Artificial Sequence: Synthetic coding sequence
  source 1..300: mol_type = other DNA
atggttcacctgaccactctgctctgtaaggcctataggggaggacacctgaccattcgcctagctctgggcggatgcacgaacagacccttttacaggatcgttgctgcccataataaatgcccacgtgacgggaggtttgttgagcagctcggttcgtacgaccctctgcctaattcccatggggagaaattagtagctctcaacttagaccgcattaggcattggattggctgtggggctcatcttagtaaacctatggagaagctgctcgggctcaaatacagccacgtgttttag

SEQ ID NO: 230812 - DNA, 414 bp, synthetic construct
  misc_feature 1..414: note = Description of Artificial Sequence: Synthetic coding sequence
  source 1..414: mol_type = other DNA
atggtgcacctcactaccctgctgtgcaaagcgtaccggggagggcacctgaccattaggctggctctcgggggatgcaccaatagacctttctataggatcgtagctgctcataataaatgcccacgggacgggagattcgtggagcagctggggtcttatgatcccctgcctaactcacatggggaaaagctcgttgccctgaacctcgatcggatccgccactggatcggctgcggcgcacacttaagcaagcctatggaaaagctgctaggcctggccggattcttccctctccatccgatgatgattaccaacgcagagcggcttcgacgtaagcgcgctcgggaggtgttgctcgcttctcagaaaactgacgccgaggcaactgatactgaggccacagaaacctag

SEQ ID NO: 230813 - DNA, 372 bp, synthetic construct
  misc_feature 1..372: note = Description of Artificial Sequence: Synthetic coding sequence
  source 1..372: mol_type = other DNA
atggtgcatttaacaactctcctctgcaaagcctatcgcggtggccacctgaccatacggctggcactgggtgggtgtactaatagacctttctatcggattgtagctgctcataataagtgcccacgagatggtagattcgtcgaacagctaggctcgtacgatcctttgcctaactcacacggggaaaagttagttgcattgaacctcgaccggattcgacactggatcggttgtggggcacacctgtcaaaaccaatggaaaagctcctgggaaagacggatgccagatttcctgagcagggcgaggagaggcctgaacaacatcactttccagaggatttagcaccagctcgcggaaggggcctgtag

SEQ ID NO: 230814 - DNA, 393 bp, synthetic construct
  misc_feature 1..393: note = Description of Artificial Sequence: Synthetic coding sequence
  source 1..393: mol_type = other DNA
atgtcagtggtgagatcctctgtccacgctcggtggatcgtggggaaagttatcgggacgaagatgcagaaaacggccaaggtcagagtgacaagactcgttttggatccatacctcctgaagtattttaataagcggaagacctattttgctcacgacgcgttgcagcaatgcactgtcggagatatagttctcctcagagctctacctgttccacgggcaaaacacgtgaaacacgagttggcagaaattgtcttcaaagtgggcaaggtgatcgatccagtgaccggaaagccttgtgcgggaaccacatacctggagtcaccgctgtcttctgagactacacaactgtctaagaaccttgaggagctcaacatttcatccgcccagtag

SEQ ID NO: 230815 - DNA, 390 bp, synthetic construct
  misc_feature 1..390: note = Description of Artificial Sequence: Synthetic coding sequence
  source 1..390: mol_type = other DNA
atgtcagttgttcggagttccgtgcacgcacgctggatcgtcggaaaagtgattggaacgaagatgcaaaagaccgctaaagtacgagtcactcgcctcgtgctggacccttacctactgaaatatttcaacaaacggaagacctatttcgcacacgacgccttgcagcagtgtactgtgggggacatagttctgttgagagctttgcccgtccctagggcgaagcacgtaaagcacgaactcgctgagattgtgtttaaggtcggcaaagtaatagacccagtgaccgggaagccctgtgccggtacaacctacctggagagccctctttcttctgaaacaacccagttgagcaagaatctggaagaactgaatatctcctctgcttag

SEQ ID NO: 230816 - DNA, 384 bp, synthetic construct
  misc_feature 1..384: note = Description of Artificial Sequence: Synthetic coding sequence
  source 1..384: mol_type = other DNA
atggcagccctcaaagcgctggtctcagggtgcggacgactcctgcggggactccttgccggacctgccgctaccagttggagccgcctccccgcacgcggttttagggaggttgtcgagacccaggaggggaagaccacaattatcgaaggcagaattactgccacaccaaaggaatctccgaacccaccaaacccctcaggacagtgccccatttgccgctggaatcttaagcataaatacaattacgatgatgtgctccttctgtcccagtttataaggccccacggcggaatgctcccacggaaaatcaccgggctctgccaagaggagcatcgcaagatcgaggagtgcgtaaagatggcccatagggccggaacctag

SEQ ID NO: 230817 - DNA, 813 bp, synthetic construct
  misc_feature 1..813: note = Description of Artificial Sequence: Synthetic coding sequence
  source 1..813: mol_type = other DNA
atggccgctttgaaggctctcgtcagtggatgtgggagactcttacgaggcctcctggcgggacccgcagctactagctggtccaggctgccagcgcgaggttttagggaagttgtggaaacacaagaagggaaaacaaccataatagagggacgtatcactgccactcccaaggagtccccaaaccctcccaacccttccgggcaatgcccgatctgccgctggaacctcaagcataaatataactatgacgatgtcctgttgctttcacagtttatcagacctcatggtggaatgctgcctcgaaagatcacaggcttatgccaggaagaacaccgaaaaatcgaggagtgcgtcaaaatggctcatagggctggcagaaggccctggggaccacgcggagctgagggctgtagacatagccttccaacccaactgccccacgtaagtgctccgccagggcgaaaggtggacatccggtccgtgaattacacgcatcatcctatgcccaccttcccattgccatgggctttccccctagcccctagcgagctgcaaagagagctgcaacgtcttagcccattaccaagacactcaggtctgttgccgaaccaccgcccaagactccctgaaggtgttgtgcctaagagtaaacctcagcttaatagatatttgactaggtgggctcctggcagcgtcaaacctatttacaaaaagggccctcgttggaatcgagtgagaatgcctgtcggctcaccattgctccgcgacaacgtgtgctactcacgcactccatggaaactataccattag

SEQ ID NO: 230818 - DNA, 591 bp, synthetic construct
  misc_feature 1..591: note = Description of Artificial Sequence: Synthetic coding sequence
  source 1..591: mol_type = other DNA
atggctgccctcaaggccctcgttagcggttgtggtcgactcctccggggactgcttgccggacctgctgctacctcttggtctaggctgccagcaaggggttttcgagaggtcgtcgaaacacaagaaggaaaaactaccattatagagggccgtataaccgccacccctaaggagagcccgaaccctcctaatccaagtgggcaatgcccaatctgcagatggaatttaaagcataagtataattacgatgacgtattactacttagccagtttattaggcctcatggaggaatgttaccccgtaaaatcactgggctgtgtcaagaggagcatagaaaaatcgaagaatgcgtgaagatggcacacagagcgggacttcttccgaatcatcggcctcggctgcctgaaggggtggtcccgaagagcaaacctcaactaaaccgttacctgactaggtgggcccctggaagtgtgaagcctatctataagaaaggtcctcgctggaaccgtgtgcgcatgcctgtagggtctccacttctgcgggataatgtgtgctattcgcggactccctggaagctgtatcactag

SEQ ID NO: 230819 - DNA, 795 bp, synthetic construct
  misc_feature 1..795: note = Description of Artificial Sequence: Synthetic coding sequence
  source 1..795: mol_type = other DNA
atggccgctttaaaggccctcgtgagcgggtgtggaagactcctccgtggactgctcgctggacccgcagcaactagctggagtcgactgcctgcaagaggcttccgtgaggtcgtggaaacccaggaggggaaaacaacaatcatagaaggacgcatcaccgccaccccaaaggaatcacctaatccccctaacccctccggccagtgcccaatatgccgttggaatctgaaacataaatataattatgacgatgttctgttacttagtcagtttatccggccacacggtggcatgttaccaaggaaaatcaccggcctatgccaggaagagcaccgcaagatcgaggagtgcgtcaagatggcacaccgcgcagggcgtcggccatggggccctaggggggctgaaggctgtcgccattccctgccaactcaattgccacatgtgagtgcccctcctggcagaaaggtggatattcgatcggtcaattatactcaccatcctatgcctactttccctctcccttgggcattcccattggccccaagcgagttgcaaagagagttgcagaggctgtcgcctctgcccagacattctggcctcctgccgaatcaccgccctcggctgcccgaaggtgtggtgccaaaatcaaagccccaactgaatcgctatcttacaagatgggccccaggaagtgttaagcccatttacaagaagggacccaggtggaaccgtgtgagaatgcccgtcggaagccccctgctgagagacaatgtatgttattcaagaacttag

SEQ ID NO: 230820 - DNA, 777 bp, synthetic construct
  misc_feature 1..777: note = Description of Artificial Sequence: Synthetic coding sequence
  source 1..777: mol_type = other DNA
atggccgcttccgtgctgaacacggttttaagacggttgccaatgctttccctttttcggggatcacaccgggtgcaggtgcctttacagaccctgtgtacaaaggcgccatctgaagaagactctttatcgtcagttccgatttcaccctataaggatgagccctggaagtatctcgagagtgaggaataccaggaaagatacggctcacgcccagtgtgggcagactatcggaggaatcacaagggcggagtgcccccacagcgaacaagaaaaacatgcattaggcgaaacaaagtggtggggaatccctgcccaatatgcagagaccacaaactgcacgtggactttcgaaacgtgaagctgttggaacagttcgtatgtgcgcatacgggcatcattttttacgcaccctacacgggtgtgtgtgttaagcagcataaaagactgacccaggcaattcagaaggccagggatcatggattgttgatctaccacatcccacaagtggaaccacgggatctggacttctcgacgtcccatggagccgtctcagccacgcctccagcaccaaccttagtcagtggagatccctggtacccatggtacaattggaagcaacctcccgagcgggaactgagcagacttaggcgcctgtaccaagggcaccttcaggaggaaagtggcccaccacccgagagcatgcctaaaatgccgcctcgcacacccgctgaagcttcgtctactggtcaaactggcccacagtcggccctctag

SEQ ID NO: 230821 - DNA, 777 bp, synthetic construct
  misc_feature 1..777: note = Description of Artificial Sequence: Synthetic coding sequence
  source 1..777: mol_type = other DNA
atggctgcatcagtgctcaataccgtgctgaggcgtctgcctatgctgtccctgttccgagggagtcatagagtgcaagtccccttacagactttgtgcacaaaggcgccaagcgaggaggattccctgtcttcagtgcctatcagcccatacaaagatgagccctggaaatacctggagtccgaagagtatcaagagaggtacggatctcgccctgtgtgggcagactaccgaagaaaccataaaggaggggtaccaccacagaggacaaggaagacctgtattagacgaaacaaggtcgttgggaacccatgccctatctgtagggatcacaaactccacgtagatttccgcaacgtgaaactactcgagcagttcgtgtgcgcccacactggtatcatattctatgccccttatactggagtgtgcgtgaagcagcacaaacgcttgactcaggcgatacagaaggcccgtgatcacggactgctaatctaccatattccacaggtggagccccgtgacttagatttcagcacaagccatggcgcagttagcgccacacctccagccccaacattggtttccggcgacccgtggtatccgtggtacaattggaaacaacctcctgaacgtgagttatctcgcctcagacggctttaccagggccacctacaggaagagagcggccctccacctgagagcatgccaaaaatgccaccgcgaacacctgccgaagctagctccacgggacagactggccctcagagcgccctgtag

SEQ ID NO: 230822 - DNA, 648 bp, synthetic construct
  misc_feature 1..648: note = Description of Artificial Sequence: Synthetic coding sequence
  source 1..648: mol_type = other DNA
atggcggcatccgtgctcaacaccgtgctgagaaggctgcccatgttatctctcttcaggggcagccatagggtccaggtcccactgcaaacattgtgcaccaaagcgcctagcgaggaggatagtttgtcctctgtgcccatttcaccctacaaagacgagccttggaaatacctggagtcagaggaatatcaggaacgttacggaagtcggcctgtctgggctgactacaggcgaaatcacaaaggcggtgtgccccctcagcggacccgaaagacgtgcattaatgtaaagctgcttgagcagtttgtctgcgcacacaccgggattattttctacgcgccttataccgggctgttgatctatcacatccctcaggttgagcccagggacctagacttttctacgtcacatggcgcagtgagcgctaccccacctgcacctaccctcgtgagcggagacccatggtatccttggtacaattggaaacaaccccctgaacgggaactgtcgaggctgcgccgtctttaccaaggacatctgcaggaggaatcggggcctccaccggagagcatgccaaaaatgccccctcgaactcccgcagaagcctcatccacagggcagaccgggcctcaaagcgccctgtag

SEQ ID NO: 230823 - DNA, 648 bp, synthetic construct
  misc_feature 1..648: note = Description of Artificial Sequence: Synthetic coding sequence
  source 1..648: mol_type = other DNA
atggctgcgtcagttcttaacacagtcctgcgtcgcctgccaatgctgagccttttccggggatcacacagggtacaggttcctttgcagacgctgtgtactaaagctcctagcgaggaagacagcctaagcagcgtgcccatctctccgtataaagacgaaccttggaagtacttagaatccgaagagtatcaagaacgctacggctcccgcccagtgtgggctgattatagaaggaaccacaaaggaggagtccccccacagaggaccagaaagacctgcattaatgtgaagttattggagcaatttgtatgtgcccacacaggtatcatcttttacgcaccatacaccgggctgctgatttatcacatcccacaggtggaaccacgggacctcgatttctcaactagccacggggctgtgtctgccacccctccagcacccactctcgtctctggtgacccctggtatccctggtataattggaagcaacctcccgagcgcgaattatctagactgcgcaggttataccagggccaccttcaggaggaatccgggcctcctccggagagcatgcccaagatgccccctcgaaccccagccgaggcgtcctccactggtcagactggaccgcagagcgctctgtag

SEQ ID NO: 230824 - DNA, 777 bp, synthetic construct
  misc_feature 1..777: note = Description of Artificial Sequence: Synthetic coding sequence
  source 1..777: mol_type = other DNA
atggcagcttcggtgttaaataccgtcctccggagactccctatgctgtctctctttcggggatcccacagagttcaagtgcctctgcagaccttgtgcacaaaggcaccaagtgaggaagactcactgtcatcagtgccaatctctccctacaaagacgagccgtggaaatacttagagagcgaggaataccaggaacggtatggttctaggccggtatgggctgattaccggcgtaaccataaaggaggtgtgcctcctcagagaacacgcaagacctgtattagacgcaataaggtggtgggaaatccctgcccaatctgtcgagatcacaagcttcacgtagactttaggaacgtgaaactgctagaacagtttgtgtgtgctcacaccggaataatcttttacgcaccgtacaccggcgtttgtgttaagcagcacaagagactgactcaggccattcagaaagccagagatcatggtctgctcatctaccacattcctcaggtggagcccagggatctggacttcagcacgtcccacggggctgtcagtgccactccacccgcacccaccttagtatccggcgacccttggtacccttggtataactggaagcaaccacccgagagggagcttagcagattgagacggctctaccagggccacctgcaggaagaaagcggcccacccccagaatccatgccaaagatgcccccacggacacccgcagaagcaagtagcacggggcagaccggccctcagagcgcgctgtag

SEQ ID NO: 230825 - DNA, 648 bp, synthetic construct
  misc_feature 1..648: note = Description of Artificial Sequence: Synthetic coding sequence
  source 1..648: mol_type = other DNA
atggctgcaagtgtcctcaacacagtgttgcgcagactgcccatgctgagcttattccgaggcagtcacagggtgcaagtgccacttcagactctctgtaccaaagccccatccgaagaagacagcctgagctcagtccccatatcaccctacaaggacgagccatggaaatatctggaatccgaggagtaccaggagaggtacggatcccgcccagtgtgggctgattacagacgcaatcacaaaggcggtgtcccaccccagcgaacccggaagacgtgtatcaacgttaagctgttggagcaattcgtttgcgcacacactggaatcatcttctacgcaccgtacaccggactgttaatctaccatatcccccaggtagagccccgagacttggacttttccacttcacatggcgcagtgagcgctacaccgcctgctcctactctcgtgtctggagacccgtggtacccttggtacaattggaagcagcctcccgagagagaattatcccgtctgcggagactctatcaggggcacctccaggaggaaagtggtcccccacctgagtctatgcccaagatgccgcctcggactcccgctgaggcttcgtcaacaggccagactgggccacagtcagccctgtag

SEQ ID NO: 230826 - DNA, 648 bp, synthetic construct
  misc_feature 1..648: note = Description of Artificial Sequence: Synthetic coding sequence
  source 1..648: mol_type = other DNA
atggctgcgagtgtactgaataccgtcttgcggagactgccgatgctttctctcttccggggtagtcaccgcgtgcaggtgccactgcagactttatgtacaaaagctccatctgaagaggatagtttaagtagcgttcctatcagtccctacaaggatgagccctggaagtatctggaatcagaagaataccaggaaagatatggatcacgacccgtttgggcggattaccgacggaaccataaagggggagtgcccccacaacgaacccgcaaaacctgcataaacgtgaaactgttggagcagtttgtgtgcgctcataccgggatcatcttttacgccccttataccggactgctcatataccacatcccccaggttgagccacgggacctcgacttcagcactagccacggagccgtgagtgccacacctccagcaccaacactggtgagcggtgacccatggtatccttggtacaattggaaacagcctccagaaagggagctttctagacttcgaaggttataccaggggcacctccaggaagagtctgggcctcctcccgaaagtatgcccaaaatgcctccacgtaccccggctgaagcctcctccaccggacagacagggcctcagtcagcactgtag

SEQ ID NO: 230827 - DNA, 777 bp, synthetic construct
  misc_feature 1..777: note = Description of Artificial Sequence: Synthetic coding sequence
  source 1..777: mol_type = other DNA
atggcagccagcgtgctgaatacagttttacggaggctgccgatgctctcgctttttcgcggatcacacagggtccaagtgccactacaaactttgtgcaccaaggcacccagtgaagaagattctctctcttccgtcccaattagtccttataaagatgaaccatggaaatacctggaaagtgaggagtaccaggaacggtatggaagtcggccagtctgggcagattaccgaaggaaccacaagggtggtgtgcctcctcaacgtacccgcaaaacatgtataaggcgcaacaaagttgtgggaaacccttgccctatttgtcgcgaccataagctgcacgtggacttccgcaacgtgaaactgttagagcagttcgtctgcgcgcacaccggcattattttttacgccccttacaccggcgtctgcgtaaagcagcataagcgcctgacccaggccatccagaaagccagagatcacggactcctcatttaccatatcccccaagtagagccgagggatctcgacttcagcacttctcacggagcggtgtccgctactccgccagccccaactcttgtctctggggatccctggtacccatggtataattggaagcaacccccagagagagaactctctcgactaaggagactctatcaggggcatttacaggaggaatcggggccaccgcctgagtcaatgccaaaaatgcccccacggacccccgctgaggcctctagtactgggcaaacaggtcctcagtccgcactgtag

SEQ ID NO: 230828 - DNA, 648 bp, synthetic construct
  misc_feature 1..648: note = Description of Artificial Sequence: Synthetic coding sequence
  source 1..648: mol_type = other DNA
atggcagcctccgtgttgaacaccgtgctgcgacggttgcctatgctgtctctcttccggggaagccatagggtgcaggtgccgctgcaaaccctttgcactaaggcaccctccgaggaggattccctgtcctcggtgccaattagcccgtataaggatgagccgtggaagtatctcgaatccgaggagtatcaggagcgctatggtagccgccctgtgtgggcggactatcggaggaaccataaaggcggagtgccccctcaacggacgcgaaaaacatgcatcaacgtcaagctccttgagcaattcgtttgcgctcacaccggcattatcttctatgctccatacacaggccttcttatataccacatcccccaggttgaacctagagatctggatttctctacgagtcacggcgctgtatccgctactcctccggcacctactctggtatccggtgatccctggtacccttggtacaactggaaacagcccccagaacgcgaattatcgcgcctgcgacgtttgtatcaaggacacttacaggaagaaagtggccctccccctgagagcatgccgaaaatgccaccccgtactccggctgaggctagttccactgggcaaacaggccctcagtctgctctgtag

SEQ ID NO: 230829 - DNA, 777 bp, synthetic construct
  misc_feature 1..777: note = Description of Artificial Sequence: Synthetic coding sequence
  source 1..777: mol_type = other DNA
atggccgcttctgtcttgaataccgtgctgcgtcgactgcctatgctctcattgttcagaggtagtcaccgcgtccaggtgcccctgcagactctgtgtacaaaggccccatccgaagaggattccctgtcaagtgtgcctattagtccatacaaggatgagccctggaagtacctcgagagcgaggaatatcaggagagatacggatccaggcccgtctgggccgactacagaaggaaccataaaggtggggtgcctccccagagaacccgaaaaacctgcatacgtaggaacaaggtggttggaaacccctgtcctatttgcagagatcacaagctccacgtggattttaggaatgtcaagctgttggagcagtttgtgtgcgcccacaccgggatcatattttacgctccttacacaggggtgtgtgtgaagcagcacaagcggttgactcaagctatccagaaagcccgagatcacggcctgctgatctatcatattccacaagtggaaccacgcgacttggacttctcgacttcccatggcgcagtctcagcaactcctcctgctccaaccctggtgagcggcgatccctggtatccatggtacaactggaagcagcctccagaaagagagctgtctagactcaggagattatatcaagggcatttgcaggaagaaagcggccctcccccagaatccatgcccaagatgccaccaagaactccggcagaggcatcatccacgggtcagactggacctcagtcagccttgtag

SEQ ID NO: 230830 - DNA, 648 bp, synthetic construct
  misc_feature 1..648: note = Description of Artificial Sequence: Synthetic coding sequence
  source 1..648: mol_type = other DNA
atggccgcaagtgtgctgaataccgtgctgaggaggttgccaatgctgtccctgttccgcggtagccaccgggtgcaagttcctttgcaaacactgtgcactaaagcaccaagcgaagaagatagtctctcctccgtcccgattagtccctacaaggacgaaccctggaagtacctagagagtgaggagtatcaggagaggtatggaagccgtccagtctgggccgattacaggaggaatcataaggggggagtgcccccacaaaggactaggaaaacttgtatcaatgtgaaactgctggaacagttcgtctgtgcccacaccggcattatattctacgccccttatactggcctgctgatttaccacataccccaggttgaaccgagagatcttgacttctccaccagccacggcgctgtttctgctaccccaccagcaccaacacttgtgtctggtgatccttggtacccgtggtataattggaaacagcctcctgagcgcgagctttcaaggctcagaagactttatcagggtcatctgcaagaggaaagcgggcctccccctgagtctatgcctaaaatgcctccacgtacgccggctgaagcctcatcaacaggccagacgggtccacaatctgcgctgtag

SEQ ID NO: 230831 - DNA, 648 bp, synthetic construct
  misc_feature 1..648: note = Description of Artificial Sequence: Synthetic coding sequence
  source 1..648: mol_type = other DNA
atggcagcctcagtgttgaacaccgtcttgcgtcgcctacctatgttatcgctgttcagagggtcccaccgggtgcaggtgcctctccaaactctgtgcaccaaggctccatccgaggaggattccttaagcagcgtgccaatttccccttacaaggacgagccttggaagtatttggaatcagaggagtaccaggagcgttatgggagtcggcctgtttgggctgactacaggcgcaaccacaaagggggagtacccccacaaagaacccgcaagacgtgcatcaacgttaagctcctcgagcaattcgtttgcgcacataccggcataatattttacgctccctacacgggccttctcatatatcatataccacaggtggagccaagagacctggatttcagcacatcgcacggtgcagtaagcgctacgccacccgcacccacactggtcagcggtgacccctggtacccctggtacaattggaaacaaccacctgagcgagaactgtctaggttgagacgtttgtatcaggggcatctacaagaagaaagcggaccacctcctgagagcatgcctaagatgccccctagaacaccagcagaagcgagtagtaccggacagactgggccacagagtgctctgtag

SEQ ID NO: 230832 - DNA, 777 bp, synthetic construct
  misc_feature 1..777: note = Description of Artificial Sequence: Synthetic coding sequence
  source 1..777: mol_type = other DNA
atggcagcctcagtgctgaatactgtgctccggaggcttccaatgctgtctttattcagaggatcacacagggtgcaggtgccactgcaaacactttgcaccaaggcgcctagtgaagaggactccctcagctccgtgccgatttcaccttacaaagacgagccatggaagtacttggagtccgaggagtatcaggagaggtatggatctcgtcccgtctgggcagactatcgtcggaaccataagggcggtgttcctccacaaagaacccgcaaaacctgcatcaggcgtaataaggttgtgggcaatccttgccccatatgccgagaccacaaacttcacgtggatttccgaaatgtgaaactacttgagcagtttgtgtgtgctcacactgggatcatcttctacgctccctatacaggagtgtgcgttaaacagcacaaaagactgactcaggccattcagaaggctagagaccacggactgctgatttaccatatcccacaggtagaaccacgagacctggatttcagtacctcacacggcgcagtcagtgctacacctcccgctcccaccctagtttctggcgatccatggtacccctggtacaattggaagcagcctccagagagagagctcagccgcctccgaaggttgtaccagggacatttacaggaagagtcgggacccccaccagagagcatgcctaagatgccgccacggaccccggcagaagcttcttctacagggcagacaggccctcaatctgcgctgtag

SEQ ID NO: 230833 - DNA, 777 bp, synthetic construct
  misc_feature 1..777: note = Description of Artificial Sequence: Synthetic coding sequence
  source 1..777: mol_type = other DNA
atggcggcaagcgtgctgaataccgtgcttagaagactgccgatgctaagcctctttcgcggttcccacagggtccaagttcctctccagactctctgcaccaaggccccatcagaggaggacagtctaagcagcgtgcccatctctccctacaaagacgaaccatggaagtacctcgagagtgaggaatatcaagagagatacggatctcgtccggtgtgggccgactatagaaggaaccataagggcggtgtccctccgcagcgcactcggaaaacttgtattcgacggaacaaagtggtgggtaacccatgtcccatctgccgggaccataagctacacgtggactttcggaatgtcaagctgctggagcaattcgtatgtgcccatacaggaatcatattctacgccccttacacaggggtctgcgttaaacagcacaaaagactgacgcaagcaattcagaaggctagggatcacggactgctaatttaccacatcccacaagtcgaaccacgggatttagatttcagtaccagccacggcgcagtctctgctactccacccgcacccacactggtttccggcgacccatggtatccatggtacaattggaaacagccccctgaacgtgagctcagccgactccgtagactataccagggtcaccttcaagaggagtctggcccacccccagagtctatgccaaagatgcctccgcgaacgcccgctgaagcctccagcacaggtcagaccggcccacagtccgccctgtag

SEQ ID NO: 230834 - DNA, 366 bp, synthetic construct
  misc_feature 1..366: note = Description of Artificial Sequence: Synthetic coding sequence
  source 1..366: mol_type = other DNA
atggcggctagtgtgttgaataccgtccttagacggctgccgatgttgagcttattccggggttctcacagggtgcaagtacctctccaaaccctgtgtacaaaagcgccaagcgaagaagactcactgagtagtgtgccaatatccccgtacaaagatgaaccctggaagtatctggaatctgaggaataccaggagagatatggctcacgaccagtatgggctgactataggcgcaaccacaaagggggagtgccaccacaaaggacaagaaaaacctgcatcaggcggaacaaagtggttgggaatccatgcccgatttgtagggatcacaaactgcacgtggacttccgcgagtccgtgtag

SEQ ID NO: 230835 - DNA, 366 bp, synthetic construct
  misc_feature 1..366: note = Description of Artificial Sequence: Synthetic coding sequence
  source 1..366: mol_type = other DNA
atggcggcaagcgtgctgaatacggtcttgagaaggcttcccatgctcagcttgtttcggggaagccaccgagtgcaggtccctttgcaaacgctgtgtactaaggcccctagcgaggaggactctctctcaagcgtccctataagcccatataaagacgaaccatggaaatacttggagtctgaagagtaccaggagcggtacgggagtcgccctgtttgggctgattacaggcgaaaccacaaaggaggtgttccaccccaacggactcggaaaacctgtattagacggaacaaggtggtgggcaacccgtgtcctatttgcagggatcacaagttgcacgtggattttcgcgaatccgtatag

SEQ ID NO: 230836 - DNA, 366 bp, synthetic construct
  misc_feature 1..366: note = Description of Artificial Sequence: Synthetic coding sequence
  source 1..366: mol_type = other DNA
atggccgctagcgtcctgaatacggtgctgcgcagactgccaatgctgagcctgttcagggggtctcacagagtacaagtgccactgcagacactatgtaccaaggcccctagcgaggaggacagtctcagctctgtgccaattagtccatacaaagacgaaccatggaaatatcttgagagtgaggagtatcaggagaggtacggttccagacctgtttgggccgattacaggagaaaccacaagggcggagtccctccacagcgaacaagaaagacctgtattcgcaggaataaagttgtaggaaacccctgccccatctgtagagatcacaagctacatgtcgactttcgagagagcgtgtag

SEQ ID NO: 230837 - DNA, 366 bp, synthetic construct
  misc_feature 1..366: note = Description of Artificial Sequence: Synthetic coding sequence
  source 1..366: mol_type = other DNA
atggccgcaagtgtactaaacaccgtactgaggaggctgccaatgctcagcctattccgaggcagtcatagagtgcaggtgcctctccagacactttgtactaaagctcctagcgaggaagacagcctgtcttcagtgcccatttccccatacaaagacgagccatggaagtatctggaaagtgaagagtaccaggagcggtatggcagccggccagtatgggccgactatcgcaggaaccacaaaggaggagtaccccctcagcgcaccagaaagacctgcattaggcgcaacaaggtggtcggcaacccctgtccaatctgtcgtgatcataaactgcacgttgacttccgcgagtctgtctag

SEQ ID NO: 230838 - DNA, 366 bp, synthetic construct
  misc_feature 1..366: note = Description of Artificial Sequence: Synthetic coding sequence
  source 1..366: mol_type = other DNA
atggccgcaagcgtacttaatacggtgctgcggagattgcctatgctgtccttattcagaggcagccacagggtgcaggtgccccttcagaccctgtgcacaaaagcaccgtcagaggaagacagcctgagtagtgtgccaattagcccctataaagatgagccttggaaatatctggaaagtgaggagtatcaggaacgatatggctctcgcccagtatgggctgattatcgtcgaaatcacaaaggtggtgtgccaccccagaggacacgaaagacatgtatccggagaaacaaggtggtcggcaatccgtgtccgatctgtcgggaccacaagctgcacgtagatttccgagaatccgtctag

SEQ ID NO: 230839 - DNA, 366 bp, synthetic construct
  misc_feature 1..366: note = Description of Artificial Sequence: Synthetic coding sequence
  source 1..366: mol_type = other DNA
atggccgcaagtgtcttgaatactgtcctcaggcggctgcctatgctctctttgtttcgtggctcacaccgcgtgcaggtgcctcttcagactttatgcaccaaggccccttctgaggaagactccctgagctcggtgcccatctcaccctacaaagatgaaccctggaagtacctggagagcgaagagtatcaggagcggtacggctctaggcctgtatgggcagattaccggagaaaccataaaggcggtgttcctcctcagcgcacccggaaaacctgcatccggcgtaacaaggttgtcgggaacccctgtcctatttgtcgcgaccataagctgcacgtggacttccgagaaagcgtatag

SEQ ID NO: 230840 - DNA, 366 bp, synthetic construct
  misc_feature 1..366: note = Description of Artificial Sequence: Synthetic coding sequence
  source 1..366: mol_type = other DNA
atggctgcatcagtcctgaatactgtactacgaaggcttccgatgctgtccctgttcagggggtcccatagagttcaggtgcccctccagaccctgtgcaccaaagctccttccgaggaagacagcctttctagcgtgccaatttccccttataaagacgagccatggaagtacctagaatcagaagagtatcaggagcggtatggcagccgacctgtctgggctgattacagacgtaaccacaaggggggtgtcccccctcagaggacacgcaagacctgcatcaggcgaaacaaagttgtgggcaacccctgccccatttgtagggaccacaaactccacgtggattttagagagtccgtgtag

SEQ ID NO: 230841 - DNA, 429 bp, synthetic construct
  misc_feature 1..429: note = Description of Artificial Sequence: Synthetic coding sequence
  source 1..429: mol_type = other DNA
atggcggctgtggtggcagtgtgcggcggactagggcgtaagaagcttacccatctggtgaccgcagccgtaagtctgactcaccccggaacacacaccgtcctgtggaggagaggatgtagccagcaggtgtcctcgaatgaggacctgccaatatcgatggagaacccatacaaagagccgcttaaaaagtgtatcctttgcggcaagcatgtggattacaagaacgtgcagctactgagccagtttgtgagtcccttcaccggatgtatttacggacggcacattaccgggctgtgtggaaagaaacaaaaagagatcaccaaggccattaaacgcgctcaaatcatgggtttcatgcccgtgacatacaaagatcctgcctacctgaaagatcctaaagtgtgtaacatcaggtatcgggaatag

SEQ ID NO: 230842 - DNA, 345 bp, synthetic construct
  misc_feature 1..345: note = Description of Artificial Sequence: Synthetic coding sequence
  source 1..345: mol_type = other DNA
atggcagctgtagtcgctgtctgcggaggccttggacgcaagaaactgacacatctcgtcacagccgcagttagtctcacccatcctggcacccacaccgtcctatggaggaggggatgctctcagcaggtctctagcaatgaggatttgctgctgtctcagtttgtcagcccttttacagggtgtatttacggtagacatatcaccggcttatgtggtaaaaagcagaaagaaattactaaggccatcaagcgggctcaaataatgggtttcatgcctgtgacttacaaggatccagcctatttgaaagatccaaaggtatgtaacatcagatatcgcgaatag

SEQ ID NO: 230843 - DNA, 891 bp, synthetic construct
  misc_feature 1..891: note = Description of Artificial Sequence: Synthetic coding sequence
  source 1..891: mol_type = other DNA
atggctacatcatccgctgccttgccacgaatccttggtgccggagcacgagctccaagtagatggttaggtttcctggggaaggctacacccagacctgccagaccctccagacggactctggggagtgctactgccctcatgatacgcgagagcgaagactcaacagactttaacgataaaatattgaatgagccactgaagcactcagatttcttcaatgtcaaggagctgttttcagtaaggtctttattcgatgcacgcgtgcacctgggtcataaggctgggtgccgccatcgcttcatggagccctacattttcggctcacggttggatcacgatataatcgacctcgaacagaccgccacccatctccagctcgcccttaattttacagcacacatggcttatagaaagggcattatcttatttatctctcggaaccggcaattctcctatctgatcgaaaatatggccagggattgtggcgaatatgcacacacccgttatttcagaggcggtatgctcacaaacgcccgtttgctgtttgggccaactgttcgccttcccgatctgataatttttctgcatactcttaacaatatcttcgagccacacgttgctgtccgtgatgccgctaagatgaacatccctactgtgggaatcgtcgacacaaattgtaacccttgcctaataacctatccagttcccggaaacgacgatagtcctctcgccgtacatctgtactgcaggctcttccagacagccattactagagccaaggaaaagagacagcaggttgaggccctgtaccgtctccagggacagaaggagcctggggatcagggacccgcacacccccctggggcagatatgtctcactctttgtag

SEQ ID NO: 230844 - DNA, 891 bp, synthetic construct
  misc_feature 1..891: note = Description of Artificial Sequence: Synthetic coding sequence
  source 1..891: mol_type = other DNA
atggccacttcctctgccgctttgcccagaatacttggtgccggagccagagccccttcccgctggctggggttcctcggaaaggctacacccagaccagccaggcctagcaggaggactctcggaagcgccaccgcgcttatgattcgggaatcagaggatagcacggacttcaatgacaaaattttgaacgagccactgaaacacagcgactttttcaatgttaaagagctctttagcgtacggtcgctctttgatgctcgggtgcatctaggacacaaagctgggtgccggcaccgctttatggagccttacatcttcggctcccggcttgaccacgacatcattgatctcgagcagaccgctacgcatctgcaactagcactcaacttcacagcacacatggcctaccgaaagggtatcatcctatttatctcgcgtaaccgccagttttcatatttgattgagaacatggccagggattgtggcgaatatgcacacactagatactttagagggggaatgcttacaaatgctagactgctcttcgggcctaccgttcgactgcctgacctgatcatctttcttcacaccttaaacaacatatttgaaccccacgtggctgtccgggacgcggcaaagatgaatatccccaccgtcggcatagtggatactaattgtaatccttgcctcatcacctacccagtacctgggaacgacgactctcccctcgctgtgcacctgtattgtaggctgttccagacagctataacgcgcgcaaaagaaaagaggcagcaggttgaggctctctatcgcctgcaaggccaaaaggaacctggcgatcagggccctgcccatccacctggagccgatatgagccattcactctag

SEQ ID NO: 230845 - DNA, 813 bp, synthetic construct
  misc_feature 1..813: note = Description of Artificial Sequence: Synthetic coding sequence
  source 1..813: mol_type = other DNA
cgccgtggacctctgggtatgcggtggggggcaggggtcgtgcactcagggttgggtgctagaacttctatctactttcctccgggagcgagagcgccttccaggtggctgggatttttaggcaaggctacccctcggcctgcacgcccttctcggaggactcttggcagtgccactgccctgatgataagggagagtgaagattcaacagattttaacgacaaaattctgaacgagcctttgaaacacagtgactttttcaacgttaaggaactcttttcagtaagatctctgtttgacgctagagtgcatctgggacataaggcaggatgccgtcataggtttatggaaccatatattttcggcagccgcttagaccatgatattatcgacctggagcagacagctacccacctgcagctcgcactgaactttaccgctcacatggcctatcggaagggcatcatcttgttcatttctcgtaaccgacagttttcctacctcattgagaatatggcacgagactgcggggaatacgcacatactcggtacttcaggggcggtatgttgaccaacgcgaggctgttgttcgggcctacagtccgtttgccagacctcatcattttccttcacacgctgaataacatttttgagccacacgtggcagtgcgggatgcagcaaagatgaacattccaaccgttggcattgtagacacaaattgtaacccttgcctcattacatatccagtccccggtaacgatgattctccactggcagtgcacctctattgtagactatttcagacagcatag

SEQ ID NO: 230846 - DNA, 264 bp, synthetic construct
  misc_feature 1..264: note = Description of Artificial Sequence: Synthetic coding sequence
  source 1..264: mol_type = other DNA
atggcaaaacatcttaagtttatcgcgaggacagtgatggtgcaagagggcaatgtggagtctgcctatagaaccctcaacagaatactcactatggacggactgattgaggacatcaaacataggcgctactacgaaaagccatgtaggcggaggcagagagagtcttacgagcggtgccgtagaatttataacatggaaatggccagaaagattaatttcctcatgaggaagaatcgggctgacccttggcaaggatgctag

SEQ ID NO: 230847 - DNA, 264 bp, synthetic construct
  misc_feature 1..264: note = Description of Artificial Sequence: Synthetic coding sequence
  source 1..264: mol_type = other DNA
atggccaagcatttgaagtttatcgccaggacagtaatggtacaggagggtaatgtggaatctgcctacagaacacttaatcgcatcctgacgatggatggacttattgaagacatcaagcatcgccgatattacgagaaaccctgcaggcgcaggcagagggagagttacgaacgctgtcggagaatttacaacatggaaatggctagaaaaattaattttctcatgagaaaaaacagagccgacccgtggcagggatgctag

SEQ ID NO: 230848 - DNA, 1083 bp, synthetic construct
  misc_feature 1..1083: note = Description of Artificial Sequence: Synthetic coding sequence
  source 1..1083: mol_type = other DNA
atggccccattgggcacaaccgtgttgttgtggtccctgctgcgctcaagcccaggcgttgagcgagtgtgtttccgagcacgcatccaaccgtggcatggaggactcctgcagcccctgccgtgctcgtttgaaatggggctaccccgtcggagattttctagcgaggccgcagaatcaggaagtcccgaaacaaagaagcctacctttatggatgaagaagtgcaatcgattttgactaaaatgaccgggctcaacctccagaagacattcaaaccggcaattcaggaactcaaaccccctacctacaaactgatgactcaagcacagctggaggaagccaccaggcaggcggtcgaggcagcaaaggtgcgactgaaaatgccgcctgtcctggaggaaagggtcccgatcaacgatgtcctggctgaagacaagatcctcgaggggactgaaactaccaagtatgtttttacagacatttcttatagcatccctcacagggagcgctttatcgtggtcagggagcctagcggcaccttacggaaggcttcatgggaagagagagataggatgattcaggtctatttccccaaggaaggcagaaaaatcttgaccccgatcatattcaaagaagaaaacctccgcaccatgtattctcaggaccgccacgtagatgtgttaaatctgtgcttcgctcagttcgaacctgactccacggaatacatcaaggtccaccataaaacttacgaagatatcgataaaagaggcaagtatgatttgctgagaagcacccgttattttggcggtatggtgtggtatttcgtaaataacaaaaagatcgacggtctactgatcgatcagattcagcgtgaccttattgacgacgccaccaatctcgtgcagctgtatcacgtcctgcatccggatggacaatccgcccagggtgctaaagaccaggctgccgaggggatcaatctgattaaggtcttcgccaagacagaagctcaaaagggcgcatacattgagttgaccctgcagacgtatcaagaggccctcagtcgccactcggccgcaagttag

SEQ ID NO: 230849 - DNA, 1080 bp, synthetic construct
  misc_feature 1..1080: note = Description of Artificial Sequence: Synthetic coding sequence
  source 1..1080: mol_type = other DNA
atggctcctcttggcactactgtgctgctttggtcactcttgaggtcctcccctggagtagagcgcgtctgcttcagggccagaattcagccatggcacgggggactgctacagcccctgccatgctccttcgagatgggactgcctcgtaggaggttctccagcgaggccgaatccggcagccccgaaaccaaaaagcctacttttatggatgaggaggttcaaagtattttgacaaagatgacgggactaaatctgcagaaaaccttcaaaccagcaatccaggagttgaagccccctacctataagctcatgacacaggcccagctggaggaggccacgcggcaagcagtggaggctgccaaggttcgactgaagatgcctcccgttctggaggaacgcgtgccaatcaacgatgtgttggctgaggataagattctcgaaggaacagagaccaccaagtatgttttcacagacatttcgtatagtatcccacacagagaaaggttcattgtggtccgcgaaccctcaggcactcttaggaaagcttcttgggaggagcgggaccggatgattcaggtgtactttcccaaagaagggaggaagattctgacgcccattatctttaaagaagagaacctgcgtaccatgtactcccaggatagacacgtggatgtgctaaatctatgtttcgcccagttcgagccagacagtaccgaatatatcaaagtacaccacaaaacttacgaggacattgacaagcggggaaaatatgacctgcttcgctctacccgatacttcggtgggatggtgtggtacttcgtgaataataaaaaaattgacggactcctgattgaccagatacaacgggacttgattgatgacgccacgaatctcgtccagctctatcacgtcctgcatcccgacggtcagtccgctcagggagccaaagaccaggctgccgagggcataaatctgataaaggtttttgccaaaacggaagcccaaaaaggtgcatatattgaactgactctgcagacctaccaggaggccctctcccgccatagcgccgcaagctag

SEQ ID NO: 230850 - DNA, 960 bp, synthetic construct
  misc_feature 1..960: note = Description of Artificial Sequence: Synthetic coding sequence
  source 1..960: mol_type = other DNA
atgtccagaaacgagaccgagcaccggtacctcggcacgcacttcggagccgagtcaggttccccagaaaccaagaaacccacttttatggacgaagaggtccagtcaatcctcacaaaaatgacgggcctcaatctgcagaaaacgtttaaaccagcgatccaggagctgaaacccccaacctacaagctgatgacccaggcgcagctggaggaggcaaccaggcaggctgtggaggcagctaaagttcggttaaagatgcctcctgtgcttgaggagcgcgtaccaattaacgatgtgcttgctgaggacaagatactggaaggcactgagaccactaagtacgtcttcactgacattagctattcgattccccatagggaacgttttattgtggtgagagagccgtctggaaccctccgaaaagcaagctgggaggagcgagaccgtatgatccaagtgtattttcctaaggaggggcgaaagattttgacgcctatcatcttcaaggaggaaaatctacgcaccatgtactcccaggaccgccacgtcgacgtgcttaacctctgcttcgcgcagtttgaacccgattctactgagtatatcaaagttcaccacaaaacatatgaagatatcgacaaacgcggtaagtatgacttattgcgatctacccgctatttcggcggaatggtctggtacttcgtgaacaataaaaaaatcgatggacttctcatcgatcagatccaaagagacctgatcgatgacgctaccaacctcgtgcaattgtatcacgttttgcaccccgacggccaatcagcacagggcgcaaaagaccaggccgctgaggggattaatcttataaaggtcttcgccaagacagaggcccaaaaaggagcatatatagagctgacgttacaaacttaccaggaggcactgagccgccactccgccgctagctag

SEQ ID NO: 230851 - DNA, 1083 bp, synthetic construct
  misc_feature 1..1083: note = Description of Artificial Sequence: Synthetic coding sequence
  source 1..1083: mol_type = other DNA
atggccccactgggcacaacagtcttgctttggtcactgctaagatcgtccccaggtgtggagagggtgtgcttccgggcaagaatccaaccctggcatggcggactcctgcagcctctcccatgcagctttgagatggggttacctcgcagaagattttcaagcgaggccgctgagagtggctctccggagactaaaaaaccaactttcatggatgaggaagtccagtcgatcctgacaaagatgacaggccttaatctacagaagacatttaaaccagccatccaagaattgaagcctcccacatataagctaatgactcaggcgcagttagaggaagcaactagacaggctgtggaggctgccaaagtgagactgaaaatgcccccagtgctggaagaaagggtgccgatcaacgacgtgcttgcagaggacaagatacttgaaggtacagaaactacaaagtacgtattcaccgacattagctacagcataccacaccgcgaaaggttcatcgtggtgcgcgaaccatctgggactctccggaaggcatcatgggaagaacgggaccggatgattcaggtgtattttcccaaggaaggtcgcaaaattctgactcctatcatattcaaagaagagaatttgcgcacgatgtactcccaggaccgccatgtcgacgtacttaacttgtgcttcgcccagttcgaacccgactctactgaatacattaaggtgcatcacaagacctatgaagacatcgacaagcgcggtaaatacgatttgcttagaagtacaaggtacttcggcggaatggtctggtattttgtgaataacaaaaaaatcgatggtcttctgatcgaccagattcaaagagacctcatagacgatgccaccaacttagtgcagctgtatcacgtcctgcatcccgacggccaaagcgcacaaggggctaaggaccaggccgctgaagggatcaacctgattaaggtttttgctaaaaccgaggcacagaagggagcatacatagaactgacactgcaaacttaccaggaggctctaagtcgtcactccgccgcaagttag

SEQ ID NO: 230852 - DNA, 507 bp, synthetic construct
  misc_feature 1..507: note = Description of Artificial Sequence: Synthetic coding sequence
  source 1..507: mol_type = other DNA
atggctcccctcgggacaacagtgctgttatggagcctcctgagaagctcccccggtgtggagagagtgtgcttcagagctagaatccagccttggcacggcggattgctgcaaccgctcccctgctcattcgaaatgggtttacccagaagaaggttttcttccgaagccgaatccggctctcccgagactaaaaaaccaactttcatggacgaggaagttcagagtatcttgacaaaaatgactggcctgaatctacaaaaaacgtttaaacctgccatacaggagctgaagcccccaacatacaagttaatgacccaagcgcaacttgaagaggcgacccgtcaggctgtggaagctgccaaggtccgtctcaagatgccaccagtattggaggaaagagtgcccattaatgatgttctggctgaggacaagattctggagggaactgagaccaccaagtatgtttttacagacatcagctacagcatcccccatcgttgttag

SEQ ID NO: 230853 - DNA, 573 bp, synthetic construct
  misc_feature 1..573: note = Description of Artificial Sequence: Synthetic coding sequence
  source 1..573: mol_type = other DNA
atggcagggtcaagactggagacagtgggctccatcttctcccgcactcgagacctagttcgcgcaggggtgctcaaagagaaacctctttggtttgatgtctacgatgcattcccccctcttcgcgagccggtgttccagcgccctcgagtgagatacggcaaggctaaagcccctattcaggatatctggtatcacgaggatagaataagagccaagttttatagtgtctatggatcagggcagagagcgttcgacttatttaatcctaattttaaaagtacctgtcaaagattcgtcgagaagtataccgagttgcagaaactgggggaaaccgatgaggagaaattattcgtggagactggcaaagctctactagcagagggtgtcatactcagaagagtgggcgaagcgagaactcagcacggagggtctcacgtgtcgcgcaagtctgaacatctcagcgttagaccccagacggcccttgaagaaaacgagacacagaaggaggtgcctcaggaccaacatctggaagcccctgctgaccaatcgaaaggattgctccccccatag

SEQ ID NO: 230854 - DNA, 504 bp, synthetic construct
  misc_feature 1..504: note = Description of Artificial Sequence: Synthetic coding sequence
  source 1..504: mol_type = other DNA
atggcggcaagcgtctgttctggacttctgggccctcgagtgctgtcatggtcacgtgagcttccttgcgcctggcgcgcactccacacatcccctgtgtgcgccaaaaatagagcagcacgagtgagagtcagtaagggggacaaacccgtgacatacgaggaggctcatgcaccccattatatcgcccaccgtaagggttggctcagcctgcatacagggaacttagatggagaggatcacgctgccgaaaggacagtggaggacgtatttctgaggaagtttatgtggggaaccttccccggttgtctcgcagatcaattggtgctgaagagacgcggtaaccagctggagatatgcgctgtagttctgagacagctgtctccccacaagtattacttcttggtcggttatagcgagacgctcctctcctatttctacaagtgccctgttcggctccatctccagaccgtgccgagtaaagtggtgtataagtatctatag

SEQ ID NO: 230855 - DNA, 522 bp, synthetic construct
  misc_feature 1..522: note = Description of Artificial Sequence: Synthetic coding sequence
  source 1..522: mol_type = other DNA
atgcctatgaagggccgttttcccatcagaagaactttacagtatctgtctcagggcaatgttgtgtttaaggactctgtgaaagtgatgaccgttaattataacacccacggtgaactcggagagggcgcacggaaattcgtgtttttcaacatcccacagatccagtacaaaaacccgtgggtccagatcatgatgtttaaaaatatgaccccttcccccttcctcaggttctacttggactcaggcgaacaagtactggtggacgtcgaaaccaagtctaacaaggagattatggagcatatacgcaagattttgggcaaaaatgaggagacccttagggaggaggaagaggaaaagaaacagttgtcacacccagcaaattttggtcctcgaaaatactgtctgcgtgaatgcatttgcgaagtggagggtcaggttccttgtccatctttggtccccctgcctaaggagatgagaggaaagtacaaagctgccctgaaagccgacgctcaagactag

SEQ ID NO: 230856 - DNA, 333 bp, synthetic construct
  misc_feature 1..333: note = Description of Artificial Sequence: Synthetic coding sequence
  source 1..333: mol_type = other DNA
atgcctatgaaaggacggttccctataaggcggacactacaatacttaagccagggtaacgtcgtatttaaggactccgtgaaagtgatgactgtaaattacaatactcatggggaactgggggaaggcgcacgaaaatttgttttctttaatataccccagatccagtataaaaatccttgggtgcaaattatgatgttcaagaacatgactcctagtccgtttttgcggttttatctcgatagtggcgagcaggttttggttgatgtggagaccaagtctaataaggagattatggagcatataagaaagatcctgggcaagaacgaatag

SEQ ID NO: 230857 - DNA, 390 bp, synthetic construct
  misc_feature 1..390: note = Description of Artificial Sequence: Synthetic coding sequence
  source 1..390: mol_type = other DNA
atgcctatgaagggcaggttccctattagaaggactttgcaatacttgagtcaaggcaacgtggtctttaaggactcagtgaaagtgatgactgtgaattacaacacacatggagagctaggcgaaggcgcaaggaaatttgtattctttaacattccgcagatccaatacaagaatccctgggtccagattatgatgtttaagaatatgacaccgtccccattcctgcgcttctacctgggaaagccttcaggcaaaagaagaaggcgcaagtcttctttcctgacacagccgacttcagctctggagagcaccgcatgtgggtctgctagcgtgaagtggaaaggcaggtgccccgctcccgcatggtgtcactatcccaggcggtag

SEQ ID NO: 230858 - DNA, 333 bp, synthetic construct
  misc_feature 1..333: note = Description of Artificial Sequence: Synthetic coding sequence
  source 1..333: mol_type = other DNA
atgccaatgaaggggagatttccaatcagacgcactctccagtatctgagccagggaaacgtggtattcaaggactccgtcaaggttatgaccgtgaactacaacacccacggcgagctgggtgagggtgcacgaaagttcgtgttcttcaacatcccacagatccagtacaagaacccatgggtgcagattatgatgttcaaaaatatgaccccttctcctttcctccgcttttaccttgactctggggagcaggtgttggtagacgttgagactaaatccaataaagagataatggagcacatcaggaaaatccttgggaaaaatgaatag

SEQ ID NO: 230859 - DNA, 438 bp, synthetic construct
  misc_feature 1..438: note = Description of Artificial Sequence: Synthetic coding sequence
  source 1..438: mol_type = other DNA
atgcccatgaaaggaaggtttccaatccggagaaccttgcaatatctgtcccagggtaacgtggtattcaaagattcagtaaaggtgatgactgtgaactataatactcacggtgagctcggcgaaggggcacggaagttcgtcttcttcaacattccacagatccagtacaagaatccttgggtgcagatcatgatgttcaagaatatgacccccagtcccttcctgaggttctatctcgacagcggcgaacaagtcctggttgatgtggaaacgaagagtaataaagaaatcatggagcacatccgcaaaatactcgggaaaaatgagcattacctcgccgctccaagcaaaccggtgtcatctgctgtggttccggtcactcaggaggccgaggccggagggagccttgaacctcgccgacttaggttggaatag

SEQ ID NO: 230860 - DNA, 618 bp, synthetic construct
  misc_feature 1..618: note = Description of Artificial Sequence: Synthetic coding sequence
  source 1..618: mol_type = other DNA
atgttgagagcactctctcgtttgggcgctggcacaccatgcagacccagagcccctctagtacttcccgctcgcggtaggaaaacaagacatgatcccctagctaaatccaagatcgaacgtgtcaacatgccccctgctgtcgaccccgcagagttcttcgtgcttatggaacgataccagcactacaggcagaccgtgagagctctgaggatggagtttgtgagcgaagtgcagcggaaggttcatgaagctcgggctggagtgctggcggagcggaaagccctcaaggacgctgcggaacatcgggaattgatggcgtggaaccaggccgagaaccgcaggctccatgagctcaggatagctcgcctgcggcaagaggagcgggagcaggagcaacggcaagccctcgaacaggccaggaaagccgaggaggtgcaggcttgggcccagagaaaggaacgggaggtcctgcagctacaggaagaagttaagaacttcatcacacgggaaaaccttgaggccagggtagaggctgctctcgattcccggaagaactacaattgggctatcactagggaaggtctcgtagtccgaccacagcggagagacagttag

SEQ ID NO: 230861 - DNA, 1245 bp, synthetic construct
  misc_feature 1..1245: note = Description of Artificial Sequence: Synthetic coding sequence
  source 1..1245: mol_type = other DNA
atggccgcatcgattgttcgcagaggcatgttactcgcaagacaagttgtacttccacagctgtccccagcaggaaagagataccttctttccagcgcgtatgtcgactctcacaagtgggaagcacgtgagaaggaacattactgccttgccgacctggcgagcctgatggacaaaaccttcgagaggaagctacccgtgagtagcttgacgatttcaaggctcattgacaacatctctagtcgcgaagagattgatcatgccgaatattacctgtataaattcaggcacagtccgaattgttggtatttgcgcaactggaccatccacacgtggatcaggcagtgccttaaatatgacgcccaggataaggccctgtacacgttggtaaataaggtgcaatatggaatcttccctgacaactttaccttcaatcttctgatggactcattcattaagaaagagaactacaaggacgctttgtctgtggtgtttgaagtaatgatgcaagaggcttttgaagtgccaagcacacagctgctgtcactgtatgtgttgttccactgccttgccaagaagacagacttcagctgggaagaggagcgcaattttggtgcgtcgctcctacttccgggactcaagcagaaaaatagcgtggggttcagcagccagctgtacggctatgcgctgctggggaaggtggaattgcaacaggggcttcgcgctgtttaccataatatgcccctgatttggaagccaggctacttagaccgtgccctgcaggtaatggagaaggtggcagctagtccggaggatattaagctttgccgagaggcgctagacgtcctaggggctgtcttaaaggctctgacctccgcagacggcgcaagcgaggaacaatctcaaaatgacgaggacaatcagggcagcgaaaagttagtggagcaactggatatagaagagaccgagcagtctaaactcccacaatacctggagcgctttaaggctctgcacagcaaacttcaggcactgggaaagatcgaatcggaggggttactgtccctgaccacacagctcgtgaaggaaaaactcagcacgtgtgaagctgaagatatagccacctatgaacaaaaccttcagcagtggcacctcgatctcgttcagctaatccaacgagagcagcagcagcgcgagcaggcgaagcaggagtatcaggcccaaaaggcagccaaggcatctgcctag

SEQ ID NO: 230862 - DNA, 1077 bp, synthetic construct
  misc_feature 1..1077: note = Description of Artificial Sequence: Synthetic coding sequence
  source 1..1077: mol_type = other DNA
atggacaagaccttcgaaagaaaactgcccgtatcttcactcactatctcaaggctaatcgataatattagctccagagaagagattgaccatgctgagtactacctctacaaattcaggcactctccaaattgctggtacctacgcaactggaccattcacacttggattcgccaatgcttgaagtacgatgcacaggacaaggccttgtacacactggtcaacaaggtccagtatggcatctttcccgacaattttacattcaatctgctaatggactcttttatcaaaaaagagaactacaaggacgccctcagtgttgtgtttgaagtgatgatgcaggaggcttttgaagtgccttccactcagttactgtccctgtacgtgcttttccactgtctggcgaagaagaccgacttttcgtgggaagaggaacggaacttcggggcatcgctgctgttacctggtctcaagcagaagaacagtgtgggcttcagttctcagctgtacggctacgctctgctgggtaaggtggaactgcagcaggggctccgagctgtgtaccataacatgccattaatttggaaacctggctatctcgatcgggctcttcaggtgatggaaaaggtcgccgcatctcctgaagatataaagctgtgtagagaggcccttgatgtgctgggtgcggtgctgaaggccctcaccagcgccgatggcgctagtgaggagcagtcacagaatgatgaagacaaccagggatctgagaagttagtggagcagctcgatattgaagagacagagcaatcaaagcttccacagtacctggaacgttttaaggcactccattcgaagctgcaggccctgggcaagattgagtctgaggggttgctgtctttaactactcagctggttaaggaaaagctgagcacctgcgaggctgaggacatcgcaacttatgagcagaatttgcaacaatggcacctcgacctggtacagctgatccagcgagaacaacagcaacgcgagcaagcaaagcaagaatatcaagcccagaaagccgctaaggcctctgcctag

SEQ ID NO: 230863 - DNA, 1287 bp, synthetic construct
  misc_feature 1..1287: note = Description of Artificial Sequence: Synthetic coding sequence
  source 1..1287: mol_type = other DNA
atggcagcctcaattgtaagaagaggtatgctgctggcaaggcaagtggtcctgccccagttgtctcccgcaggaaaaaggtaccttcttagcagtgcatacgtggattcccacaaatgggaagcaagagagaaggaacattattgtctggcagacttggcttccctaatggacaagacctttgagcggaaattgcctgtgtcatcactgaccatttccagattgatagataacatcagttcgcgagaagaaattgatcatgctgaatattatctttataaaaaaggggagtgctcaagctcaaacccacaaaattactccagatttagacattctcccaattgctggtaccttcgcaactggactattcacacttggatccggcaatgtcttaaatacgacgcacaggataaggccttgtacactctggtcaacaaagtacagtacgggattttccctgataactttaccttcaacttactgatggattcctttattaaaaaagagaactataaggatgcccttagtgtggttttcgaagttatgatgcaggaggccttcgaggtgccgagcacgcagctcctgagtttgtacgtcttattccattgcttggcaaagaaaacagatttcagctgggaagaggaaagaaatttcggtgcgagcttactacttcctgggctgaagcagaagaattcggtcgggttcagttcccagctttatgggtatgcgctgcttgggaaggttgagctccagcagggtctgcgtgccgtctatcacaacatgcctctgatctggaagcccggttatcttgatagggcattgcaggttatggaaaaagttgcggcatcgccggaggatatcaagctgtgtcgggaggccctagacgtgcttggtgcagtgctgaaggctctgacctccgccgacggggcatctgaagagcagtcacagaacgacgaggataaccagggctccgaaaaactggtggaacagcttgacatcgaggagaccgaacagtctaagctgccccagtatttggaaagatttaaggccctgcattcaaaacttcaggccctcggtaaaatcgagtctgagggcctcctcagcctcaccacccagctggtcaaagaaaaactcagtacgtgcgaagctgaggatatagcgacctacgaacagaacctgcaacaatggcatctcgatctggtccagttgattcagagagagcagcagcagcgggagcaagcaaagcaggagtaccaggctcagaaggcggcaaaagcaagtgcctag

SEQ ID NO: 230864 - DNA, 564 bp, synthetic construct
  misc_feature 1..564: note = Description of Artificial Sequence: Synthetic coding sequence
  source 1..564: mol_type = other DNA
atggccgcactgtgtagaacccgggcagttgctgccgaatcccatttcctgcgcgttttcctatttttccggccattccgcggagtgggaacagagtcaggcagtgaatccggtagcagtaatgccaaagaacccaaaacaagagcgggaggctttgcaagcgccctggagagacacagcgagttactgcagaaggtcgagccactgcaaaagggttcacccaagaatgtggaatcattcgcgagtatgctccgccactctcccctcacgcagatgggtcccgcaaaagacaaactcgtaattggacgaatattccacatcgtggagaatgatctctacatcgacttcgggggaaaatttcactgcgtgtgccgcagacccgaagttgacggagagaaatatcaaaaagggactagagtgcgcctcagacttttggatcttgaactaaccagtcggtttctcggcgctacaactgacacaaccgtgctggaggccaatgctgtgctgttaggtatccaggaatcaaaggactcgcgctctaaagaggagcaccacgaaaagtag

SEQ ID NO: 230865 - DNA, 1320 bp, synthetic construct
  misc_feature 1..1320: note = Description of Artificial Sequence: Synthetic coding sequence
  source 1..1320: mol_type = other DNA
atggccgcagcacgctgttggcgcccacttctccggggtccaagactctctctgcacactgcagccaacgccgcagccacagcaaccgagactacctgccaggacgtagccgcaacacccgttgcaaggtacccacctattgtagcttcaatgactgcagatagtaaggcggctaggctcagaaggatcgagcggtggcaagctaccgtccatgcggcagagtcagtcgacgagaaactcagaatcctgaccaaaatgcagttcatgaaatacatggtgtatccccagaccttcgcgttgaacgcggatagatggtaccaatattttacaaagacagtattcctcagcggcctgccccctcctcctgcggaacctgagcccgagcccgagcccgaaccggagcctgcactggatcttgccgctcttcgtgccgtcgcctgcgattgtctcctccaggagcacttttatttgaggaggcggagacgggtgcacaggtatgaagaaagcgaagtcatctccctccctttccttgaccagctcgtcagcacacttgttggattgttgagcccccacaacccagccctggcagctgcggctttggattatcgatgcccagtacacttctactgggtgagaggcgaggaaattatcccacggggtcatcgtcgtgggaggatagacgatctcagataccagatcgacgacaagccgaataaccagattcgcatctccaagcagttggccgaatttgtgccacttgattatagcgtgcccatagagatccccaccatcaaatgcaaacctgacaagttgcccctttttaaacggcaatacgaaaatcatatattcgtcggcagcaagaccgcggatccctgctgttacggtcacacacagttccatctccttcctgacaagctccgtagggaacgcttattgagacagaactgtgccgaccaaatcgaagtggtctttcgggctaatgcgatagcaagtctgttcgcctggaccggagcccaggccatgtaccaaggtttttggtccgaggcagatgtgacaagaccatttgtttcccaagccgtgataaccgatggtaaatatttttctttcttttgctaccaactcaacacgctggcattgacaactcaggccgaccagaataacccgcgaaagaatatatgttggggaactcagagcaaacccctgtacgagactatcgaggataacgatgtgaagggatttaacgatgacgtattactgcaaatcgttcatttcctcctgaacagacccaaagaggagaagtcacagctgctagagaactag

SEQ ID NO: 230866 - DNA, 1188 bp, synthetic construct
  misc_feature 1..1188: note = Description of Artificial Sequence: Synthetic coding sequence
  source 1..1188: mol_type = other DNA
atgtttccaagggtaagcaccttcctgccactgcgcccactcagccggcaccctttgtcttctggaagccccgaaacctccgccgctgctattatgcttcttaccgtaagacacggaacagttcggtacaggtcctctgcattgctggcacggacaaagaataatatccaaaggtatttcggcacgaacagcgtgatctgtagtaagaaagacaaacagagtgtgcggaccgaggagacatctaaagaaacatccgagtcccaggattccgagaaagaaaacaccaagaaggatcttcttggaatcataaagggaatgaaggtggaattgtctacagttaacgtccggactaccaagcctcccaaacgaagacctctgaaaagtctggaagccaccttaggtcgtttgagacgcgcaacagaatacgcaccgaagaagagaatcgagccactctcaccagagttggttgctgctgcctcagctgtcgccgacagtttgccatttgacaaacaaaccacaaaatctgaactgttgagtcagctccagcagcacgaggaggaaagcagagcccagagagatgcaaaacgccctaagatctccttttctaatatcatctccgacatgaaggtggctcgctctgcaactgccagggttcgctcaagacctgaactgcggatccagtttgacgaagggtacgacaactatccaggacaggaaaagaccgacgacttgaaaaaaaggaaaaacatcttcacaggaaagaggctcaacattttcgacatgatggcagtgactaaggaagctcctgaaaccgacaccagcccttctctctgggacgtggagttcgctaagcaactggcaacagtcaatgagcaaccactccagaacggcttcgaagaattgatccagtggacaaaagagggaaagctgtgggaatttcccatcaataatgaggccggtttcgatgacgacggaagcgagtttcacgagcatatcttcctggagaagcacctcgagtctttcccaaagcagggtccaatcagacacttcatggaactggtgacctgcggcctctctaagaatccctatctgtccgttaaacagaaggtcgagcacatcgagtggttccgtaattacttcaatgagaagaaagatatattgaaagaatccaacatccagttcaactag

SEQ ID NO: 230867 - DNA, 321 bp, synthetic construct
  misc_feature 1..321: note = Description of Artificial Sequence: Synthetic coding sequence
  source 1..321: mol_type = other DNA
atgtcgtccttgtccgaatatgcgtttaggatgtcgcgccttagcgctcgcctattcggcgaggtgacaagacccacaaatagcaaatctatgaaggttgtgaaactgtttagcgagctgcctctggcaaagaaaaaagagacctatgattggtacccaaaccaccatacctatgccgaactgatgcagacgttgagattccttggcctgtatcgagatgaacaccaggatttcatggatgagcaaaaaagactcaaaaagttgcggggaaaagaaaaacctaaaaagggcgaagggaagcgggcagcaaaacgcaagtag

SEQ ID NO: 230868 - DNA, 321 bp, synthetic construct
  misc_feature 1..321: note = Description of Artificial Sequence: Synthetic coding sequence
  source 1..321: mol_type = other DNA
atgagctcattgtccgagtacgcatttaggatgagtagactgtccgcgaggctcttcggggaggtcacacggcctaccaactcaaaatcaatgaaggttgtgaagctgtttagcgagctcccactggcaaagaagaaggaaacctacgactggtaccccaatcaccacacctacgcagagttgatgcagactctgagatttctcggcctgtatcgggatgaacaccaagattttatggatgagcagaaacgtttaaaaaaactacgcggaaaggagaagcccaaaaagggggaagggaaacgagccgctaaaagaaagtag

SEQ ID NO: 230869 - DNA, 321 bp, synthetic construct
  misc_feature 1..321: note = Description of Artificial Sequence: Synthetic coding sequence
  source 1..321: mol_type = other DNA
atgagctctttgtccgagtacgcatttcggatgtcccgcctctccgctcggctatttggcgaggtgaccaggcctaccaattctaagagcatgaaagttgtgaagttgttcagcgaattaccgttagctaaaaagaaggagacctacgactggtacccaaaccaccatacctatgcggagcttatgcagacactccggtttctgggactatatagggacgaacaccaggatttcatggatgagcagaagcgattaaagaaattgcgcggaaaggaaaaaccaaagaagggagaaggtaagagggcagcaaaacgaaagtag

SEQ ID NO: 230870 - DNA, 321 bp, synthetic construct
  misc_feature 1..321: note = Description of Artificial Sequence: Synthetic coding sequence
  source 1..321: mol_type = other DNA
atgagcagtctgtccgaatacgcgttcaggatgagtaggctgagcgcccgtctatttggggaggtcactcggcctacgaacagtaaatccatgaaggtggtcaagctttttagtgagctacccctggccaaaaaaaaagagacgtacgactggtatccaaaccaccatacctacgcagagttaatgcaaacactgcgctttcttggtttgtatcgtgatgagcatcaagacttcatggatgaacagaagcgactgaagaagctaagaggcaaggagaagcctaagaaaggggaggggaaaagggctgccaagcggaagtag

SEQ ID NO: 230871 - DNA, 339 bp, synthetic construct
  misc_feature 1..339: note = Description of Artificial Sequence: Synthetic coding sequence
  source 1..339: mol_type = other DNA
atgtccagtctgtcagaatacgccttccggatgtctcgcttgtccgcacgactgttcggagaggtgactcgacccacgaatagcaagagcatgaaggttgtaaaactctttagtgagctccccctggcgaagaaaaaggaaacttacgactggtatccaaaccaccatacctatgccgaattgatgcaaacgttgaggttcctgggactgtatagagacgagcatcaggacttcatggacgaacagaagcggctcaaaaagctgcgcggaaaagaaaagccgaagaaaggggaaggcaaacgggctgctaagcgtaaaaaaaagaaaaagaagcgatag

SEQ ID NO: 230872 - DNA, 678 bp, synthetic construct
  misc_feature 1..678: note = Description of Artificial Sequence: Synthetic coding sequence
  source 1..678: mol_type = other DNA
atggccaggaagaaggtccgccctcgcctgattgctgaactggcaaggcgcgttagagccttgagggagcagctgaacagacctcgggattcccagctttacgcagtggactacgagactctgacccgcccatttagtgggagaagacttcctgtgcgtgcctgggctgacgtgaggagggagagccgactgctgcagctgctcggtcgactaccccttttcggactaggtcgtctggttacgcgaaagagttggctttggcaacacgatgaaccctgctactggagactgacaagagtgcggccagattatactgcacagaacctggatcacggcaaagcatggggaatcctcaccttcaaagacgcaagtttttcctcctctggcaaaacagagagcgaagcaagggagattgaacacgtgatgtaccacgactggaggctggtgcccaagcatgaggaggaagcttttacagcctttacccccgctcctgaggattccttggctagcgtgccatatccgcctctgctccgggctatgattattgccgagagacagaagaatggagacacatcgactgaggagccgatgttgaacgtgcagcgcattcgcatggaaccctgggattatcctgccaagcaggaggacaaagggcgtgcgaagggaaccccggtgtag

SEQ ID NO: 230873 - DNA, 657 bp, synthetic construct
  misc_feature 1..657: note = Description of Artificial Sequence: Synthetic coding sequence
  source 1..657: mol_type = other DNA
atggcacggaaaaaagtccgtcctaggctgatagctgagctcgcgcgtagggttcgggctttaagggagcagctaaatagaccacgagatagccaactttatgccgttgactacgaaaccctgacccgccctttcagtggcaggaggctgcccgtgcgtgcatgggctgatgtgagacgcgaatcgcggctacttcaactgctcgggcgactgcccctctttggcctcggaagattggtgaccaggaaatcttggctgtggcagcatgacgagccatgttactggaggctgacaagggtgaggcccgattataccgcacagaatctggatcacgggaaagcatggggtattctaacgtttaaaggcaaaaccgagtcagaggccagagagatcgagcacgttatgtatcacgattggcgcttggtgccaaagcacgaggaggaggcctttaccgcgtttacccccgctcctgaagactcactggcatccgttccctaccctcccttgttacgggctatgataattgccgaacggcagaagaacggcgacacgagcacggaagagccaatgctgaacgtacaacgcatcaggatggagccatgggattatcccgctaagcaggaggacaaaggtcgagccaaagggacccccgtgtag

SEQ ID NO: 230874 - DNA, 972 bp, synthetic construct
  misc_feature 1..972: note = Description of Artificial Sequence: Synthetic coding sequence
  source 1..972: mol_type = other DNA
atggctgctgcagcattaccagcctggctgtcactgcagagtcgtgcaaggaccttgagggccttcagcacagccgtgtacagtgccacccctgtgcccactccttcattgcccgaacgaacaccgggtaatgaacggccacctcggcgtaaggcattgccccctagaactgagaagatggctgtggatcaggactggcccagtgtctaccctgtggcggcacctttcaaaccatctgccgtccccctccccgtacgcatggggtatccggttaagaaaggggtcccaatggctaaggagggcaacctggaattactcaagatccccaactttttgcacctaacgcccgtggccatcaagaagcactgcgaggcactcaaggatttttgcaccgaatggcccgctgccctggactcggatgagaaatgtgaaaagcacttcccaatcgaaatagattctaccgactacgtcagcagcggcccaagcgtccgcaacccccgagcacgggtggtcgtgctcagggttaaactaagcagcctgaatctggatgatcacgccaagaagaaactaatcaaacttgtaggggaaagatactgtaaaaccactgacgtactaacgattaagacagatagatgccccctgaggcgccaaaactatgactacgctgtgtacttactgacagtgctataccacgagagttggaacacagaagagtgggaaaaatctaaaaccgaggccgacatggaggagtatatctgggagaactccagcagcgagaggaatatcctggaaactctgctacagatgaaggcagctgagaaaaacatggaaatcaacaaagaagaactgttgggcactaaagaaatagaagagtataagaagagtgtcgttagtctgaaaaacgaagaggagaacgagaatagcatttcccaatataaggagagcgtgaaacgccttctaaacgtgacttag

SEQ ID NO: 230875 - DNA, 864 bp, synthetic construct
  misc_feature 1..864: note = Description of Artificial Sequence: Synthetic coding sequence
  source 1..864: mol_type = other DNA
atggctgccgctgccttacccgcttggctcagcctgcagtctagggcacgaacactgcgagcattcagcactgcagtgtacagcgcgactcctgtccctaccccttccctgccagaacgcacacctggtaatgagcgtcctccaaggaggaaggccctgcccccaaggaccgagaagatggcagtggaccaagattggcctagcgtgtaccctgtcgccgctccattcaagccctccgccgtccctctgcccgtacggatgggatatccagtcaaaaaaggcgtccctatggcaaaggagggcaacctggaattactgaaaattcctaacttccttcacttgacaccagtggctatcaaaaagcattgtgaggctctcaaggacttttgtacggaatggcccgctgctttggactccgacgagaaatgcgaaaagcacttcccaatcgaaatcgacagtacagattatgtctcttctggacctagcgtgcgcaaccccagggcgagagttgtagtgttacgcagatgtcccctccgacggcaaaattatgactacgctgtttatttgcttaccgtactgtaccatgagtcatggaacactgaagaatgggaaaaaagtaagaccgaagctgacatggaagaatacatctgggaaaatagtagcagtgaacgcaacattctcgagacattgcttcagatgaaggccgctgagaagaatatggagataaataaagaggaactgctaggcaccaaagagatcgaggagtacaagaaatctgttgtctccttgaaaaatgaagaagagaacgagaacagcatttctcagtacaaggagtctgtaaagaggttactgaatgtgacctag

SEQ ID NO: 230876 - DNA, 585 bp, synthetic construct
  misc_feature 1..585: note = Description of Artificial Sequence: Synthetic coding sequence
  source 1..585: mol_type = other DNA
atggcagccgcagccctgcccgcttggctgtctctgcaaagccgcgctcggacactgcgggcattctccacggccgtgtatagtgccacgcctgttcccacaccgtctcttcccgagcggaccccaggcaacgaacgaccacctcgccgaaaagccctgcctcctcgcacggagaagatggccgtggatcaggattggccatccgtttacccagtcgccgctccgttcaaaccttcggccgtcccgctgcccgtgagaatgggatacccagtcaaaaagggcgtgccaatggccaaggagggtaacctcgagttgttgaaaattcccaacttcctgcacctgactccggttgcaatcaagaagcactgcgaggctttaaaagacttttgtactgaatggccggctgcccttgattccgatgagaaatgtgagaagcatttccccatcgagatagattccaccgactacgtgagctcaggtccatccgttagaaaccccagggccagggtcgtggtattaagggtgccgtttaaggaagcagagctccggctgtgcagcgtctcgaccaatagcgtgatcccttag

SEQ ID NO: 230877 - DNA, 312 bp, synthetic construct
  misc_feature 1..312: note = Description of Artificial Sequence: Synthetic coding sequence
  source 1..312: mol_type = other DNA
atgatgggcagcaaaatggccagcgcatctagagtagtacaagtggttaaaccccacacccctttaattcgtttcccagaccgcagggacaacccaaaaccaaatgtctctgaggctcttcgctcagctggacttccctctcacagctccgtgatcagccagcacagcaagggctccaaatcccctgacttactcatgtaccaagggcctcccgatacggccgaaattatcaagacactacctcagaagtaccggagaaagttagtaagccaggaagagatggagtttattcaacgaggaggacccgaatag

SEQ ID NO: 230878 - DNA, 1293 bp, synthetic construct
  misc_feature 1..1293: note = Description of Artificial Sequence: Synthetic coding sequence
  source 1..1293: mol_type = other DNA
atggcgacagccgttcgggctgtcgggtgtctgccagtgttatgctcaggcacagctgggcatctactcggacgacagtgcagcctgaacacgctcccagctgccagcattttggcttggaagtcggtgctggggaatggacatttatcctcgctcggcacccgggacacacatccctatgcctccctgtcccgagcactgcagacccagtgttgcatctcctctccctctcatcttatgtcgcagcagtatcggccttattcatttttcacgaagctgaccgctgacgagctgtggaagggagccctggccgagacaggggcaggagccaagaagggccgaggaaaacgaactaagaagaagaaacggaaggacctcaacagaggacagattatcggagaaggcagatatgggtttctctggcccggacttaatgtgcccttgatgaaaaatggagccgtgcagaccattgcccagcgaagcaaagaggagcaggagaaagtggaggccgacatgattcagcaacgtgaggagtgggaccggaaaaagaagatgaaggtgaaacgagagaggggttggagtgggaacagctggggcggtatttccctcggccctccagacccgggaccatgcggcgagacttacgaagactttgacacaagaattctggaggttcgcaacgtgttcaccatgactgctaaagagggacgcaaaaaatccataagggtgctggtcgccgttggtaacggtaagggggcagccggattctccatcgggaaggctaccgaccgtatggatgctttccgtaaggctaagaatcgggcagtgcaccacctacattacatcgaacgctacgaagaccacactatcttccatgacattagccttcggttcaagcgcacccatattaagatgaaaaaacagcccaaaggttatggattaaggtgtcatagggcaattatcacaatctgccgcctgatcgggatcaaggacatgtacgcaaaggtgtctggaagcattaacatgctgtccctgacacagggacttttcagagggctaagccgccaggaaacccatcaacagttagccgacaagaaaggtctgcatgtcgttgaaattagggaggaatgcggacccctccctattgttgtggcctcccccaggggtccactccggaaagatcccgagcccgaggacgaagtccccgatgttaaactcgactgggaggacgtgaaaaccgcacagggtatgaagagatccgtatggtctaacctgaagagggccgcaacatag

SEQ ID NO: 230879 - DNA, 378 bp, synthetic construct
  misc_feature 1..378: note = Description of Artificial Sequence: Synthetic coding sequence
  source 1..378: mol_type = other DNA
atgccaaggtacgaactggccctgatcctgaaggcgatgcagaggcccgagactgccgctacactcaagaggaccatcgaggctctcatggatcgtggggctattgttagggatctggagaacctgggcgagagagctctcccttatcgcatctccgcacacagccagcagcataatagaggtggttactttttagtggatttctatgcgcctacagccgcagtagagtctatggtagagcacttgtccagagatatcgacgtgatcagaggcaacattgtgaagcatcccttgacccaggagctgaaggagtgcgagggcatcgtccctgtcccactggctgagaaactctattctacaaagaaacgcaagaagtag

SEQ ID NO: 230880 - DNA, 729 bp, synthetic construct
  misc_feature 1..729: note = Description of Artificial Sequence: Synthetic coding sequence
  source 1..729: mol_type = other DNA
atggccgctcctgctgtgaaagtggctcgcggttggagcggtctggccctgggtgtccgcagggcggtgctgcaactcccgggactaacccaggttagatggagcaggtactctccagaatttaaggatcccctgattgacaaagaatactaccgaaaaccagtggaggagctaactgaggaggagaagtatgtgcgggaactgaagaaaactcaactgatcaaggccgctcctgccggaaagacaagctctgtgttcgaagatccagtgatatcaaagttcacaaacatgatgatgattggaggtaataaggtactcgccaggagcttaatgatccagaccttggaggccgtcaaaagaaaacagtttgaaaagtatcacgccgcaagtgccgaggaacaggctacaatcgagcggaacccctatacaatcttccaccaagccctgaagaattgcgagcccatgatcggcttggtgcctatccttaaggggggtagattctaccaggttccagttcccctacccgatcggaggcgccgtttcctggcaatgaagtggatgattaccgagtgccgcgacaagaaacaccagagaacactaatgcccgagaaattatcccacaagctgctcgaagcgttccacaatcagggcccagtcatcaagcgcaagcatgaccttcataagatggccgaggccaaccgcgcactggcccattatcggtggtggtag

SEQ ID NO: 230881 - DNA, 1191 bp, synthetic construct
  misc_feature 1..1191: note = Description of Artificial Sequence: Synthetic coding sequence
  source 1..1191: mol_type = other DNA
atggctgccccttgcgtgtcatacggcggagccgtgagctatcgtctgcttctctggggtcgcggaagcctcgcacggaagcaaggcctgtggaagacggcggctcctgaactgcagactaacgtgagatcgcaaatactgagactgaggcacactgcctttgttataccaaagaagaacgtgcccacctccaagcgggaaacctacacagaggattttatcaagaagcagattgaagaattcaatatcggaaaacggcacttagcaaacatgatgggagaagaccctgaaacattcacccaggaggacatagaccgcgcaatcgcctatttgtttcctagcggtctttttgaaaagcgcgctaggcctgtgatgaaacaccctgagcagatttttccccgacaacgcgcaatacagtggggcgaagatggtaggcccttccattatcttttttacacgggaaagcaaagctattacagccttatgcatgacgtatatgggatgctattaaacctcgaaaaacatcagtctcacctgcaggcaaaaagcctgctccctgagaagacggtgactagagacgttattggaagtagatggctgatcaaagaggagctggaggagatgcttgtggaaaaactgtccgacctggactacatgcaatttatacgcctcctcgaaaagcttctcacttctcagtgtggagctgctgaggaagagttcgtgcagaggttccggaggtcagttaccctggagtctaagaagcagctcattgagcccgtgcaatatgacgagcagggcatggcattcagcaaaagtgaagggaagcgtaaaaccgcaaaggcggaggcaatagtgtacaagcatggcagcgggaggattaaagtaaacggaatcgattatcagttgtactttccgataacacaggatcgagagcaactgatgtttcccttccacttcgtcgatcgcttaggaaagcacgacgtgacttgtacggtgtcagggggaggccgatccgcgcaggcaggcgctattcgactcgcaatggccaaggccctatgcagcttcgttactgaagacgaggtggaatggatgcgacaggcagggctccttacaacagaccctagggttagggagaggaagaaaccagggcaagagggcgctcgtcgcaagttcacatggaaaaaaaggtag

SEQ ID NO: 230882 - DNA, 1122 bp, synthetic construct
  misc_feature 1..1122: note = Description of Artificial Sequence: Synthetic coding sequence
  source 1..1122: mol_type = other DNA
atgtgggtctgctctaccctctggagggttaggaccccagctcggcagtggagaggcctgcttcctgcctccggatgccatgggcctgccgcttccagctacagcgcttcagcggaacccgctcgcgttagggctctggtatatggccaccacggcgacccagcgaaggtagtcgagctgaaaaacctggaacttgccgctgtccgcggttcagatgtgcgcgttaagatgctcgccgcacctatcaacccctcagacatcaacatgatacagggcaactatggcttccttcctgaactccccgcagttggagggaacgagggagtggcgcaggttgttgcagtaggctccaatgtgaccggcctgaaacctggcgactgggtgattccagctaacgctggattaggcacatggagaaccgaggccgtgttctccgaagaggccctcattcaggtcccttcggacatcccgctgcagagcgccgcaacactgggcgtgaacccctgtaccgcctataggatgttaatggatttcgaacagctgcagcccggtgatagcgtgattcagaacgcctccaactccggtgtcggtcaagcagttatccagattgccgctgccttggggctgcggacaatcaacgttgtgcgggataggccagacatccagaagctcagtgatcgcctgaagtccctgggcgcagagcacgtgatcactgaagaggagcttcgccgacctgagatgaagaacttctttaaagacatgccccagcctagattggcactcaattgtgtgggcggtaaaagcagtacagaacttctgcgacagctcgcgaggggcggaaccatggtgacttacggcggtatggcaaagcagcccgtggtggcttctgttagtctgctgatattcaaagatctcaaactgagaggcttctggctgagtcaatggaaaaaggaccatagccccgaccagtttaaggagctgatactcacgctgtgtgacctgatacgcagaggccaattaacagctccagcttgttctcaggttccactgcaggattatcagtcagctttggaggctagtatgaagcccttcattagcagcaagcagatccttactatgtag

SEQ ID NO: 230883 - DNA, 894 bp, synthetic construct
  misc_feature 1..894: note = Description of Artificial Sequence: Synthetic coding sequence
  source 1..894: mol_type = other DNA
atgctggctgcccctatcaatcctagtgacatcaatatgattcaaggcaactatggcttcttgcctgaacttcctgcggtgggaggcaatgaaggagtggcccaagtggttgcagtcggctctaacgttacaggattgaagcccggtgactgggtgatcccagctaatgccggtctggggacctggaggactgaggccgtcttctcagaggaagcattgatccaagtgccttccgacattcccctccaatctgcagcaacgctgggggtgaacccctgcaccgcttaccgcatgctgatggattttgaacagttgcagcccggtgacagcgtgattcagaatgcatctaattcaggcgtgggacaggctgtgattcagatcgctgctgcacttggcctgaggaccattaatgtcgttcgtgaccggccagatatccagaagttgagcgaccggttgaaatccctgggtgcggaacacgttatcacagaggaggaactgagaagacctgaaatgaaaaacttcttcaaggacatgcctcaacctaggctagccctcaactgtgttggcggaaagtcctctaccgagttactaaggcagctggcaagggggggaactatggtgacttacggaggcatggctaaacagcccgtagttgcctccgtctcgttacttatcttcaaggacctaaagctccgaggtttctggctaagccagtggaaaaaggaccacagcccggaccagttcaaggagctcatcctgacactgtgcgatttaataaggagggggcaactaactgcccctgcctgcagtcaggtgcctctccaggattatcagagcgcgcttgaagcttcgatgaaaccctttatttcttcaaagcaaatcctcacaatgtag

SEQ ID NO: 230884 - DNA, 789 bp, synthetic construct
  misc_feature 1..789: note = Description of Artificial Sequence: Synthetic coding sequence
  source 1..789: mol_type = other DNA
atgattcagggtaactatgggtttctacctgaactgcccgcagtgggcggtaacgagggcgtggcccaggtggttgcagtcggaagtaatgtgactggccttaaacctggcgactgggttattcccgctaacgctggactgggtacatggagaacagaagccgtgttcagtgaggaagcactgatccaggtcccaagcgacatccctctacaatccgccgctaccctcggggtgaatccatgtacagcctaccggatgttaatggactttgagcagctccagcctggagattctgtaatccaaaacgcttctaactccggcgtcggtcaggccgtgatacagatcgcagccgctctggggttgcgcaccatcaacgtcgtcagggatcgccctgatattcagaaactaagcgaccggctcaagtctttaggagccgagcatgtaattacggaggaggagctgagaaggccagagatgaaaaattttttcaaaatcaggaaactccgattaaggaaagaagagatgctaaatcagaatcacatcgtgtacaagggtagccgcgaatcagagctggcctccgtttccccgaactctaaacccttgaatttgccagaacctccgcctcacaacatgccacggcacgcccctgctaccgcctgtagccagctttgttggtgggaaaagctgcaccgggctgccgcagcagtgtccgcatggagaaaccatggcaatctgtggggagatggacaagccgcacgcagaagcctttgcgaacccgcacatttctag

SEQ ID NO: 230885 - DNA, 570 bp, synthetic construct
  misc_feature 1..570: note = Description of Artificial Sequence: Synthetic coding sequence
  source 1..570: mol_type = other DNA
gccactctgggcgtaaatccctgcacggcataccgaatgctgatggattttgaacagctgcagcccggtgattccgtgatccagaatgccagtaacagtggggtgggtcaagcagtaattcagatagccgctgctctcggccttcggaccatcaacgtcgtgagggacaggcctgacatccagaagctgtctgacaggctgaagtctctcggcgcagagcacgtgattacagaagaggagcttcgacggccagaaatgaagaactttttcaagattcggaaactgcgccttaggaaggaagagatgctgaatcaaaaccacattgtgtataaggggtctagagaatctgaacttgcgtcggtatcgccaaattcaaagccactcaacctgccagagccgcctccacacaacatgccaaggcacgcacctgcaaccgcctgctctcaactgtgctggtgggaaaaactccaccgagcagccgcagcagtgagtgcctggcggaaccatggtaacttgtggggggatgggcaagctgctaggcgcagcctgtgtgaacccgctcatttctag

SEQ ID NO: 230886 - DNA, 1200 bp, synthetic construct
  misc_feature 1..1200: note = Description of Artificial Sequence: Synthetic coding sequence
  source 1..1200: mol_type = other DNA
atgcagtctctttctctgggtcaaacatcaatttcaaagggattgaattaccttaccataatggctcccggaaatctctggcatatgaggaacaactttctttttgggagtagatgctggatgactagattttcagccgaaaacattttcaaatctgtgagcttccgtctatttggcgtgaagtgtcacaatactgactcggagcccctcaaaaatgaagatcttctgaagaacttgctcactatgggcgtcgatatcgatatggccagaaaacgacagcccggagtgtttcataggatgatcacaaatgaacaagatctaaaaatgttcctgctctctaagggggctagcaaagaagtgatcgcgtccatcatttcccgttatccacgggctatcaccaggactcctgagaatcttagtaaacggtgggatctgtggcgcaagatcgttacttcagatctcgaaattgttaacatcctagaacggagccccgaatccttcttcaggagtaacaataatctgaatctcgaaaacaatattaaatttctgtactccgttgggttgaccaggaaatgcctctgccgattattgacaaatgccccaaggactttttcaaactctttagatctgaacaaacagatggtagaattcctgcaggcagccggactttccctgggccataacgacccagctgatttcgtgaggaaaatcatctttaaaaacccttttattctgatccagtctacaaaacgcgtgaaggcgaatatagagtttttgcgatctaccttcaatttaaactctgaggaactcctagtcctgatatgcggcccaggcgctgagattctggacctatccaatgactatgccaggcgatcctatgcaaatattaaggagaagttattctcactagggtgcacagaagaggaggtccagaagtttgtgttgtcttacccagatgtcatttttctcgccgagaaaaaatttaacgacaagattgattgcctcatggaggagaatatttcaatcagtcaaattattgagaatccacgggttctggactcctcaatctctactctgaagagccgaatcaaggagctcgtgaacgctggatgcaacttgagtacgctgaacatcactctgctgtcgtggagcaaaaaacgctacgaagcaaagctgaaaaagctttctcgctttgcatag

SEQ ID NO: 230887 - DNA, 477 bp, synthetic construct
  misc_feature 1..477: note = Description of Artificial Sequence: Synthetic coding sequence
  source 1..477: mol_type = other DNA
atgcagtcactttcattgggccagacgtctatcagtaagggcctgaactaccttacaattatggctccaggcaacttatggcatatgagaaacaattttctcttcggaagcagatgctggatgacccggttttctgccgaaaacatcttcaaatctgtaagcttcaggctgtttggcgttaagtgtcacaacacagattctgagccactaaaaaacgaggatctgctcaagaatctgttgactatgggcgtggatattgatatggcccgtaagagacaaccgggtgtgttccataggatgatcacgaatgagcaagacttgaagatgtttctactatccaagggtgcatcaaaagaggttatagctagcattatctccaggtaccctagagcaattacgcgcacccctgagaacctatccaagagatgggatctctggcgcaagattgtcacatcagacctggagatcgtgaactag

SEQ ID NO: 230888 - DNA, 2184 bp, synthetic construct
  misc_feature 1..2184: note = Description of Artificial Sequence: Synthetic coding sequence
  source 1..2184: mol_type = other DNA
atgaaccaaaaactcctgaaactcgaaaacctgctgcgatttcataccatttacagacagttgcacagcctgtgtcaacggagggcacttagacagtggcgccacggattcagctcagcctaccctgtgtggaccgcccagctgtgcgcgtggccttggcctaccgacgtcctgacaggggcagccttgagccagtaccgcctgctggtcactaagaaagaagaaggcccatggaaatcccagttgtcaagtactaagtctaagaaggtggtggaagtgtggattggcatgaccatcgaggaattggcccgtgctatggagaagaatactgattatgtttatgaggctttgctgaacactgatattgacatcgattctttggaagcagactctcacctcgacgaggtgtggatcaaagaggtgattaccaaagctggaatgaagctgaagtggagtaagttgaagcaggacaaggtgcgtaaaaacaaggacgccgtcaggagaccccaggctgaccccgcacttcttacaccaagatccccagtggttaccattatgggccatgtcgatcacggcaagacaactctactcgataagtttcgcaaaactcaggtggctgcagtggagaccggcggaattacacagcacattggagcgtttctggttagcctgcctagcggggagaagattacttttctggatacccccggtcacgctgcatttagcgcaatgagagcacgcggagctcaagtcaccgacatagtggttttggtcgtcgctgccgacgatggggttatgaagcaaactgtggaatctatccaacatgccaaagacgctcaggttcccattattcttgccgtgaacaagtgcgacaaagctgaggccgaccctgagaaagttaaaaaggagttgctcgcttatgacgtggtgtgcgaagactacgggggtgatgtgcaggccgtgcctgtctctgccctcacgggagacaatttgatggccctggccgaagcaaccgttgccctcgccgaaatgctggaattgaaagccgatccaaatgggcctgtggaaggaacagtgatcgaatcctttaccgataaaggcaggggcctggtcacaaccgctattatccagcgaggtactctgagaaaaggaagtgtgctggtggccggaaagtgctgggccaaagtgagacttatgtttgacgaaaatggaaagactattgacgaggcgtatccatccatgccagtgggtatcactgggtggcgcgatcttccatccgcgggtgaagagatactggaagtcgagagtgaacccagagcaagagaggttgtcgattggcgaaagtacgagcaggagcaagagaagggtcaggaggacttaaaaattatcgaggagaagcgcaaggagcataaggaagcccatcagaaggccagggagaaatacggccacctgctctggaagaaacgaagcattcttcgttttctcgaaagaaaagaacagatccctctgaagcccaaagagaaaagggagcgcgacagtaacgtgttgagtgtaatcatcaaaggggacgtcgacgggagcgtagaagctatactgaacattatagacacatacgatgccagccacgagtgtgaactggagctggtgcactttggagttggcgacgtctcagccaacgacgtgaacttggccgagactttcgatggggtgatatacggcttcaacgtgaatgcgggtaatgttattcagcagagtgcggcaaagaaaggagtcaaaattaagttgcataagatcatctatcggctggtggaggacttacaggaggagttatcctcacggctcccttgtgctgtagaagaacatccagtgggtgaagcttctatcctggctacctttagtgtgaccgaaggaaaaaagaaggtcccggttgctggctgtagggtccagaaagggcaattggagaaacagaaaaagtttaagctgactcgcaatggccatgtgatttggaaaggatccctgacaagcctgaagcaccataaggatgatattagcattgtcaaaactgggatggattgcgggttatccttagacgaggacaatatggaattccaggttggggaccgcattgtgtgttatgaagaaaaacagattcaagcgaagacttcctgggacccaggtttttag

SEQ ID NO: 230889 - DNA, 219 bp, synthetic construct
  misc_feature 1..219: note = Description of Artificial Sequence: Synthetic coding sequence
  source 1..219: mol_type = other DNA
atgaatcaaaagttgctgaaattggagaatctgctccggtttcatacaatctaccgtcaattacactctctctgtcagcggcgtgctttaagacagtggcgacatgggttctcctcagcctaccccgtgtggaccgcgcagctgtgtgcttggccatggcccacggacgtcctgacaggagccgctctatcccagtatcggctattagtgacaaaatag

SEQ ID NO: 230890 - DNA, 2184 bp, synthetic construct
  misc_feature 1..2184: note = Description of Artificial Sequence: Synthetic coding sequence
  source 1..2184: mol_type = other DNA
atgaaccagaagctgctgaaattagagaacctcctgaggtttcacactatctatagacagctccacagcctgtgccagagacgggctttaagacagtggaggcacggattctcttcggcataccctgtctggacagctcagctgtgtgcctggccctggccaacggatgtcttaaccggggcagctctgtcccagtacaggctgctggtgacaaagaaggaggaggggccttggaaaagtcaactgtccagtaccaagagcaagaaggtggttgaggtatggataggtatgaccatcgaagaattagccagagccatggaaaaaaacaccgactatgtgtacgaagccttactgaatacggatattgacattgatagcctcgaggccgattctcacctggacgaagtttggatcaaggaagtaataacaaaagccggtatgaagctgaagtggtctaaactgaagcaggacaaggtaaggaagaacaaagatgccgtgaggcggcctcaggctgatccagccttacttactcccaggtcacccgtcgtgacaatcatgggccacgttgaccatgggaagacgactctcctcgacaagtttcggaagacccaggtggccgctgttgagaccggaggaattactcaacatatcggtgctttcctggtatcactcccgtccggcgagaaaataacattcctcgatacaccgggtcatgcagccttctccgctatgcgtgcccgaggggcacaggtgaccgatattgtcgtgctggttgtggctgctgacgacggtgtgatgaagcagactgtggagagtatccagcatgccaaagatgcccaggttccaattatcctggccgtcaacaagtgtgacaaggctgaggccgatcccgagaaagttaagaaagagctgctcgcctatgacgtggtttgtgaggattacggcggagatgtgcaggccgtgcctgttagtgcactgacaggggataatcttatggccctggccgaggcgaccgtcgctctggccgagatgctggaattgaaagctgaccctaatggcccagtcgaaggaacagtgattgagagttttactgacaagggacgtggattggtgacaactgcaatcatccagcgcggtaccttgagaaaaggtagcgtactggtcgctgggaagtgttgggcaaaggttagactgatgtttgacgagaacggaaagactatcgatgaagcctatccatccatgccagtcgggattacagggtggcgcgatctgcctagtgcaggcgaagaaattctggaagtcgagtctgaacctcgcgcacgcgaggtcgtggactggaggaaatacgagcaggaacaggaaaagggccaggaggatctgaaaattattgaagaaaagagaaaggagcataaagaagcacatcaaaaagcaagggagaaatacgggcacctactttggaagaaaaggtccatcctacgattcttagaacgcaaagaacagatccccctgaagccaaaggaaaaacgggagcgtgacagtaacgtgctctcggtaattattaaaggcgacgttgacgggtctgttgaagcaatcctcaatataatcgacacttacgacgcttctcacgaatgtgagcttgagttggtgcatttcggagtcggcgatgtgagcgcaaatgatgtgaatctggccgaaacatttgacggtgtgatctacggtttcaacgtgaacgccggaaatgttattcagcaatccgccgcaaaaaaaggtgttaagattaaactgcataagatcatttaccgtctggtggaagaccttcaggaggagttgagctcgagactcccttgtgcggtggaagaacaccccgtcggcgaggcgagcattctcgctactttttctgtgaccgaaggcaaaaagaaagtccccgttgccggatgcagagttcagaagggccagctggagaaacagaaaaaatttaaattaacccgcaacggccacgtgatctggaaaggcagtctcacctccttgaagcatcacaaagatgacatttcaatcgtgaagactggcatggactgcggactgtctctcgatgaggacaacatggagtttcaggtaggggacaggatcgtgtgctatgaagaaaagcagattcaggccaagacaagctgggacccaggcttctag

SEQ ID NO: 230891 - DNA, 2184 bp, synthetic construct
  misc_feature 1..2184: note = Description of Artificial Sequence: Synthetic coding sequence
  source 1..2184: mol_type = other DNA
atgaaccagaagctgcttaaactcgagaatctactacgctttcacaccatctatagacaattgcactccctctgtcagcggagggcgctgcgacagtggcggcacgggttcagctcagcatacccagtctggaccgctcagttgtgcgcttggccatggccaaccgacgtactaacgggagccgcactgagccagtacaggctgctcgtgactaaaaaagaagagggaccctggaagtcccagctgagcagcaccaagagtaaaaaggttgtcgaggtttggatcggcatgactattgaggagctcgctcgagctatggagaaaaatacagactatgtttacgaagcactcctcaatacagacatcgatatcgatagtttagaggcagactcacatctggacgaggtatggattaaggaggttataaccaaggcgggtatgaaattgaagtggtccaagttaaagcaagacaaagttagaaagaacaaggacgctgttcgaaggcctcaagcagatccagccctactgacccccaggagcccggtggtgaccattatgggacatgtggatcacggaaaaactacgttgctcgataaattccgaaagactcaagtcgctgcagtggagaccggcggaatcactcagcacatcggggcattcctggtgagtttgccttctggagaaaaaataacgttcctggatactccaggccacgccgctttttccgccatgcgcgcaagaggagcccaagtgaccgacatcgtggtcctcgtggtggccgcagatgacggtgtgatgaagcaaactgttgaatcaattcagcacgcaaaggacgcccaggtgcccattattctggcggttaataaatgcgacaaggcagaggccgatcccgaaaaagtaaagaaagagctcctggcctacgacgtggtatgcgaggattacggaggcgatgttcaggctgtccctgtaagcgccctcacgggggacaacctgatggccctggctgaggcgaccgtggctctggctgagatgctggaacttaaagccgatcctaacggccctgttgagggcactgtgatagagtcgtttacagacaagggcagaggcttggtcacaaccgccataattcaaaggggcactctgagaaaagggagcgtactggtggccggaaaatgttgggctaaagtgaggttgatgtttgatgaaaacggaaagacaatagatgaggcctacccaagcatgcctgtgggaatcaccggatggcgcgatctcccatccgccggagaagaaatcctcgaagtggagagtgagcccagagcaagggaggtcgtggattggcggaagtatgaacaggagcaggagaagggccaggaggaccttaaaatcattgaagaaaagcgaaaagaacacaaagaagctcatcagaaggctagagaaaagtatggccacctcctgtggaagaagcgaagtatcctcaggttcctggaaaggaaggagcagatccccctgaagccgaaagaaaagcgggagagagatagcaacgttctgtcagtcataataaaaggagacgttgacggcagcgtggaagcaatcctcaatattatcgacacctatgacgcctcccatgagtgcgaactggagcttgtgcacttcggcgttggcgacgtgtccgccaacgacgtgaaccttgccgaaactttcgatggcgtgatctatggattcaatgtgaatgcgggtaacgttattcaacagtcagccgcaaaaaaaggagtaaaaatcaagctccacaaaattatttatcgactggttgaggatctgcaggaggagctaagcagtcgtctgccttgtgctgtcgaggaacacccggtgggggaagcttctattctggcgaccttcagcgtaactgagggcaagaagaaggtccctgttgctggatgtcgcgtgcaaaaagggcagctggaaaaacagaaaaaattcaagttgacccgcaacgggcatgttatttggaaaggttccttgactagcctcaaacaccataaagatgatatcagtattgtaaaaacaggaatggactgcggactctctctggacgaagacaatatggagtttcaagtgggtgaccgaattgtgtgttatgaggaaaaacagatacaagctaaaacttcatgggatccagggttctag

SEQ ID NO: 230892 - DNA, 213 bp, synthetic construct
  misc_feature 1..213: note = Description of Artificial Sequence: Synthetic coding sequence
  source 1..213: mol_type = other DNA
atgaaccagaagttactgaaactagagaatttgcttcgcttccacacaatttacaggcagctacactctctgtgtcaacgcagagccttacgccagtggcgccatgggttctcgtcagcatatcctgtttggacagctcaattatgcgcttggccatggcccaccgacgtgttgaccggcgcagccttgtctcagtacaggctgctggtatag

SEQ ID NO: 230893 - DNA, 24 bp, synthetic construct
  misc_feature 1..24: note = Description of Artificial Sequence: Synthetic coding sequence
  source 1..24: mol_type = other DNA
atgaatcaaaaactcctcaagtag

SEQ ID NO: 230894 - DNA, 33 bp, synthetic construct
  misc_feature 1..33: note = Description of Artificial Sequence: Synthetic coding sequence
  source 1..33: mol_type = other DNA
atgaaccagaaattactgaagttagaaaattag

SEQ ID NO: 230895 - DNA, 81 bp, synthetic construct
  misc_feature 1..81: note = Description of Artificial Sequence: Synthetic coding sequence
  source 1..81: mol_type = other DNA
atgaaccaaaagctgcttaagttggagaaccttctgagattccacacaatttatcgtcagctgcattcactctgccaatag

SEQ ID NO: 230896 - DNA, 216 bp, synthetic construct
  misc_feature 1..216: note = Description of Artificial Sequence: Synthetic coding sequence
  source 1..216: mol_type = other DNA
atgaaccagaagttgctgaaattggagaacctgttgagatttcacacgatttatagacagctgcactccctgtgccagaggcgagcactgcggcagtggcgacacggcttttcaagtgcttaccctgtgtggactgcacagctatgtgcgtggccttggcccacggacgtgcttacgggcgcagctctgagtcagtacaggcttttagtcacgtag

SEQ ID NO: 230897 - DNA, 1398 bp, synthetic construct
  misc_feature 1..1398: note = Description of Artificial Sequence: Synthetic coding sequence
  source 1..1398: mol_type = other DNA
atgaaccagaagctcctcaagttggagaacctcctacgctttcacacgatctaccgtcaactccactccctgtgtcagagaagggctcttagacagtggcgccatggcttctctagcgcgtatcccgtgtggacagcacaactgtgcgcctggccctggcccaccgatgtgttgacgggcgctgctctgtcacaatatagattactcgtaaccaagaaggaggagggaccttggaaaagccagttatcttctacgaagtctaagaaggtagtggaggtctggataggtatgactatcgaggagttggcccgagccatggaaaaaaacactgactatgtctacgaagctttgctgaatactgacatagacatcgacagtttggaagctgattcccacttagacgaagtgtggattaaagaggttattacaaaggctggaatgaaactgaaatggtccaaactgaagcaagacaaagtccgaaagaacaaagacgctgtgaggcgccctcaggcggatcccgctctgcttacacccaggtcacccgtggtaactattatgggccacgtcgaccacggcaagaccacattgttagacaagtttcgcaagacacaggtggccgctgtcgagaccggcggtattacacagcacattggtgcatttttggtgtctctccccagtggcgaaaagattaccttcctggacactccagggcatgcagcgttctcagcgatgagggcgcgtggcgctcaagtgacagatatagtcgtgcttgtcgttgccgctgatgatggagttatgaaacagactgtcgaaagtatacagcacgctaaagacgcacaggtgccaattattctggccgtcaacaagtgcgacaaggccgaagccgatccagaaaaggtaaagaaggagcttctggcttacgatgtggtgtgcgaggattacgggggtgatgtgcaagccgttcctgtttctgcgctcacaggggataacctcatggccctggcggaggccactgtggccttagccgagatgctggagctaaaggcagatcctaatggtcctgtagaaggaacagtgatcgagtctttcactgacaagggcagaggcttggtcaccactgcgataatacaacgaggaacactccgtaaaggatctgtacttgtcgccggaaaatgttgggccaaagtgagactgatgtttgacgagaatggaaaaacaatcgatgaggcataccccagcatgcctgttggaatcaccgggtggagagatttaccttcggccggtgaggagattctggaagtggaaagtgaaccgcgagcgcgagaggtcgtcgactggcggaaatatgagcaagagcaagagaagggtcaggaagacctcaagaaggaaaaaaactag

SEQ ID NO: 230898 - DNA, 456 bp, synthetic construct
  misc_feature 1..456: note = Description of Artificial Sequence: Synthetic coding sequence
  source 1..456: mol_type = other DNA
atgaaccgtcatctctgcgtatggttatttcgccatccatcgttaaacggttatctgcagtgtcatatacagctgcacagtcaccagtttcgacagattcacctggatactagacttcaagtgtttcgccagaatcggaattgcatactgcacctcctgagcaagaactggtcgcggaggtattgccatcaggacaccaaaatgttgtggaagcataaggctctgcagaagtacatggagaacctatccaaggaataccagacgctcgagcagtgtctccagcacatcccagtgaatgaggaaaacagacgctctctgaatagaaggcatgctgaactggcccctctcgctgcaatctaccaggagatccaggaaacagaacaagccatcgaggagcttgaatcgatgtgcaagaaaactgagagctgcagtgttgctcaggccggtatgcagtag

SEQ ID NO: 230899 - DNA, 1338 bp, synthetic construct
  misc_feature 1..1338: note = Description of Artificial Sequence: Synthetic coding sequence
  source 1..1338: mol_type = other DNA
atgaaccgtcatctatgcgtctggctgttccgccatccaagcttaaacggatacctccagtgtcatatccagttgcacagtcaccagtttcgccagatacatttagataccaggctgcaggtctttaggcagaaccggaactgtattttacatctgctgtcgaaaaattggtcacggagatattgccaccaggataccaagatgctctggaagcacaaggctctacagaaatacatggagaacctgtccaaggagtatcagacactagagcaatgtctccagcatattccagtgaacgaagaaaaccgaagatccctcaaccgtcgccatgcagagttagcacccttagcagccatctatcaagagatacaggagactgagcaggccatcgaagagttagaatccatgtgcaaatccctcaataagcaggacgagaaacaactgcaggagctcgctcttgaggaaagacaaacaatcgaccagaagataaacatgctgtacaacgaactcttccaatcgcttgtacctaaggagaagtacgacaagaacgacgtgatcttagaggttaccgccggaagaacgacggggggagatatttgccaacagtttacacgcgagatattcgacatgtaccagaactattcgtgttataaacactggcagtttgaacttctaaattacacacctgctgactacggtggactacaccacgcagcagcacgcatcagcggcgacggggtttacaaacatctgaaatacgaggggggtattcacagagtccagagaatcccggaagtgggcctgtcttcacggatgcaaagaattcacaccggaacaatgagtgtaatagtcttgccccagcctgacgaggtcgacgtaaagctcgaccctaaggacctgagaatcgacacattcagagcaaaaggcgctggtggtcagcatgtaaacaagaccgactctgccgtccgattggtgcacatccccacaggcttggtggtggagtgtcagcaggagcggtcgcaaattaagaataaggagatagctttccgagtgctgcgggcacgtctctaccaacaaatcatagagaaggataaacgtcagcaacaatctgcacggaaactgcaggttgggacccgcgctcagtccgagcgcatcaggacctacaattttactcaggaccgagtttcagatcatcgaatcgcgtacgaggtaagggacataaaggagttcctctgcggaggcaagggcctcgatcagctcattcagaggttactgcagagcgctgatgaggaggccatcgctgagcttctggacgaacacttgaaatccgctaagtag

SEQ ID NO: 230900 - DNA, 1338 bp, synthetic construct
  misc_feature 1..1338: note = Description of Artificial Sequence: Synthetic coding sequence
  source 1..1338: mol_type = other DNA
atgaatagacacctgtgtgtatggctatttcgacacccttcactcaatggatatttgcagtgccatattcaactacattcccatcaattccgccaaatccacctcgataccagactgcaggtgttccggcagaacagaaactgcattctgcacctgctgagtaagaattggagccgaaggtattgtcatcaggacacgaaaatgctgtggaaacataaggctttgcagaagtacatggagaacctgtccaaggagtaccagaccctggaacagtgcctgcagcatattcctgtgaacgaagaaaacagacgttccctcaatcgccgacatgcggaactcgcgccactggctgctatatatcaagaaatccaagaaacagagcaagccattgaagaactcgagtcaatgtgtaagtcactgaataagcaggacgagaaacagctgcaggagctggcactcgaggaacgccagactatcgaccagaaaatcaacatgctctacaacgagctgttccagtcgctagtccctaaagagaagtatgataagaacgatgtgatcctggaggtgaccgccggtcgaactacggggggagatatatgccaacagttcacacgtgagatcttcgatatgtatcagaactactcctgttacaagcattggcaattcgagttgttgaattatacccccgcagactatggaggcttgcaccacgctgcagcaaggattagcggcgacggagtctataagcacctcaagtacgaagggggaatccatcgggttcagcgtattccagaggttggcctttctagccgcatgcaacgcattcataccggtaccatgtcggtgattgtgctgccccagcctgatgaggtggacgtgaagctggaccctaaggacctgcggatcgatacctttagagccaaaggcgcaggagggcagcacgtgaacaagactgattcagctgtgcgtctagtccatatacccacagggttagttgtggaatgccagcaggaacggagccagataaaaaacaaagagattgcattccgagtcttacgggcacgactttaccagcaaatcattgagaaagacaagcgccaacagcagtccgcaaggaagctgcaagttggtacccgcgcacaatcggagcgcatcaggacatacaatttcacacaagacagggtgtccgaccaccggatcgcctatgaggtccgcgacattaaggaatttctgtgcgggggaaaagggctagatcaactcatccaaagactgttgcagagcgctgacgaagaggccattgcagagctccttgacgaacaccttaagtcggccaagtag

SEQ ID NO: 230901 - DNA, 1407 bp, synthetic construct
  misc_feature 1..1407: note = Description of Artificial Sequence: Synthetic coding sequence
  source 1..1407: mol_type = other DNA
atgggcaacggagaggtggtccttttttcagacgccgagatgaaccgacacctgtgcgtgtggctctttaggcacccgagcctaaacggatacctgcagtgccatatccagctgcattcccatcagttccgccagatccacctggatactcggctgcaggttttcaggcagaaccgaaattgtatcttgcacttgctgagtaagaactggagcagacgctactgtcatcaggatactaaaatgctatggaaacataaggccctgcagaaatacatggaaaacctgtcgaaggaataccagacactcgaacagtgccttcaacacatcccagtcaacgaagaaaaccgcaggagcctcaaccggaggcacgccgagctggccccactggcagctatctatcaggagatccaggagaccgagcaggctatagaggagctggagagcatgtgtaagtctctaaacaagcaggacgagaagcaacttcaagagctggccctcgaggagcggcaaaccattgaccagaagattaatatgctgtacaacgagctatttcagtccttagtgcctaaggagaagtacgacaaaaacgatgttatcctcgaagtaaccgctggcagaaccaccggcggtgacatatgccagcagttcacgagggagatcttcgacatgtaccagaactactcttgttacaagcattggcagtttgaactactgaactacacgccggcagattacgggggactgcaccacgccgcagctcgaatctcaggagacggcgtgtacaagcatctgaagtacgagggaggcatccacagagtacagcgaattcccgaagtaggactgagttctcggatgcaaaggattcacacaggcaccatgtctgtgattgtattgccccagccggacgaagtggatgttaagctggaccctaaagacctgcggattgacacctttcgcgcaaaaggcgcaggagggcagcacgttaataaaacggacagcgcagttagactggtccacataccgaccgggttggtggtggaatgtcaacaggaacggtctcagattaaaaacaaggagatagccttccgggtcctgagggccagattgtaccaacagatcatcgaaaaagacaagagacaacagcagtccgccaggaaactgcaggtgggcactagagcacaatccgaaaggatccgcacctataactttacccaagatcgcgtctctgatcaccgaatagcttacgaggttcgcgatatcaaggctcagagccatagtaccggcggtagcagggatccagcccattctacgttcctctctctagatagcgtgcggtcccccggaattctgatcatgacctcttcggtgcggaatttttatgtggtcggcagagcgtggatatcctag

SEQ ID NO: 230902 - DNA, 2274 bp, synthetic construct
  misc_feature 1..2274: note = Description of Artificial Sequence: Synthetic coding sequence
  source 1..2274: mol_type = other DNA
atgtcgctgctgttttccaggtgcaactctatcgtgacagttaaaaaaaataagcgccacatggcggaggttaatgcctcccccctgaagcactttgtcaccgccaaaaaaaaaataaatggcatctttgaacagttaggcgcttatatccaggagagcgccacctttctggaagatacctaccgaaacgccgagttggatcccgtcacaacggaggaacaggtgctggacgtgaaaggctatctctcaaaagtccgtggcataagcgaggtcttagcacggaggcacatgaaagtggcgttctttgggcgaacctctaacggcaaatcaactgtcattaatgctatgctttgggacaaggtactccctagcggaataggacacaccaccaattgcttcctgcgggtagaagggactgacggccacgaagcgttcctgctcactgaaggctcggaggaaaaacggagcgccaagacagttaatcaacttgctcacgccctacaccaggacaagcagctccatgcaggatcccttgtctctgtcatgtggcccaatagtaaatgtcctttactcaaagatgatttagtgctcatggattctcctgggatcgatgtgacaacagaactggatagctggatcgataagttttgtctggacgccgacgttttcgtgctcgtcgccaactccgaatcaaccttaatgcaaacagaaaagcattttttccacaaagtgagtgagaggttatcgagacccaacatcttcatcctgaataatcgttgggacgccagtgcaagtgaaccggagtacatggaagaagttcgtcgtcagcatatggagaggtgtacatcatttctagtcgatgagttgggagtggtggacaggagtcaggctggggataggatttttttcgtgagtgctaaggaggtgctcaacgctcgtatccagaaagcccagggcatgcctgaaggcggaggagcactcgctgagggattccaagttcggatgtttgagttccagaacttcgagaggcggttcgaggagtgcataagtcagagcgctgtgaaaaccaaattcgaacaacataccgtccgtgcaaaacagatcgctgaggctgtgcggcttattatggactccctgcacatggccgctcgggagcagcaggtgtattgtgaggaaatgagagaggagaggcaggatagactgaagtttatcgacaaacagctggagctgcttgcacaggactataaactaaggatcaagcaaataaccgaggaagtcgaacggcaagtttcaacggctatggccgaggagattcggcgtctgtctgtgctggttgatgactatcagatggacttccatccatcccccgttgtgctcaaggtttataagaatgagttacaccgccacatagaagaaggtctgggacgcaacatgagcgaccgatgctcaacagccatcacaaacagcctccagactatgcagcaagatatgatcgatggcctgaaaccactactccctgtgagcgttcgaagccaaattgacatgctagtgccgcgacaatgcttctccttaaattatgatcttaattgcgacaagctgtgtgccgacttccaggaagacatcgagttccacttctctctgggatggacaatgcttgtgaatcggtttctgggccctaagaacagccgacgggctctgatgggatacaatgatcaggtgcagagaccgatccctttgactcctgctaatccttccatgccacccctgccacagggcagccttacacaggaggaatttatggtgagcatggtaactgggctggcctccttgaccagccggacaagcatgggaatacttgtggtgggaggggtggtgtggaaagctgttgggtggcgacttatcgcgctttcattcgggctctatggccttctgtatgtatatgaacggttaacctggactacaaaggctaaggagcgtgcctttaaaagacaattcgtagagcatgcttccgaaaagcttcagttggttattagctacaccggatcaaactgctcacaccaagtacagcaagagctctcaggcacgttcgcccacctgtgccagcaggtggacgtcactcgcgagaacctggagcaggaaatagcagccatgaataaaaagattgaagttttggacagcctgcagtccaaggctaaactgttgaggaacaaggcgggttggctggactccgagttaaacatgtttacacaccagtatctgcagccgtcaaggtag

SEQ ID NO: 230903 - DNA, 1311 bp, synthetic construct
  misc_feature 1..1311: note = Description of Artificial Sequence: Synthetic coding sequence
  source 1..1311: mol_type = other DNA
atgcacccgcatcttagcactttatctctccctcgccgtagatccatggctttcctatcttcgtggggggctctggccgaggggttccaggttcgaatgttcgagtttcagaactttgagcggcgattcgaggagtgtatctcccagtcagctgtgaaaacaaaattcgagcagcacaccgttagggcaaaacaaattgcggaggccgtcaggctgatcatggactctctccacatggccgctcgcgagcagcaagtctactgcgaagaaatgagggaggagcggcaggacagactgaagttcatcgacaaacaacttgagcttctggcccaggactacaaactccgaatcaaacagattaccgaagaagtggaacgccaggtgagcactgccatggccgaggagattcgacggctgagcgtcctggtcgacgattatcaaatggatttccaccctagtcccgtagtactcaaggtgtacaagaatgagttgcacagacacatagaagaaggtctgggtcggaatatgtccgatcggtgtagcacagccatcacaaactcactgcagacaatgcagcaggatatgattgatggactcaagccgttgttgccagtgtccgtgcgttcccagatcgacatgctcgtccctagacagtgtttctccctgaattatgatctcaattgcgacaagctctgtgccgattttcaagaagacattgaatttcacttctcgctggggtggaccatgctagtaaacaggtttcttggaccaaagaactcacgaagagctctgatgggttataacgaccaggtccaaaggcccatcccattaacgcccgcaaacccctctatgccacctctgcctcaaggaagcctcacccaggaagagtttatggtatccatggtgactgggttggccagcctgacaagccgcacgagtatggggattcttgtggtcgggggagtcgtttggaaggctgtaggctggaggttgatcgctcttagctttggtctgtatggactgctctacgtatacgagaggctcacgtggaccacaaaagcaaaagagagagcctttaaaaggcagttcgttgagcacgcctccgaaaaattacagctggtgatcagctacacaggcagcaactgcagccaccaggtgcagcaagagctgagtgggacctttgctcatctttgtcagcaggtggatggcgaaaccttaagcgagcggagtatggctaaatccaccctcatgttgcttaccttactcttcttatgctcgttcgctggagcccaggacgttctaacccaatag

SEQ ID NO: 230904 - DNA, 297 bp, synthetic construct
  misc_feature 1..297: note = Description of Artificial Sequence: Synthetic coding sequence
  source 1..297: mol_type = other DNA
atgtccttattgttcagccgctgcaacagtattgtgactgtgaaaaagaataaacgccacatggcggaagtcaacgcctcccccctgaagcatttcgtcaccgccaagaagaaaatcaatggaatcttcgaacagctgggggcttacatccaggaatcagctactttcctggaggacacctaccggaatgcagagttggaccctgtgacaacggaggagcaagtgctggacgtaaagggatacctctccaaggtacggggaatatccgaggttctggccagaaggcatatgaagtag

SEQ ID NO: 230905 - DNA, 2274 bp, synthetic construct
  misc_feature 1..2274: note = Description of Artificial Sequence: Synthetic coding sequence
  source 1..2274: mol_type = other DNA
atgtcattgctgttcagtcggtgcaatagtatcgtcaccgtgaaaaagaataagcgccacatggcagaagtaaatgctagtccactcaagcattttgttacagccaaaaaaaaaatcaatggtatctttgaacagctgggcgcttacatacaggagtccgccacatttctggaagatacctatagaaatgcagaactggacccggtcaccaccgaggagcaagttctagatgtcaagggctatttgtcaaaagttaggggcatttccgaggtcctcgctcgccgacatatgaaagtagccttctttggtaggacaagtaatggaaaatctacagtgataaatgcaatgttgtgggataaggtgctgccttccgggatcgggcacaccaccaactgtttcttacgagttgaagggacggacggacatgaggcctttcttttaactgaaggatccgaggagaagaggtctgctaagaccgtgaaccaactggctcacgcgttgcatcaggataagcaattgcacgccggtagtctggtctctgtgatgtggccaaattccaagtgccccctcctcaaggatgaccttgtcttaatggactcgcccggtatcgacgtgaccaccgagctcgattcgtggatcgataagttctgtttggatgctgacgtgtttgtcctcgtcgcaaactcagagagtacccttatgcaaaccgagaagcatttttttcataaagtcagtgagaggctctcacgcccaaacatattcatcttgaacaatagatgggacgccagtgcaagtgaacccgaatatatggaggaggtcaggagacagcacatggaacggtgcacctcattcttagttgacgagctgggcgtggttgatcgctcccaggcgggtgaccggatcttttttgtatcagcgaaagaagtcttaaacgccaggattcaaaaagcacagggcatgcccgagggaggcggagctctagctgagggcttccaggtacggatgtttgaatttcagaacttcgaacgaagatttgaggaatgcatctcacaaagtgccgtaaaaactaagtttgagcagcataccgtgagggccaaacagatcgcagaggctgtgaggctgataatggattccctccacatggccgctcgcgaacagcaagtgtactgcgaggaaatgcgcgaagagaggcaggaccgcctgaagtttatcgacaaacagctggaactgctcgcacaggactataagctgaggattaagcaaatcaccgaggaggttgaacggcaggtgtctactgccatggctgaggagattaggcgactgagtgtccttgtggacgactaccaaatggacttccatccaagccctgtggtcttaaaggtctataagaatgagttgcaccgacacatcgaagaggggctgggccgtaatatgtccgacaggtgttcaactgccatcacaaacagccttcagaccatgcagcaagatatgattgatgggctgaaaccacttctccctgtctcagtgcgttcccagatagatatgctggtgcccagacagtgcttttccctcaactacgacctgaactgcgataaactgtgtgctgatttccaggaagacatcgagttccacttctccctcggttggacgatgcttgtgaacaggtttctcgggccaaaaaattctcggagagcgttaatgggctataacgaccaagtccaacgacccattcccttaactccagctaacccctccatgcctccactccctcagggctcccttactcaggaggaattcatggtctctatggtgaccgggctggcaagcttgacaagccgaacatcaatgggcatcctggtggtgggcggtgttgtctggaaggccgtcggctggcggctcattgccctcagcttcggtctgtatggactgctgtacgtgtacgagcgtctgacctggactacgaaagcaaaggaaagagctttcaagagacagtttgtggaacatgcatctgagaagctgcagctggtgattagctatacaggcagcaactgcagccatcaggtccagcaagagctgagcgggaccttcgcacacctgtgtcaacaagttgatgtgacacgggagaacttggaacaagaaatcgcagcaatgaataaaaaaatcgaagtgctggactcgcttcaatcaaaggcaaagctcttgaggaacaaggcagggtggctagactctgagctgaatatgttcacccaccagtatctgcaaccaagtcggtag

SEQ ID NO: 230906 - DNA, 1395 bp, synthetic construct
  misc_feature 1..1395: note = Description of Artificial Sequence: Synthetic coding sequence
  source 1..1395: mol_type = other DNA
atgtctctgcacttcctgtattattgctcagagcctaccctagatgtcaaaatcgccttctgtcaggggtttgataagcaggtcgacgtgagttacattgctaaacactataatatgtccaagtctaaggtagataatcagttctattcagttgaagttggggactctacctttactgtattgaaaagataccagaatctcaagcccattggcagcggggctcaggggatcgtgtgcgcagcttatgatgctgtgcttgataggaacgtcgcgattaagaaactttctagaccgtttcagaatcagacacacgccaaaagagcatacagagagcttgtgttgatgaagtgtgtcaaccacaaaaacattatcagcctgcttaacgtcttcacgccccaaaaaacactcgaagagttccaggatgtgtacttagtgatggagctgatggatgcgaacctgtgtcaagtaatccagatggaactggatcacgagcgcatgtcttacctcctgtaccagatgctgtgcggcatcaaacatttgcacagcgccggaattatccaccgggacctcaagcctagcaacatcgtggtgaagagcgattgtacacttaagattctggactttggactggcacgcactgccggtacatcttttatgatgacaccgtacgtggttaccagatactaccgggctcccgaggtgatactgggcatgggatacaaggagaacgtggatatctggtcggtaggctgtatcatgggggagatggtgaggcataagatattgttccccggaagggactacatcgaccagtggaacaaagtaatcgaacagttaggaactccgtgcccggaatttatgaaaaagctccagccgaccgtgcgtaattacgtggagaacagaccaaagtacgctggcctcacgtttccaaaactgtttcctgacagcctctttccagccgatagcgagcataacaagctaaaggcgtcccaggcaagagatctgttgtccaaaatgctagtcattgatcccgctaagcggatttcagttgacgacgcgctgcagcatccctacatcaacgtgtggtacgacccagccgaggtggaggcacctccgcctcagatttacgataagcagctggacgaacgggagcataccatcgaagagtggaaggagctgatatataaagaggttatgaactctgaagagaaaaccaaaaacggggtcgttaagggccaaccctctcccagcggcgctgccgtcaattcctcagaaagcctgccgcctagctccagcgtgaatgatatctcttccatgtccacagaccagacactcgccagtgatacggactctagtctagaagcctctgctggaccactcggatgttgccggtag

SEQ ID NO: 230907 - DNA, 1269 bp, synthetic construct
  misc_feature 1..1269: note = Description of Artificial Sequence: Synthetic coding sequence
  source 1..1269: mol_type = other DNA
atgtctctccactttctctattattgctccgagcccaccctcgacgtcaaaattgcattttgtcagggtttcgataaacaggtggacgttagttatatcgccaaacattacaatatgtcgaagtcaaaggttgataaccagttctactccgtggaggtgggagatagcacctttaccgtgctgaaacgataccagaatctgaaaccaattggctccggcgctcagggaatcgtgtgtgcagcctatgacgcagtgttagataggaacgttgctatcaagaagttgtcccggcctttccagaaccagactcacgcaaaacgggcatatcgcgaactggtgctgatgaaatgtgtgaaccacaaaaatatcatctccctgctgaatgtgtttactccacagaagactctagaggaattccaggacgtgtatttggtgatggagttaatggacgctaacctctgccaggtgatccagatggagctggaccatgaacggatgtcctatctgctgtaccagatgctgtgcgggataaagcatctgcacagcgctggcatcattcatcgggacctcaagccttccaatatagtcgtgaaaagtgattgtactctaaaaatccttgattttggcctcgctagaactgcagggacctcctttatgatgacaccctacgttgtaacacgctattatagagcccctgaagtaattctcggaatgggatataaggaaaacgtggacatttggtccgtcggatgcattatgggggaaatggtccgccacaaaattcttttccccggacgggactatatagatcaatggaacaaggtgattgagcaactgggcactccatgtcctgaattcatgaagaagttacagccaacggtgagaaactacgtggagaaccggcctaagtacgcgggattaacattccccaaactattccccgattcattattccctgctgactctgagcacaataaactgaaagcctctcaggctagggatctgttgagtaaaatgctggtgatcgaccctgccaagagaatttctgtcgacgatgccctgcaacacccatacatcaatgtgtggtatgatccagccgaggtggaggctcctccacctcagatatacgacaaacagctggatgagagagaacatacaatcgaagaatggaaggagcttatttacaaagaggtgatgaactctgaagagaagaccaagaacggggtcgtcaagggacagccttccccgtctgcccaggtccagcagtag

SEQ ID NO: 230908 - DNA, 960 bp, synthetic construct
  misc_feature 1..960: note = Description of Artificial Sequence: Synthetic coding sequence
  source 1..960: mol_type = other DNA
atggaactgatggacgcaaacctctgtcaggtcatccagatggagctagaccacgaaagaatgtcctacctactgtaccagatgctgtgcggaatcaagcacctgcactcggcaggtattatccatcgggacctgaagccctctaacatagtggtgaagtctgattgtaccctcaagatcttagattttggccttgccagaacagccggaacttccttcatgatgacgccctacgttgttaccagatactaccgggcacccgaagtcatcctggggatgggatataaagagaatgtggatatctggtccgtgggatgtattatgggcgagatggtgcgccacaaaatcctgtttccagggagggattacatcgaccagtggaataaggttatcgaacagctgggaacgccttgccccgagttcatgaagaaactgcagcccaccgtgcgtaattatgtggagaatagaccaaagtacgcgggtttaacattccctaaattattccccgactcacttttccctgcagattctgagcacaacaaattaaaagccagtcaggctcgagacttattgagcaagatgcttgtcatcgaccccgctaagcgtatttcagtggacgacgccctccagcacccatatataaatgtctggtatgatcccgctgaggtggaggctcctccaccccagatctatgacaagcagttggacgagcgcgaacacacaattgaagagtggaaggagctgatatacaaagaggtgatgaacagtgaggaaaaaactaagaacggtgtggtgaagggacaaccgtccccctccggagcagctgtgaattctagtgaaagcctacccccaagttcctcagtcaatgacatctcttccatgagcacagaccagactttagcaagcgataccgatagctcgttggaggccagtgccggaccgctgggatgctgcagatag

SEQ ID NO: 230909 - DNA, 834 bp, synthetic construct
  misc_feature 1..834: note = Description of Artificial Sequence: Synthetic coding sequence
  source 1..834: mol_type = other DNA
atggaattgatggacgcaaacctctgtcaagtgatccagatggagctggatcacgaaaggatgtcttacttgttgtatcagatgttgtgcggtatcaaacacctgcactcagctggcattatccaccgcgatcttaaacccagcaacattgtcgtcaagtccgactgcaccctgaagatcctggatttcggattggctcgaactgctggaacctcctttatgatgaccccttatgtggtgaccaggtattatcgagctcccgaagtaatcctcggaatgggctacaaagaaaatgttgatatctggagcgtgggctgcattatgggggagatggttcgccacaagattcttttccccggaagagattacatagaccaatggaacaaagtcatcgaacagttagggactccctgcccggagtttatgaaaaaattgcagccaacagtgcggaattacgtggaaaatcggccaaaatatgccggattaacatttccaaaactctttcctgacagcctgttccccgctgactctgagcataataagctcaaggcctcccaggctcgagatctcttatctaagatgctggtgattgacccggctaagagaatctccgtagacgacgccctacagcacccttatataaatgtatggtacgatccggctgaagtggaagctccaccaccacagatctacgacaagcagctggatgaacgagagcatactatcgaggagtggaaagagctcatttacaaggaggtcatgaactctgaggagaagaccaagaacggagtcgtgaagggacaacctagcccttccgcgcaagtgcagcaatag

SEQ ID NO: 230910 - DNA, 1269 bp, synthetic construct
  misc_feature 1..1269: note = Description of Artificial Sequence: Synthetic coding sequence
  source 1..1269: mol_type = other DNA
atgagcctgcatttcctgtattactgcagcgaaccaacactggatgtgaagatagcattctgtcaggggttcgataagcaggttgatgtaagttacattgccaaacattataacatgtcaaaatctaaagtggacaatcagttctactctgtggaggtgggtgacagtacattcaccgtgcttaaaaggtaccagaacctgaagcccatcggtagcggagcacaaggcatcgtgtgcgctgcctatgatgcagttctcgatagaaacgtggcaatcaagaagctgtccagaccctttcagaaccaaacacatgccaagcgggcttacagggaactggtcctgatgaaatgcgtcaaccataagaatattataagccttctgaatgtgtttactcctcagaaaacacttgaggaattccaggacgtatacctggtgatggagctgatggacgcgaatttgtgtcaggtaatccagatggagctggaccatgagcgcatgagctacctgctttaccaaatgctctgcggcatcaagcatctgcatagcgctgggataatccaccgtgatttaaagccgagcaacatagtcgtgaaatccgattgtaccctcaagattttggactttgggctcgctcggacggcgggtaccagcttcatgatgaccccatatgtcgtgactaggtattacagagcccctgaggtaatccttggcatgggatacaaggaaaatgtggacatatggtcggtaggctgtatcatgggagagatggtgcggcataaaattctgttccctggcagagattatattgaccagtggaataaggtgatcgagcagcttggaacaccatgtccggaattcatgaaaaaactccagcctaccgttcggaactacgtagagaaccggccaaagtatgccggactgacattccctaagctgtttcctgacagcctcttcccagcagattcggagcacaataagctgaaggcgtcacaagctcgggatttgctctccaaaatgctggtcattgaccctgcgaaacgaatctctgtcgacgacgctctgcagcacccgtatatcaacgtatggtacgatccagccgaagtcgaagcccctcccccacagatttatgacaaacaactggacgaaagggagcataccatcgaagagtggaaagaactgatctacaaggaggtgatgaattccgaggagaagacaaagaacggggttgttaaaggacagccttcccctagtgcccaggtccaacagtag

SEQ ID NO: 230911 - DNA, 1281 bp, synthetic construct
  misc_feature 1..1281: note = Description of Artificial Sequence: Synthetic coding sequence
  source 1..1281: mol_type = other DNA
atgagcaaatcaaaagtcgataatcagttttacagtgttgaagtgggagactccacgtttactgtactcaagagataccagaaccttaaacctattggaagtggggctcagggtatcgtgtgcgctgcctatgacgccgttctcgataggaatgtggctatcaaaaagctctccaggccctttcagaatcagactcatgctaagagagcctacagagaactggtcctgatgaagtgcgttaaccataagaacattatctccctacttaatgtctttacgccccagaagaccttagaagaattccaagacgtgtatctggttatggagctgatggacgccaatctatgccaagtgattcagatggagctggatcatgagcgtatgtcgtatctgctgtaccagatgctttgcggcattaagcacctgcatagtgccggaatcattcatagagacctaaaacccagtaatattgttgtaaagagcgattgtacactgaaaatccttgactttggcctggccagaacagccggaaccagcttcatgatgaccccctacgtggtgactaggtactaccgggcacctgaagtcattctgggcatgggatacaaggagaacgttgatatctggagcgttgggtgtataatgggcgaaatggtcaggcacaagattctgtttcccggacgtgactatatcgaccagtggaacaaagtcattgagcaactgggtaccccatgcccagagttcatgaagaagctccagcccactgtgcgaaactacgtggaaaatcgcccaaagtacgcgggtctgacttttccaaagctgtttccagactccttgttcccggctgactctgagcataataaactgaaagctagtcaagcgagggatctgttgagcaagatgctggtgatcgatccggctaagcgaatctcagtagatgacgccctccaacacccctatatcaatgtgtggtacgatcccgcagaggttgaggctcctcctccccaaatttatgacaagcaactggatgagcgtgaacacacgattgaagagtggaaagagctgatttataaggaagtcatgaacagcgaagaaaagactaaaaacggtgtggtgaaagggcagccatctcccagtggcgctgctgtgaacagctccgaaagcctgcccccatcatcatctgtcaacgacatctcttccatgtcaaccgaccagacacttgcctcagacacagattcctcactcgaagccagtgccggtcccttgggctgttgccggtag

SEQ ID NO: 230912 - DNA, 1281 bp, synthetic construct
  misc_feature 1..1281: note = Description of Artificial Sequence: Synthetic coding sequence
  source 1..1281: mol_type = other DNA
atgagcaagtccaaggttgacaaccagttctactctgtggaagttggcgattcaacctttacggtactgaaaaggtaccaaaaccttaagcctattggtagtggcgctcaagggatagtctgcgccgcatatgatgctgtgttggacaggaatgttgccatcaagaagctgagtcgacccttccagaaccaaacacacgcaaagcgggcttaccgcgagctggtcctcatgaagtgcgtgaatcacaagaacattataagccttcttaacgtcttcacaccccagaaaacattggaggaatttcaagacgtgtacttggtcatggaactcatggacgcaaacttgtgtcaagtaattcagatggagcttgatcacgagcggatgtcgtacctgctatatcagatgctgtgtgggatcaagcacctgcatagtgccggtattattcaccgtgacctgaagcccagcaatattgtggtaaagagcgattgcacactaaagatcctggatttcggcctggctagaacagctgggacctccttcatgatgactccctacgttgtcacccggtactatagagctcccgaggttatcttaggtatgggctataaagaaaacgtggatatctggtccgtgggatgtattatgggagagatggttcggcacaagatcctgtttccaggtcgcgactacatcgatcaatggaacaaggtgatagagcagctaggtacgccatgtccagagtttatgaagaagttgcaaccaactgttcggaactatgtggagaaccgacctaaatacgccggtttaactttccccaaactcttcccggattcactgtttcccgctgacagcgagcacaataagctgaaggcgtcacaagctcgcgatctgctgagcaagatgctcgtgatcgacccggcaaagcgaataagcgttgatgatgctctccaacacccctacattaatgtttggtatgaccctgctgaagtcgaggcgcctccccctcagatctatgacaaacagcttgacgaaagagaacacactatcgaggagtggaaagagctgatctacaaagaagtcatgaactctgaggagaagactaagaacggcgtggtgaaaggccagccgtcacccagtggcgctgcagtgaacagttctgaatcattacccccatcgtccagcgtcaacgatatctcttcaatgtcaacagaccagacgcttgcttcagacaccgactcatctctggaggctagcgctgggcctctgggatgttgccgttag

SEQ ID NO: 230913 - DNA, 960 bp, synthetic construct
  misc_feature 1..960: note = Description of Artificial Sequence: Synthetic coding sequence
  source 1..960: mol_type = other DNA
atggagttgatggacgcaaacttgtgccaagtcatccagatggagctcgaccacgagaggatgtcctacctgctgtaccagatgttgtgtggtatcaaacacctacattcggctggcatcattcacagagacttgaaaccgtcaaacattgtggtgaagagcgattgcaccctcaagatcctagatttcggtctggctagaaccgccggtactagctttatgatgacaccatacgtggtcacaaggtattacagagcacctgaggtcatactggggatgggttataaggagaacgtggatatgtggtctgtggggtgcattatgggagaaatgattaagggcgcagtgttgttccctgggacagaccatatcgaccagtggaacaaggtcatcgaacagctcggcactccttgtcctgagttcatgaagaaacttcaacctacagtgcgaaactacgtggaaaatcggccaaaatacgccggactcactttccccaagctgttcccggatagcctgttcccggctgactccgagcacaataaacttaaagcttcacaagccagggatctgctgtccaagatgctggtgatcgaccctgctaagcgcatctccgtcgacgacgccctgcagcatccgtatattaatgtgtggtatgaccctgccgaggtcgaagcgccaccaccacagatctacgataagcaacttgacgaaagagaacatactatagaagagtggaaggaactgatttataaggaggtaatgaactccgaagagaaaaccaaaaacggagttgtgaaaggacagccatcacctagcggcgcagcggtgaactcatctgaaagccttccgcctagtagctctgtcaacgatataagcagtatgagcacagaccagacactcgcctcagacaccgatagctctctggaagctagcgctggccctctggggtgctgccgctag

SEQ ID NO: 230914 - DNA, 102 bp, synthetic construct
  misc_feature 1..102: note = Description of Artificial Sequence: Synthetic coding sequence
  source 1..102: mol_type = other DNA
atgtctaagtctaaggtggataatcagttttatagtgtggaggtcggcgatagcaccttcaccgtgctgaagcggtaccaaaatctaaagccaattggctag

SEQ ID NO: 230915 - DNA, 156 bp, synthetic construct
  misc_feature 1..156: note = Description of Artificial Sequence: Synthetic coding sequence
  source 1..156: mol_type = other DNA
atgagtctccattttctgtattattgctcagaaccgacactggatgtgaaaatcgctttctgccagggcttcgataagcaggtggacgtcagttatatcgcaaagcattacaatatgtcaaaaagcaaggtggacaaccagttctacagtgtgtag

SEQ ID NO: 230916 - DNA, 276 bp, synthetic construct
  misc_feature 1..276: note = Description of Artificial Sequence: Synthetic coding sequence
  source 1..276: mol_type = other DNA
atgtcactgcacttcctgtattattgtagtgagccgactcttgacgtcaagattgccttctgtcaggggtttgacaagcaggtggacgtgtcctatatcgcaaagcactacaacatgtccaagagcaaagtggataatcaattctatagtgtggaggtcggagactctaccttcaccgttttaaaaagataccagaaccttaagcccatcgggtcaggtgctcaggggattgtgtgcgccgcatatgatgccgtgctggacagaaatgtggcttag

SEQ ID NO: 230917 - DNA, 225 bp, synthetic construct
  misc_feature 1..225: note = Description of Artificial Sequence: Synthetic coding sequence
  source 1..225: mol_type = other DNA
atgagtaaatctaaggtggacaatcaattctactccgtggaagtgggcgattctactttcaccgttctcaaacgataccagaatctgaaacccatcgggtccggcgcacaggggattgtttgcgctgcctatgacgccgtgctggaccggaatgtggccatcaaaaagctgagccgtccttttcaaaaccagacgcacgccaagcgagcttatagggagctgtag

SEQ ID NO: 230918 - DNA, 366 bp, synthetic construct
  misc_feature 1..366: note = Description of Artificial Sequence: Synthetic coding sequence
  source 1..366: mol_type = other DNA
atgagtctacacttcctgtattactgtagcgagcccacattagatgttaaaatcgcgttctgtcagggattcgataaacaggtggacgtatcatacattgcaaagcactataacatgtctaagagtaaagtggataaccagttttactccgtcgaagtgggagattccaccttcacagtgctgaaacgttatcaaaatctgaagcccatcggaagcggggcacagggaatcgtttgcgccgcttatgacgccgtgttggatcgaaatgtggcaataaaaaaacttagccggcctttccagaaccagacccacgctaagagggcctacagggagttagtgctgatgaagtgcgtgaatcataaatag

SEQ ID NO: 230919 - DNA, 354 bp, synthetic construct
  misc_feature 1..354: note = Description of Artificial Sequence: Synthetic coding sequence
  source 1..354: mol_type = other DNA
atgtcccttcattttctttactactgcagcgaacccacactcgacgttaagatagcgttctgccagggatttgacaaacaggtcgacgtctcttatatagccaagcattataacatgtctaaaagcaaagtggataatcaattttactcggttgaagtaggcgattcaacttttaccgtcttgaagcggtatcagaacctgaaaccaatcgggtcaggtgcccagggcatcgtctgcgctgcttatgacgcagttctcgatcgaaacgtcgcgatcaaaaagctctcaagaccttttcagaatcagactcacgccaaacgcgcttatagagagcttgtactgatgaaatgctag

SEQ ID NO: 230920 - DNA, 426 bp, synthetic construct
  misc_feature 1..426: note = Description of Artificial Sequence: Synthetic coding sequence
  source 1..426: mol_type = other DNA
atgtcattacactttctgtattactgttccgagcccacactagacgtgaaaattgccttctgccaaggattcgataaacaggtggatgtttcctacattgccaagcactataatatgagtaagagtaaggtcgataatcagttctatagcgtcgaggtgggagatagcacatttactgtcctaaaacgatatcagaaccttaagcccattgggagcggagcccagggcattgtgtgtgccgcttacgacgccgttcttgacagaaacgtggccatcaagaaactttcgcggccatttcaaaaccaaacacatgcaaagcgggcttacagagaactggtgctgatgaagtgcgtgaatcataagaatatcatttctctactcaatgtgttcaccccacaaaaaacactggaggaatttcaagactag

SEQ ID NO: 230921 - DNA, 255 bp, synthetic construct
  misc_feature 1..255: note = Description of Artificial Sequence: Synthetic coding sequence
  source 1..255: mol_type = other DNA
atgagcaaatccaaggtagacaatcagttttatagcgttgaggtgggtgattctacattcacggtactgaaacgttatcaaaatctgaagcccatcggatcaggcgctcaaggcatcgtttgtgctgcatacgacgcagtcctagacaggaacgtggcgattaaaaagctgagtcggccatttcagaaccagacccatgcgaaacgtgcctacagggaactcgtgctgatgaaatgcgttaatcataaaaactag

SEQ ID NO: 230922 - DNA, 159 bp, synthetic construct
  misc_feature 1..159: note = Description of Artificial Sequence: Synthetic coding sequence
  source 1..159: mol_type = other DNA
atgagcaagagtaaggtggacaaccagttttatagcgttgaagtgggcgactcaacgttcacggtgctcaaacggtaccagaatctaaagcccatcggcagtggcgctcagggcatagtctgtgctgcctatgatgccgtcctcgatcggaatgtgtag

SEQ ID NO: 230923 - DNA, 147 bp, synthetic construct
  misc_feature 1..147: note = Description of Artificial Sequence: Synthetic coding sequence
  source 1..147: mol_type = other DNA
atgagcttacacttcctctactattgctctgagccgacactggatgttaaaatagcgttttgtcaggggttcgataaacaagtggacgtttcctacatcgctaaacattataacatgtccaagtcaaaagtcgacaaccagttctag

SEQ ID NO: 230924 - DNA, 1008 bp, synthetic construct
  misc_feature 1..1008: note = Description of Artificial Sequence: Synthetic coding sequence
  source 1..1008: mol_type = other DNA
tgaaatgtggcgataaaaaaactaagccgcccattccagaaccagacacatgccaaaagggcatatcgggagcttgtcctaatgaagtgcgtgaatcacaagaatatcatctctctgttgaacgtgttcacaccccaaaagactctggaggagtttcaggacgtctacctcgtcatggaattaatggacgctaatctgtgccaggtgatacagatggaacttgaccacgagcggatgtcatatctcctgtaccaaatgctgtgcggaataaagcatctgcactcagcgggaattatccatagggacttgaaacccagtaacattgtcgtaaagagcgattgtactctgaagatactagactttggcctggcaagaaccgccggaacaagctttatgatgaccccctatgtggtcactcgatattatcgggcacccgaagtaattctggggatgggctataaggaaaatgtggacatgtggagcgttggatgtatcatgggagagatgattaaaggagccgtcttgttcccaggaaccgaccatatcgatcagtggaacaaagtgatcgaacaactgggtaccccctgccctgaattcatgaagaagctgcagcctactgttagaaactacgtggaaaatcgaccgaagtatgctggtctgaccttccccaagttgtttccagattcgttgttccctgccgattctgaacataataagttgaaagcatctcaggctagggatctgctgagcaagatgcttgttatcgatccagcaaagcgaattagtgtggacgacgctctgcaacatccatatataaacgtctggtatgaccccgcagaggtagaggcccctcctccccaaatttacgataagcagctcgacgagagagagcacacaatagaggagtggaaagagctgatctacaaagaggttatgaatagtgaagaaaagaccaaaaacggcgttgtgaaagggcagcctagcccttcggcccaggtacaacagtag

SEQ ID NO: 230925 - DNA, 1764 bp, synthetic construct
  misc_feature 1..1764: note = Description of Artificial Sequence: Synthetic coding sequence
  source 1..1764: mol_type = other DNA
atggcggaaaagggcgactgtattgccagcgtttacggctacgatttaggtggccgattcgtggattttcaaccactcggcttcggtgtaaatggcttggttctgtccgctgtggatagccgcgcatgtagaaaagtggctgtgaagaagatcgcccttagcgatgccaggagcatgaagcacgctctgcgagaaatcaagattatccggaggttggaccatgataacattgtgaaagtatatgaagtgctcggtcctaagggtaccgatcttcagggcgagttgtttaagtttagcgtggcctacatcgttcaggagtatatggagaccgatctggctagactgctcgaacaaggcactttggctgaagagcacgctaagctattcatgtatcagctgctgcgcggattaaaatacattcatagcgccaacgtgctgcaccgagatttaaaacccgcaaatatcttcattagcacggaggacttagtcctcaagattggagatttcggactcgctaggattgtggaccaacattattcacataagggttatctgtctgaggggctggtcaccaagtggtatcgctcccctcgtctgctcctctcgcccaacaattacacaaaagcaatagacatgtgggctgcgggatgcatactagccgaaatgctgacgggacgaatgctgttcgccggagcacacgaactggagcaaatgcagcttatattggagacaatccccgtgatccgtgaagaggacaaagatgagctgctcagggtgatgccctcttttgtgagctccacctgggaagtgaagagacccctgcgcaagctactgccagaggtgaactcagaggcaattgattttctcgagaaaatcttgaccttcaatccaatggatcgacttaccgctgagatgggccttcaacatccctacatgtcaccttattcttgtccagaggacgagcccacaagtcaacacccttttagaatcgaagatgagatagatgatatcgtcctgatggcagctaatcagtctcagctctctaattgggatacttgtagttctaggtatcctgtcagcctgtcatccgacctcgagtggagacccgataggtgtcaggatgcaagtgaagtacagcgcgaccccagggcagggtccgctcctctcgcagaggatgttcaggtggaccctaggaaggattcccatagctctagcgaacggtttctggaacaatcacatagcagtatggaacgggctttcgaggcagactacggaagaagctgtgactacaaagtcggtagtccttcctacctggacaaattactttggcgtgataataagccgcaccactacagcgagccaaagctgattcttgatctcagtcattggaaacaggcggctggggcaccgcctaccgccacgggcctcgccgatacaggggctagggaagatgagcccgcaagcctcttcctcgagatcgctcagtgggtaaaatcaactcagggcggacctgagcacgccagcccacccgcagacgatcccgaacgtagactgtccgcgagccctcccggacgcccagctcctgtggatggaggtgcgagtccccaattcgacctggatgtcttcatctcccgggcactgaagctgtgtaccaaaccagaagatctccctgataataagcttggcgatctgaatggagcctgcatccctgagcatccaggagatctagtgcaaaccgaggcattttccaaagaacgatggtag

SEQ ID NO: 230926 - DNA, 1131 bp, synthetic construct
  misc_feature 1..1131: note = Description of Artificial Sequence: Synthetic coding sequence
  source 1..1131: mol_type = other DNA
atgtgggcagccggttgcattctggctgagatgcttacggggagaatgcttttcgcaggtgcccatgaactggagcagatgcagctcattcttgaaactatccccgtgattagagaggaagataaagacgagctacttagggtcatgccctcttttgtctcctcaacatgggaggtaaaacggcctctgagaaaactactccccgaagtcaatagcgaggccattgattttctggaaaaaattctcacctttaacccaatggacaggctcaccgccgagatgggtcttcagcacccgtatatgtctccctattcctgcccggaagacgaacctacatcccagcaccctttcagaatcgaggatgaaatcgatgatatcgtgttaatggcagctaaccagagccaactgtctaattgggacacatgctcttctagatatccagtttctctctcttctgacctggagtggaggccagatcgctgccaggatgcatcagaggtgcaacgcgaccccagggccggttcagcccctctcgcggaggacgtgcaggttgaccccagaaaagactcccattcctcttccgagagattcctggaacaaagccactccagtatggagcgggctttcgaagctgattacggcagatcctgcgactataaagtgggctctccgtcctacctggacaaactgctttggcgggataacaaacctcatcactattctgagcccaaactcattctcgatctctcacactggaaacaggcagctggcgctccacccactgccacggggttggccgacactggtgcccgagaggacgagccggcttccttatttctcgaaattgcccagtgggtgaagtccacacagggcggaccagaacacgcaagccctcctgctgacgatccagagagacgtctgtccgcatctcctcctggacgccctgccccagtcgacggcggagcaagcccacagttcgatctggacgtctttatttcaagagccttgaaactttgcactaagcctgaggatttgcctgacaacaaattgggggatctgaacggagcctgcattcccgagcaccctggggatctagtccagactgaggccttttctaaggagcgttggtag

SEQ ID NO: 230927 - DNA, 2034 bp, synthetic construct
  misc_feature 1..2034: note = Description of Artificial Sequence: Synthetic coding sequence
  source 1..2034: mol_type = other DNA
atggagtctgacctgcaccagattatacactcatcacagccgctcacactggagcatgtccgatatttcctctaccaactcctgcgcggactgaagtacatgcactcagctcaggtgatccacagagatctgaagccatctaaccttctcgttaatgagaattgtgaactgaaaatcggagactttgggatggctaggggcctctgcactagccctgccgagcaccagtattttatgactgagtacgtagcaacgagatggtacagggccccagagcttatgctgagtcttcacgagtacacacaggccattgatctgtggagcgtgggatgcatctttggggagatgttagccaggcgtcaacttttccctggaaagaattatgtgcaccaactgcagcttattatgatggtgctgggcacccccagtccagcagttattcaggcagtgggagccgaaagggtgcgcgcttacatacaaagcttgcctcctcgacagcctgtgccctgggagaccgtttaccccggagccgaccgccaggctttatctttgttgggcagaatgttgcgctttgaaccgagcgccaggatctcggcggctgctgcgctgagacacccctttttggcaaagtaccacgatcccgacgacgaaccagattgcgctcctccattcgactttgcgtttgaccgggaggccttgaccagagaacgcatcaaagaagcgattgttgccgagatcgaggactttcatgctagaagagagggtatccggcagcagattcgatttcagcccagcctgcagcccgttgctagtgaacccggatgcccagatgtcgagatgcccagtccttgggctccatccggcgattgcgcaatggagtctccccctcccgcacccccaccttgtccaggcccagctcccgatacgatagacctcacactgcaaccaccccctccagtgtccgagcctgccccacccaagaaagatggcgctatctctgataacaccaaagctgccctgaaggctgcgttgctcaagtctctcaggagcagactccgcgatggcccttctgccccacttgaggcgccagagccaaggaagccagtgactgcccaggagaggcagagagagagagaggagaaacgacggcgacgacaggaacgagccaaagagagggagaagaggcggcaggagcgggaacgaaaagaacgaggagccggtgcttctggcggaccctcaacagaccctttggccggattggtgctctccgataacgataggtccctgctggagaggtggacaaggatggcaagacctgccgctccagccttaaccagtgtacctgcaccggcacccgctcctacccccacccccactccagtacagccaacctcacccccacccggtcccgtggcacagcctacaggtccccaacctcaaagtgctggatctactagcggaccagtgccgcagcctgcatgtcctcccccagggccagcaccacaccctacaggcccacctgggccaattccagtgccggcaccaccacagattgccacatcaacgagcttgttggcggctcagagcctcgtacctccgccaggcctgcctggctcttctacccccggagtgcttccctattttcctccgggactacctcctcccgatgccggaggcgcaccacagtcttccatgtcagagtctcccgacgttaatctggtcacacagcagctgagcaaaagccaggttgaggacccactcccacccgtgttctccggtactccaaagggcagcggtgccggatatggcgtaggcttcgacttggaagagtttttaaatcaaagcttcgatatgggcgtcgccgacgggccacaggacggccaggctgattcagcatccttaagtgccagcctgctcgctgattggcttgagggccatggcatgaatccggcagacatcgagagtctgcagcgcgaaatacagatggattcgcccatgctgcttgcagacctgccagatctgcaggatccatag

SEQ ID NO: 230928 - DNA, 2451 bp, synthetic construct
  misc_feature 1..2451: note = Description of Artificial Sequence: Synthetic coding sequence
  source 1..2451: mol_type = other DNA
atggctgaacctctgaaggaggaggatggggaagacggatctgcggagccccctggcccagtgaaagcggagccagcacataccgccgctagtgtggccgctaagaatctcgctctcctgaaggcgaggtcatttgacgtgaccttcgatgtgggggacgagtatgagattatagagaccatcgggaacggggcatacggcgtcgtgtcaagcgctcggaggcgactgaccggacaacaggtggctatcaagaagattccaaacgcgtttgatgttgtaacaaacgcgaaaaggacactgagagagcttaaaatactgaagcactttaagcacgacaatatcatcgctattaaagatattttgcgacccaccgtaccgtatggcgagttcaagtcagtgtatgtggtcctggaccttatggaatccgatctgcatcagatcatccattcttcccaacctttaactttagagcatgtacgatactttttgtatcagttgttacgtggactgaaatacatgcattctgctcaggtcatacaccgggaccttaaaccttccaacctgctcgttaacgagaactgcgaacttaagattggcgactttggcatggccaggggtctgtgcacctcacctgccgagcaccagtatttcatgaccgagtatgtggccacccgatggtacagagctcccgagctgatgttgagtttgcatgagtacacacaagccattgacctgtggtccgttggatgcatctttggagaaatgctggcccgaagacagcttttcccgggaaagaactatgtgcatcagttacagctgattatgatggtcctgggcacaccttctcccgctgtcattcaggctgtgggggctgaaagagtgcgggcatatatccagagccttccccctcgacaaccggtgccatgggagacagtatatcctggcgctgatagacaggctttatccctgctcggacgcatgctgaggtttgaaccctcagcgaggatcagcgcggctgccgctctccggcatccatttctagctaagtaccacgatccagatgatgagcctgactgtgcccctccgttcgactttgctttcgaccgcgaggccctgacccgagagcggatcaaggaagcgattgtcgccgaaatagaagattttcatgccagacgcgagggcataaggcaacagattaggttccagccttcccttcagcccgtggcgagtgagccagggtgtcctgatgtcgagatgcccagcccctgggcgccttcaggggattgtgctatggagagccctcctcccgcacccccaccttgtccagggcctgcccctgacaccatcgacttgacactgcagccccctcctccagtctccgaaccagcccctcctaagaaagatggcgcaatctctgataatacaaaggccgcactgaaggctgctcttctgaagtctctaaggagtaggttgcgagatggtccttctgctcctctcgaggctcccgaacctaggaaacctgtaacagcacaggaacggcaaagagagcgggaagaaaagaggcgcaggaggcaggagagggctaaggagcgcgagaaacgacgccaggaacgggaacgaaaagagagaggtgccggagcctccgggggtcccagcactgatccactggcgggactggttctgtcagacaacgatcggagtctacttgagcggtggactagaatggcccgacccgcagccccagcccttacttctgtacccgcaccagctccagccccaacccccaccccgaccccagtgcaacctacgtccccacccccaggacccgtcgcccagccaaccgggcctcagccacagagcgctggcagtacctctggccctgtaccccagcctgcatgcccaccccctggacctgcgccacacccgaccggtcccccaggacctattcccgtgccggctcctccgcagattgcaacaagcacctccctgctcgccgctcagagcctggttccccctccgggactgcccggatcatccaccccgggtgtcttaccatatttccctcccggtctgccacccccagatgccggaggcgctccccagtccagtatgtctgagtctccagatgtgaatctagttacgcagcagctgtcaaagagccaagtcgaggatcctcttcccccagtgttttcgggtacccctaaggggtccggagcgggttatggagttggattcgacctggaagaatttctgaaccaatcatttgacatgggggtagcagatgggccacaggacggccaggctgactccgcttccctctctgcatcccttcttgctgattggctggaggggcatggcatgaatccagcagatatcgagagcctgcagcgtgagatacagatggactcccccatgcttttggcagacttgcccgatttgcaggacccatag

SEQ ID NO: 230929 - DNA, 2451 bp, synthetic construct
  misc_feature 1..2451: note = Description of Artificial Sequence: Synthetic coding sequence
  source 1..2451: mol_type = other DNA
atggctgagccactcaaggaagaagacggcgaggatgggtctgcggaacccccaggcccagtaaaagccgaaccagctcatacggcggcatcagtagccgcaaagaatttggcgcttctgaaggccaggtccttcgacgtgacctttgacgttggggatgaatacgagatcattgaaacgattgggaacggggcttacggtgtggtcagttctgctcgcagacgcctgaccggacagcaggttgccatcaaaaaaatccccaacgctttcgatgtcgttaccaatgcaaaacgtaccctgcgggagttaaagattctcaagcactttaaacacgataatatcatagctattaaggatatcctgaggccaacagtcccctacggcgagtttaaaagcgtgtatgtggttcttgatttgatggagtcagatctccatcaaatcattcactccagtcagccccttactctggaacatgtacgctatttcttataccagttgctgagaggtctcaagtacatgcattcagcccaggtcattcatcgggaccttaagccttcaaacttgctggtgaacgagaactgtgaactcaaaatcggcgacttcggtatggctagggggctttgcacttcccctgctgaacatcaatactttatgaccgaatacgtggcgacaagatggtatcgcgctcctgaactgatgctttcactacacgaatacacacaggctatcgatctctggagcgttggatgcatcttcggggagatgctggcccgacgacagcttttccctggcaagaattacgttcaccaattgcaactgataatgatggtgttgggcacaccatcccccgcagtgatacaagctgtgggtgccgaacgggttcgtgcatatattcaaagcttacccccaagacaacccgtaccctgggagacagtatatccaggagccgataggcaggctcttagcttgctgggcaggatgctgcgtttcgagccctctgcacgaataagtgcggctgccgctctgaggcacccgttcctggccaagtatcatgaccccgacgacgagcctgactgcgctccaccttttgacttcgcctttgatcgggaggctttgacgcgagaacgcattaaggaagctattgtggccgagatagaggactttcatgcccgacgggagggcatccgccaacaaatcagatttcagcctagcctgcagccagtggccagcgaaccagggtgtcctgacgtcgagatgccctcaccatgggccccatccggcgactgcgctatggagtccccaccgcctgcaccacccccttgtcctggacccgctcccgatacgatcgacttaactttacagccacctccccctgtttccgaacccgcacctcccaaaaaagatggggcaatctcggacaacacaaaagccgcactgaaggccgctctgcttaagagcctgagaagcagactgcgggatggaccctccgcacccctagaggcccctgagccgcgaaaacctgtcacagcgcaagagcgtcagagggagcgggaagaaaaaagacgacggaggcaagagcgggctaaagagcgagaaaagaggcgtcaggaacgagagaggaaagagcgaggtgctggagcctcagggggaccgtcaacggatcctctggccggattggtgttatccgacaacgatcgttctctgcttgagagatggactcggatggctcggccagctgcacccgctctgactagtgtacctgcgccagctcccgctcccactcccacgcctacgcctgttcagccaacgtccccccctcctggtcctgttgctcagccaacagggccacagccacagtcggcaggatcaacaagcgggcctgtcccccagcctgcctgtcccccacccggtccggctcctcacccaactgggcctcctggaccaattccagtgccagctccccctcaaattgcaacctctacttcattgctggccgctcagtctctagtccctcccccaggactccctgggagctccactcctggggtgctgccctacttccctcccggactcccgccaccagacgcagggggagcgccacagagttctatgtctgaaagccccgatgtgaacctggtcactcaacagctgtctaaaagtcaagtagaggacccactcccaccagtgtttagcggcaccccaaagggcagcggggctggttacggcgtcggctttgaccttgaggaatttctgaatcagagcttcgacatgggcgtggccgacggcccacaagacggccaggccgatagcgccagtctgtcagccagtctgctggccgactggctggagggacacgggatgaacccggcagatatagagtcgctccaaagggagatccagatggattcccctatgctccttgcagacctgcctgacctgcaggatccgtag

SEQ ID NO: 230930 - DNA, 2451 bp, synthetic construct
  misc_feature 1..2451: note = Description of Artificial Sequence: Synthetic coding sequence
  source 1..2451: mol_type = other DNA
atggctgaaccattaaaagaggaggatggcgaagacggatctgcagaaccacctggtcccgttaaggctgagcctgcacataccgccgcttctgtcgcggctaaaaatctggctttgctcaaggctcggtccttcgacgtgaccttcgatgttggcgatgagtatgagatcatcgagaccatcggtaacggtgcttacggcgtggtgagcagcgcgaggcggagattaacgggccagcaagtggcaatcaaaaagattccgaacgccttcgacgtagtcacaaatgcaaagcgcacactgagggagttaaaaatcctgaagcatttcaaacatgataatattattgccatcaaggatatcttgcgcccaacagtgccctatggagaatttaagtccgtgtacgtcgtcttagatcttatggaatcagacctgcatcaaatcatccattcatcacagccgcttaccctcgagcacgttaggtacttcctctaccaactacttcgcggactaaagtacatgcactccgcacaagtcatccatagagacctcaaaccatccaatctgctagtcaacgagaactgcgagctgaaaatcggtgactttggaatggctagaggcctgtgcaccagtccggcagaacaccagtatttcatgacggagtatgttgccacccgctggtaccgggctccggaacttatgctgtctctgcacgaatatacacaggcaatagatctgtggagtgtcgggtgcatattcggagaaatgcttgcacgcagacagcttttcccgggaaaaaactacgtccaccaactgcagctgataatgatggtcctgggcactccctcccccgcagtgattcaggcagtgggcgctgaacgagtgcgcgcttatatacagtctctgccacccagacaaccggttccttgggaaactgtataccctggagctgataggcaggcactgtccctgctcggcaggatgctgcgctttgaaccatccgcgcgaatatccgcagcggcagcactgcgacacccgtttctagcgaagtatcatgatcccgacgatgaaccagactgcgcacccccatttgattttgcatttgaccgggaagcactgacacgggaaaggatcaaggaggcaattgtggccgagatcgaggacttccacgccagaagggaaggtatccgacagcaaattcgctttcagccttccctacagcctgtcgctagcgagcccggatgcccggatgtcgagatgccttctccttgggcaccaagcggggactgcgcaatggaaagtcccccacccgctccaccgccttgtcccggacccgctcctgacacgatcgacctaaccctgcagccaccgcctccagtttccgagcccgcacctcccaaaaaagatggcgctatatctgacaatacaaaggctgcactgaaagctgctttactgaagtcccttcgctcccgcttgcgggacggccctagcgcgcctctcgaggcccctgaaccccgaaaaccggtcactgctcaggaacgccagagggagcgggaagaaaagagacggagacggcaggaacgggcaaaggaacgagagaaacgccgacaagaaagagagcgtaaggagcgtggcgctggtgcctctggtgggccatcgacagaccctttggcaggcctggtactctctgacaacgatagatcactcctcgagcgatggactcggatggctcggcctgcagcccctgccctcacatctgtgccagctccagcccctgctcccactccaactccaacacccgtccaaccaaccagccccccacccggaccagtagcccaaccaacgggtccccagcctcagtccgccggatcgacttctggtccagtgccccagccggcttgcccacccccaggcccagcaccccatccaaccggccctccgggacccattcctgttcccgcacctccgcaaatagcaactagcacatcactactggccgctcagtcattggtaccccctcccggactgcctgggtcatcaacccccggtgtgctgccatactttccaccaggccttcccccaccagacgcaggcggagccccacagagttcaatgtccgagtcccctgatgttaacctcgtcacccagcagttaagcaaatctcaggtcgaagatcctcttccccctgttttctccggtactcctaagggctctggagcagggtatggggtggggttcgatctcgaggagttcctgaaccagtcctttgatatgggtgttgcagacgggccacaggacggccaggctgacagcgcatctctgtctgcttcgctgctagctgactggttggaaggccatgggatgaaccctgcagatatcgaatcacttcagcgggaaatccaaatggactcaccaatgcttttggctgacctgcctgaccttcaggacccgtag

SEQ ID NO: 230931 - DNA, 726 bp, synthetic construct
  misc_feature 1..726: note = Description of Artificial Sequence: Synthetic coding sequence
  source 1..726: mol_type = other DNA
atggccgagccgttgaaagaggaagacggtgaggacggtagcgccgagccgccaggtcccgtcaaagcagagcccgctcacaccgccgcttccgtggccgctaagaacctcgctctccttaaagcccgatcatttgatgtgacatttgacgtgggagatgaatatgagatcattgagactatagggaacggggcatacggagttgtgtcctccgccaggcggcgacttacaggccagcaggtggctattaagaagattcctaatgccttcgacgtggtcactaacgcaaaacgcacactgagggaactgaagatcttaaaacacttcaagcacgacaatataatagccatcaaagacatactcaggcccacagttccgtacggcgaattcaagagtgtttacgtagtgctagatctgatggaatccgacctgcaccagatcatccactcctctcagcctctcaccttagaacacgtgagatattttttgtaccagctgctccgcggactgaaatatatgcatagtgctcaggtgatccatcgggatctgaaaccttcgaacttgcttgtgaatgagaattgtgaactgaagataggcgacttcggaatggctcgcggactatgtacgtcgcccgctgaacatcaatacttcatgaccgagtatgtggccactcggtggtatcgagcccctgaactcatgctcagtctccatgaatacactcagtag

SEQ ID NO: 230932 - DNA, 2136 bp, synthetic construct
  misc_feature 1..2136: note = Description of Artificial Sequence: Synthetic coding sequence
  source 1..2136: mol_type = other DNA
atggcagagcgggagtccggtggcctggggggtggcgcagcttccccacctgccgctagcccattcttgggactccatatcgcctcaccaccgaattttaggctgacccatgacatctccctggaggaattcgaagacgaggacttgtcagaaattacagacgaatgcgggatcagtctacagtgcaaagataccctgagtttgcggcctcccagagcgggactcctcagcgctggcggaggaggagccggtagcagactgcaggccgagatgcttcagatggacctcattgatgctactggggataccccaggagcagaagacgatgaggaggacgacgatgaagaaagagctgccaggagacctggagccggtccacctaaggcggagtcaggtcaagagcccgcttcccggggacaggggcagagtcagggccaatcgcaaggtccgggatcgggagatacttacaggccgaaacggcctaccaccctgaatctctttccccaggtccctcggtcacaggacacgctcaataacaattctctgggtaaaaaacactcgtggcaggaccgagtcagtcgaagctcaagtcctcttaaaactggggagcaaactccaccccacgaacacatctgtctgagcgatgagctgcctcctcagtctggcccagctccgacgacagatcgcggaactagtaccgacagcccctgtcgcaggagcactgcaacccagatggcccctccaggaggtcctcctgcagccccaccagggggacggggtcacagtcatcgtgaccgcatacattatcaggcagacgtgagattggaggcaacagaggaaatttacttaacgccagttcaacgtcctcccgacgccgctgaacccacctctgcattcttgccacccactgagtcaaggatgtctgtctcatccgaccctgaccccgcagcatacccgtcaactgctggtcgaccccatccatctattagtgaagaggaagagggttttgattgcttgagctctcctgaaagagcagagcccccaggcggaggatggcgcggttctctgggggagcctcctccccctccccgtgcctcactcagcagcgacaccagcgctctgagttatgactccgtcaaatataccctggtggtggacgaacatgcccagctcgagctcgtgagcctgaggccttgctttggcgactactcagatgaatcggactccgcaacagtctatgataattgcgctagtgtctcttctccttacgaatcggccatcggggaagaatacgaggaggcacctcggccacaacctccagcttgcttatctgaggatagtactccagacgagcctgacgtgcacttcagtaaaaaattcctaaacgtttttatgtctggcaggagtagatccagctccgctgagtcattcggtctcttttcctgtattatcaatggagaggagcaggaacaaacacaccgtgcaatcttcagattcgtgcccaggcacgaagatgaactggaactcgaagtcgacgacccccttttggtcgagctacaggccgaggattattggtatgaggcttacaacatgcgcaccggcgctaggggagtctttcctgcgtactacgccatagaggtaacaaaggaacctgagcatatggcggctttggccaagaattccgactgggtcgaccagtttcgggtgaaattcctgggatccgtgcaagtgccatatcacaaaggaaatgacgttctctgcgcggcaatgcagaagattgctaccactagaagactgacggtgcactttaatcccccatcttcctgcgtcctcgaaatttccgtccgaggggttaagatcggagtgaaggctgatgactcccaggaggctaaaggaaataagtgttctcatttctttcagctcaagaacatctccttctgcgggtatcaccctaagaataataaatactttggctttatcaccaaacaccccgcagaccatcggttcgcatgtcacgtgttcgtgagcgaagactctactaaggccctcgccgagagcgtcggtagggcttttcagcagttttacaaacagtttgtggaatacacctgtccaaccgaggatatttatcttgaatag

SEQ ID NO: 230933 - DNA, 1797 bp, synthetic construct
  misc_feature 1..1797: note = Description of Artificial Sequence: Synthetic coding sequence
  source 1..1797: mol_type = other DNA
atgttgcctgacttccctagtccatccacgtgggctcctggactactgctgccatcagggccagcactgctatccccaagtgtgttgcaagattcactgtctctcggccgatccgagcagccccacccgatatgtagcttccaggacgactttcaagagttcgagatgatagatgataatgaggaagaagatgacgaagatgaggaagaggaggaggaggaggaggagggtgacggggaaggtcaggaaggaggggatcccggtagcgaggctcctgcgcctggaccactgataccatctcccagtgttgaagagcctcataagcaccgaccgaccacactccggctgacaacactcggtgcccaggacagccaggatccagaagcagctgccggacctgggggagtggagctggtggatatggagactcttaatcctactagagacacaataactcccctgtgggccgctccaggtagggctgcaaggccagggagagcatgctccgcagcctgcagtgaggaggaggatgaggaagacgacgaggaagaagaagacgctgaggactccgccggtagcccagggggtagagggactggcccaagcgcgccaagggatgccagcctcgtctatgatgcagttaaatatacattggtagtggacgagcacacacagctggagctcgtttccctacgtaggtgcgcgggacttggacatgactcagaagaggattccggtggagaggcaagcgaggaggaagccggagcagcactcctcggcggaggacaggtgagcggagacactagtcccgactcaccagaccttacttttagcaagaaatttctgaacgtcttcgttaattctacgtcaaggtccagctccacagagtcatttggtctgtttagctgtttggtcaacggcgaagaaagagaacagacacaccgggctgtttttcgatttatacctaggcatccggacgaactagagctcgacgtggacgacccagtcctggtcgaggcagaagaggatgacttttggtttcggggtttcaacatgcggaccggcgagcggggtgtctttcccgctttttacgcccatgccgtgcctggccctgctaaagacttgttagggtcaaaaaggagcccctgctgggttgagagattcgatgttcaattccttgggagtgttgaggtgccgtgccatcagggcaacggcatcctctgcgccgcaatgcagaagatcgccaccgccagaaagcttacagtgcaccttagacctcctgcgagctgtgaccttgaaatatctctacggggtgttaagctgtctctgagtggcggagggccagaatttcagagatgctcccactttttccagatgaaaaacatcagcttttgtggatgtcaccccagaaacagctgcgaagcaccacagggggctgcctttcagtgggaacgcggtgttgacagaaaaagggtgctccagacgcgtggaaatgtgcaaccacacctgggcgctggccagggggcagctttgaatagagcaacggagggatcctctacaggctctgagaaaggagaatggacgcctctggttatcatggagttgacacaaagcgtgaattcctgttatttcggtttcatcaccaagcacccattgctgtctcgattcgcgtgccacgttttcgtgtcgcaggaaagtatgcggcctgtggcacagtcagtggggagggcctttctggagtattaccaggaacatctcgcttacgcatgcccaaccgaggatatctaccttgaatag

SEQ ID NO: 230934 - DNA, 2472 bp, synthetic construct
  misc_feature 1..2472: note = Description of Artificial Sequence: Synthetic coding sequence
  source 1..2472: mol_type = other DNA
atggccgatcgagccgagatgttttctctgagcacattccacagcctctcaccgccaggttgcagaccccctcaggacatctcattggaagagttcgatgatgaggacctgagcgaaatcacagacgactgcggactgggcctcagttacgactcagaccattgcgagaaagactctttgagtctcggacgctcagagcagccccatcccatttgcagctttcaagacgacttccaggaattcgaaatgatcgacgacaacgaggaggaagatgacgaagacgaggaagaagaggaagaggaggaagaaggtgatggcgagggacaagagggcggagaccctggatctgaggcacccgcacccggtcctctcatccctagcccctcagtggaggaaccacacaaacatagaccaacaaccctccggctcacaacactgggcgcacaggacagtcttaacaacaacgggggttttgacctggttcgcccagcctcttggcaagaaactgcgttatgttcccccgctcccgaggctctcagagaactgccgggaccactccccgctactgacactggccctggcggtgctcaatccccagtgagacccggttgtgattgtgaaggaaacaggccagccgagccaccagccccaggaggaacaagtcctagctccgatcctggcatagaggccgacttgcgatctcggtcgagcggtgggaggggcggacgcaggagtagtcaggagctgtcttcacccggatcagactctgaggacgccggtgggagattggggagaatgattagttctattagtgaaactgaacttgagttgtcaagcgatgggggatcctctagttccggcaggtcaagtcacctgacaaatagtatcgaagaagcaagctccccggcatcagaaccagagccccctagagaaccgcctcgccgaccggcattccttcccgttgggccagatgatactaattcggaatatgagagcggatccgagtccgagccggacctcagtgaggatgcagattcgccttggctactgtcaaaccttgtgagtcgaatgatctcagaggggtcaagtcccatcaggtgtcccggacagtgtctatctcctgctccgaggccacccggtgaacctgtgagccctgctggaggtgcagctcaggattctcaagaccctgaagctgcggctgggccaggcggagtcgagctggttgatatggagactctctgtgcaccacccccaccagcccctgctgccccacggccaggcccagcacaaccaggaccatgcttgttcctgtccaaccctacgcgggataccattacccccctatgggcagcacctggaagggccgcacggccaggaagggcttgcagcgcagcttgtagcgaggaagaagacgaggaggatgacgaggaagaagaggatgctgaggattctgccggttcaccaggcggtcggggtactggtccctcagccccacgagacgcatcactagtttacgatgcagttaaatatacactcgtcgtggatgagcatacacagctggaattggtgagtttaaggagatgcgctggtctcggacacgattccgaagaggatagcggtggcgaggctagcgaagaggaggccggtgctgccctgctcgggggtggccaagtctcgggggacactagcccagattctcccgacctgaccttcagcaagaaattcttgaatgtgtttgtcaactcaacttctcggtcttcatcaacagaaagctttggtttattctcctgtctagtcaacggagaggaacgggagcagacacatcgggcagtgtttagattcatccccagacaccccgatgagctagagcttgatgttgacgatcccgtactggtcgaagcggaggaggatgatttctggtttcgcggattcaatatgagaacaggtgagagaggtgttttccctgcattctatgcccacgcggtgcctggcccagcgaaagatttgttgggctccaagagatctccatgctgggtagaaaggttcgacgtacagtttctgggcagtgtggaggtgccctgtcatcagggaaacggcatattgtgcgctgcaatgcagaagatcgcgactgcccgtaagctgaccgttcacttgaggccacccgctagctgcgacctagaaattagcctcaggggtgtgaaactcagtctgtcagggggaggaccagaattccagcggtgttcccatttcttccagatgaagaacatttctttctgcggctgccaccccagaaactcctgctattttgggtttataactaagcatcctctgctgagccgctttgcgtgtcatgtcttcgttagtcaggaatcgatgcgcccagttgcccagagcgtcggtagggcctttctcgaatactaccaggaacatctggcatacgcttgtcccacagaagatatatatctggaatag

SEQ ID NO: 230935 - DNA, 1335 bp, synthetic construct
  misc_feature 1..1335: note = Description of Artificial Sequence: Synthetic coding sequence
  source 1..1335: mol_type = other DNA
atggctgacagagctgagatgttttctctgagcacttttcattccctgagccctccaggttgtcggccaccacaggacataagcctggaggaattcgacgatgaggacctgtccgaaatcacagacgactgtggattaggcctcagctacgacagcgatcattgtgagaaagactccctgagcctgggtcgtagcgagcagcctcatccaatttgcagcttccaggacgatttccaggaatttgagatgatagacgacaatgaggaggaggaagatgaggaggatgacgaagaagaggaagatgcagaggactccgccggatctcctggcggacggggaaccggaccgagcgccccacgagacgctagcttggtttatgatgcagttaagtatacactcgttgtggacgaacatactcagctggaattggtcagccttcgtcgctgcgcaggactggggcacgacagtgaagaggacagcggaggggaggcctctgaggaggaggcgggtgctgcgctcctggggggaggccaagtgtccggcgataccagtccagactctcccgacctgaccttttccaaaaaatttttgaacgtcttcgtgaactccacaagtagaagctcttccaccgagagtttcggacttttcagctgtctcgtgaacggagaggaaagggaacagacccaccgggcagtgtttcggtttatcccaagacatcctgacgaattggagctggacgtagacgaccctgttctggttgaggccgaagaagatgatttttggttccgcggattcaatatgaggacaggggagcggggagtgttccccgcattctacgctcatgcggtgcctggccctgctaaggatcttttggggtcgaagaggagtccttgctgggtggagaggttcgatgtgcaattcctcggcagcgtagaagtgccctgtcaccagggtaacgggatactgtgtgccgctatgcagaaaatcgccaccgcccgtaaactgacggtccacttacgcccacctgcatcttgtgacctggagattagtttgaggggggttaagctgagtctgagtggcggtggaccagagtttcaacggtgctctcattttttccaaatgaagaatatctccttttgtgggtgtcacccacgaaacagctgttatttcggcttcattaccaaacacccactgctctcccgattcgcttgtcacgtgtttgtaagccaggagagtatgcgcccagtggcacagtccgtgggacgcgctttcctcgaatactaccaggagcacctggcctacgcctgtccaactgaagacatctatctggagtag

SEQ ID NO: 230936 - DNA, 1677 bp, synthetic construct
  misc_feature 1..1677: note = Description of Artificial Sequence: Synthetic coding sequence
  source 1..1677: mol_type = other DNA
atgatatccagtatctcagaaacagaattggagctatctagcgacggaggctcctcctcctcaggcaggagcagccacctcaccaacagtatcgaggaagctagttcaccggctagtgaaccagaaccaccccgagaacctcctaggagaccagcatttctgcctgtgggtccagacgacacaaacagtgaatacgaaagtgggtctgagtcagaacccgacctttcagaagatgcagatagtccctggctcctctcaaacctagtgtcaagaatgatttctgagggtagcagcccaatccggtgtccaggacaatgcctgtccccagccccacgccctccgggtgagccagtgtctcccgcagggggtgcggctcaagattcccaggaccccgaagcagccgcaggacctggaggcgtcgagcttgtggacatggaaaccctgtgcgctcccccacctcctgcccctgcggctccacggcctggccctgcccaacctgggccatgtctgttcctctccaacccaacccgtgataccatcacaccattatgggccgctccaggccgtgccgcaaggcctggacgggcttgtagcgctgcatgtagcgaggaggaagatgaggaggatgacgaagaagaagaagatgcagaagactcagctggatcacccggaggtcgtgggacaggtccatcggcccctagggacgcctcactggtgtatgacgcagtaaaatacactctggtcgtcgatgagcacacccagctagaactggttagcttgcgtagatgtgctggcctcggacacgactcggaggaagatagcggtggcgaggctagcgaggaggaagcgggagcggctctcctgggagggggacaagtgagcggggatacttcccccgattcccctgatctcaccttctctaagaaattcctcaacgtcttcgtcaactcgacctcacgaagtagtagcacggagagcttcggactgttttcttgtctggtgaatggtgaagagagggaacagacccatcgcgctgtatttcggttcattccgaggcatccagatgagctcgagttggatgtggatgacccagttttagtggaggctgaggaagacgacttttggttccgcggattcaacatgagaacaggcgaacggggagtatttcctgcgttttacgcccatgccgtaccaggccctgccaaggacctgctggggtccaaacggtccccatgctgggtggagagatttgatgttcaatttcttggaagtgtggaggtgccctgccaccaggggaatggtattctctgtgccgctatgcagaaaatcgctactgcccgtaaactgaccgtccatctgagacctcccgcatcttgcgaccttgaaatcagtcttagaggcgtgaaattgtccctgtccggtggtggcccagaattccagaggtgctcacacttctttcagatgaaaaacatctctttctgtggctgccatcccaggaacagttgttatttcggctttattactaagcaccctctgctcagcagatttgcctgtcatgttttcgtcagccaagagtctatgcgcccagtggcgcagagtgtgggaagagcgttcctcgagtattatcaagaacatctggcctacgcgtgccctactgaagacatctacctcgaatag

SEQ ID NO: 230937 - DNA, 1677 bp, synthetic construct
  misc_feature 1..1677: note = Description of Artificial Sequence: Synthetic coding sequence
  source 1..1677: mol_type = other DNA
atgataagcagcatcagcgagaccgaactggagttgagctccgacgggggatccagcagtagtggccgaagtagtcacctgacaaactctatcgaagaagcctccagccctgctagcgagcccgagccaccacgcgagccccctaggagaccagccttcctgcccgtcggccctgatgatacgaacagcgaatatgaatctggaagcgagagcgaacctgatctgagcgaagacgcggactctccatggctgctctctaatcttgtgagtagaatgataagtgagggaagcagcccaatcagatgccctggccaatgcctaagccctgctccccgtcccccaggtgagccagtgagccccgcaggcggagctgcacaggactcccaggaccccgaggcggcagcaggcccaggtggggtagagttggttgacatggagaccctctgtgcccctcccccaccagctcctgcagctcctcggcctggtccagcccaaccgggaccctgcttgttcctgtccaatcctactagagacactatcacccctttgtgggccgctccaggccgagcagccagacctgggagggcatgctccgcggcttgctcagaggaggaggacgaggaggacgatgaggaagaggaggacgccgaggattcagcaggaagccctggcggtcggggaactggacccagcgcccctagggacgcgtctttggtatacgatgcggtcaagtacactctggtagttgatgagcatacccagctggaacttgtgagcctgcggcgttgtgcagggctgggtcacgactccgaggaggattccggcggtgaggccagtgaagaggaagcaggggcagccctactggggggtggccaggtcagcggggacacctcccccgatagccccgatctgactttttccaagaaattcctcaacgtgttcgtcaacagcacctcacgttcttcctctactgagtccttcggtctgttctcctgtttggtgaatggggaggaacgcgagcagactcaccgggctgtctttcggtttattcctagacaccctgatgagctggagctggatgtcgacgacccagtcctggttgaggctgaggaagacgatttttggttcagaggcttcaatatgcgaaccggggagagaggggttttccccgcattctatgctcatgcagtacccggaccggcaaaggacctgctaggttctaagcgaagcccatgctgggtcgaacgattcgatgtccagtttctcggaagtgtggaagttccttgccaccaagggaatggaatcctctgcgcggctatgcagaaaatagcaactgcgagaaagttgactgtgcacctccgtcctcctgcatcttgcgacctggaaatctcgctgagaggtgtgaaattatccctctctgggggaggccctgaattccagaggtgctcccacttttttcaaatgaaaaatatatctttttgcggatgtcaccccagaaactcctgctatttcggcttcatcactaagcatccattgctctcaaggtttgcatgtcatgtgtttgtaagccaggagagtatgcggccagtagcccagtcagtcggtagggctttcctggagtattaccaggaacacctggcgtatgcttgcccaacagaagacatttacttggaatag

SEQ ID NO: 230938 - DNA, 1641 bp, synthetic construct
  misc_feature 1..1641: note = Description of Artificial Sequence: Synthetic coding sequence
  source 1..1641: mol_type = other DNA
atggctgatagagctgaaatgttctcactgtcaaccttccattctctcagccctcccggttgtaggcctcctcaagatatatcactcgaggagttcgatgatgaagatctctctgagattaccgacgactgcggcctcggtctgagttacgactctgaccactgtgaaaaagacagcttgagcttaggcaggtcagaacaaccacaccctatctgcagcttccaggatgatttccaagaatttgagatgattgacgataacgaggaggaggatgatgaggacgaggaagaggaagaagaagaggaggagggcgatggagagggccaggaaggcggagaccctgggtcagaggccccagcaccagggcctctgatcccttcaccctccgtcgaggagccccacaaacatcgcccaacgaccctgcggttaacaactctcggtgcacaggatagtctgaacaacaacggagggttcgacttggtgcgccctgcctcttggcaagagacagctttgtgctcccctgctcctgaggctctacgagagctgcccggacctctaccagctacagataccgggccaggaggcgctcagagccccgtgagaccaggatgtgattgtgaaggaaatagacctgctgaacctccagctcctgggggaacttcaccgtcaagcgacccagggattgaggcggatctcaggagtcggtcgtctggagggcgagggggacggaggtcgagccaggagctatcctctccaggatccgactctgaagacgcagggggtaggctgggaagaatgatctcctcaatttccgagactgagctcgagctttcttcagacggcggttcctcttcaagtggccgatctagccatctcactttctctaaaaaattcttgaacgtgtttgtgaattccacctccaggtcatcaagtacggaatccttcggtcttttctcgtgcctggtcaacggagaagagcgggaacagacacatcgggctgtgttcaggttcatcccgaggcaccctgacgagctggagctggacgtggacgaccctgttctcgtagaggcagaggaagacgacttctggttccggggatttaatatgcgaactggcgaacgtggggtcttccctgcattttacgctcacgccgtacctggccctgccaaagacctgctgggatcaaaacgctctccgtgttgggttgagcgttttgacgtgcagtttcttggatccgtcgaagtaccttgccatcaggggaatgggatcctgtgtgccgcaatgcaaaaaatcgcgaccgcacggaagctgaccgtgcaccttcggcctcccgcatcttgcgacctggaaattagccttcgcggagtaaaactctctctgtccgggggtggacccgaattccagcgttgctcacacttcttccaaatgaaaaatattagcttttgcggctgtcatccgagaaactcgtgttattttggattcatcaccaagcatcccctgctttcaaggtttgcctgccatgtgtttgttagccaggaaagtatgagacccgtcgctcagagtgttggaagggcgtttttggagtactaccaggagcatctggcttacgcctgccccactgaggatatttacctggagtag

SEQ ID NO: 230939 - DNA, 1149 bp, synthetic construct
  misc_feature 1..1149: note = Description of Artificial Sequence: Synthetic coding sequence
  source 1..1149: mol_type = other DNA
atgtcagactccaaatgcgattctcagttttattctgtccaggtggccgactccacttttaccgtattaaagcggtaccagcaattaaagcctattggttctggggctcaggggattgtctgtgctgccttcgacactgtacttgggataaatgtggctgttaagaaactgtctcggccattccagaaccaaacccatgctaagcgggcataccgggaactcgtcctgctgaagtgtgtcaatcataaaaatattataagcctactgaatgtgttcactccacagaaaacccttgaagaattccaggacgtctatctggtcatggaactgatggacgcaaacctttgccaagtcattcacatggagcttgaccacgaacggatgtcctatctgctttatcagatgctatgtggcataaaacacttacactcagccggaattatacacagggacctaaaaccctccaacattgtcgtcaaatcggactgcaccctgaaaattctcgactttgggctcgccagaactgcatgtactaacttcatgatgacaccttacgtcgtaacccgctactaccgggctcctgaggtcatactcggaatgggctacaaagagaatgtcgatatatggtctgtgggatgtattatggctgaaatggtgctgcacaaagttctgttccctgggagggactatatagatcaatggaataaagtgatagagcaacttgggacaccaagcgcggaatttatgaagaagcttcaacccaccgtacggaattacgtagagaacagacccaaatatccgggtattaagtttgaggagttattccctgattggatcttcccatcagagagcgagcgagacaagattaagacttcccaggctagggacttgctgagcaaaatgttggttatcgacccggataaacggatctccgttgatgaagctctgaggcacccatacattaccgtgtggtacgatcccgcagaagctgaggccccaccgccacaaatctacgacgcccagctggaggagcgggaacatgctatcgaggaatggaaagaactgatttacaaggaggtgatggactgggaagaaaggtccaagaatggtgtcgtcaaggatcagcctagtgctcaaatgcagcagtag

SEQ ID NO: 230940 - DNA, 1149 bp, synthetic construct
  misc_feature 1..1149: note = Description of Artificial Sequence: Synthetic coding sequence
  source 1..1149: mol_type = other DNA
atgtcggactccaaatgcgatagtcagttttactctgtccaagtggcagatagtaccttcaccgtgctcaagcgttatcagcagcttaagccaatcggatctggcgcacagggtatcgtgtgcgcagcatttgacactgtgcttgggataaacgttgctgtcaagaagctgagccggccatttcaaaatcaaacacatgcaaaaagggcctaccgagagctcgtccttctcaaatgcgtaaatcataaaaatatcattagcttgttgaacgttttcactccgcaaaaaactctggaggagtttcaagacgtgtacttggttatggagctgatggacgccaatttgtgtcaggtcatacacatggagctggatcacgaacgcatgtcataccttctataccagatgctttgcgggatcaaacacttgcacagtgcgggtatcatccatcgcgatctcaagccatccaacatagttgtcaagtccgactgtaccctcaaaatcctagactttgggctggctaggacggcctgtacaaattttatgatgaccccctatgttgtcacgcgatactaccgcgcaccggaggtgattctaggcatgggatacaaagagaacgtggatatttggtccgtcgggtgcatcatgggagaacttgtcaaggggtgcgtgattttccagggcaccgaccatatcgaccaatggaacaaagttatcgagcagctcgggacacccagtgcggaattcatgaaaaaattgcaacctaccgtcaggaactacgtggagaaccggccaaaatatcccggaatcaaatttgaggaactcttccctgattggatcttcccaagtgaatccgagcgagacaagatcaagacgagccaagcccgtgacctattatcaaagatgctcgttattgaccccgataagcgcatctcggttgatgaggcactgcgtcatccttacataaccgtatggtacgatcctgccgaggcggaggcacccccaccacagatttacgacgcccagcttgaagagcgggagcatgccatcgaggaatggaaggagctaatttataaagaagtaatggactgggaggagcgcagcaagaatggtgtggtgaaagatcagccctcagctcaaatgcagcaatag

SEQ ID NO: 230941 - DNA, 375 bp, synthetic construct
  misc_feature 1..375: note = Description of Artificial Sequence: Synthetic coding sequence
  source 1..375: mol_type = other DNA
atgtcggatagcaaatgcgatagccagttttatagtgtccaggtggctgattcaaccttcaccgtgttgaaacgctatcagcagctcaagcccattgggagcggggctcaaggaattgtgtggcgccaccattgctctgctctcccctttatagggagaatgaggcctgtttcagtgatcgtaactccttggatcaatcaggagggcatgctgtgcgaggggctggggtggccatccctgccctggtgtctgacaagtactgtttgcccagcccaaaatgttaggatagtctcccttacgctgaacgtttcactgctgcatggaaagacagtgtccagacgaagcatcaccggccagctcaaatgttgcatatag

SEQ ID NO: 230942 - DNA, 729 bp, synthetic construct
  misc_feature 1..729: note = Description of Artificial Sequence: Synthetic coding sequence
  source 1..729: mol_type = other DNA
atgtcggactcaaagtgcgactcacaattttactccgtgcaggtggccgactccactttcactgtgctcaaacggtaccagcagttaaagcctattggatccggtgcccagggcatagtctgcgctgcttttgacacagttctgggcatcaacgttgccgtgaaaaaactctcgcgcccttttcagaaccagacgcacgctaagagagcctatcgcgagctggttctcctgaaatgcgtaaaccacaagaacattatctcattgctcaacgtgtttactcctcagaagaccctggaggaattccaagacgtctacctggtcatggagctgatggacgctaatctctgtcaggtgatccacatggagctcgaccacgagcgcatgagttatctcctctatcagatgctgtgcggaattaaacacctacacagtgcgggaatcatccatagagatctaaagccttccaacatcgtcgtgaagtctgactgtacgcttaaaatactggactttggactcgcaagaactgcatgtacgaactttatgatgacaccttacgtggtgactagatattaccgtgcacccgaagttatattgggcatggggtataaggaaaacgttgacatctggtcagtgggctgcatcatgggtgagctggtgaagggttgtgtcatctttcaaggcaccgaccggatcctgccccgagaccttggacccgcaatgctgagttag

SEQ ID NO: 230943 - DNA, 1275 bp, synthetic construct
  misc_feature 1..1275: note = Description of Artificial Sequence: Synthetic coding sequence
  source 1..1275: mol_type = other DNA
atgagtgatagtaagtgtgactcacagttttacagtgtacaggtcgctgatagcaccttcaccgtgctgaagagataccaacagttgaagccaatcgggtcgggtgctcaaggtattgtttgcgcagcctttgacactgttctggggataaacgttgccgtgaaaaaactcagtcgtccatttcagaatcaaacccatgcaaagcgggcttacagggaactcgttttactgaagtgcgtcaatcacaaaaacataatctcactccttaacgtattcacaccccagaaaaccctcgaggagtttcaagacgtatacctggttatggagttaatggatgccaacctgtgccaggtcatccacatggaactcgaccacgagagaatgagctacttgctgtaccaaatgctgtgcgggataaaacatctccatagcgcagggattattcatagggatctgaaaccatccaatatcgtggttaagtccgattgcaccctcaaaatccttgatttcggcctggcccgaacagcctgtaccaatttcatgatgactccatacgttgtcacgagatactaccgcgctccggaggtgatcctcggtatgggctacaaggagaacgttgacatctggagtgttggttgcatcatgggtgagcttgttaaaggttgcgtcatctttcaggggaccgatcacattgaccagtggaataaggtgattgaacagctggggactccttccgccgagttcatgaaaaaactccagcccacagtccggaactatgttgagaacagaccgaaatatccaggaattaagtttgaagagctctttccagactggatttttccgtccgagtcagagcgcgacaaaataaaaacatcgcaggcgagggacctcctgtctaaaatgctggtaatcgacccagataagcggatctccgtggatgaagcattgcgccatccctacataacagtgtggtatgatcctgcagaggccgaagcacccccaccccaaatttatgatgcccagcttgaggaacgagaacatgcaatagaagagtggaaagaattgatttacaaggaagttatggactgggaagagagatcgaagaatggtgtggtcaaagaccagccttctgacgcggctgtgagtagtaatgccaccccatcacagagcagttcaattaatgacatcagctctatgtcgacagagcaaactttagcaagcgatactgacagcagtctcgatgctagcaccggcccattggaggggtgtagatag

SEQ ID NO: 230944 - DNA, 1275 bp, synthetic construct
  misc_feature 1..1275: note = Description of Artificial Sequence: Synthetic coding sequence
  source 1..1275: mol_type = other DNA
atgagcgacagcaagtgcgactcccagttctattcggtccaagtagccgacagtacctttaccgtgctgaagagataccagcaattgaaacctatcggatcaggagcccaaggaatcgtgtgtgcggcattcgacacagtcctcggaattaacgtggccgttaagaagttaagtcgaccatttcaaaaccaaacacacgctaaacgtgcttaccgggaattggtgctgcttaaatgtgttaaccataaaaacattatatctctgctgaacgtcttcacacctcaaaaaaccctggaagagttccaggatgtgtatttggtgatggagctgatggacgcaaacctgtgtcaggtgatccacatggagcttgatcacgagcggatgtcttacctgctgtatcagatgctatgcggcataaagcatcttcattcagccggaatcatccaccgtgacctgaaacccagcaatatcgtggtgaaaagcgactgcacgttgaagatattagatttcggcctggccagaactgcctgtaccaactttatgatgaccccatacgtagttacccgatattatcgcgctcctgaagttattttaggcatgggttacaaagagaatgtggacatatggagcgttggctgcataatggccgagatggtcctacacaaagtgctgttccctggaagggactatatcgatcaatggaacaaggtgattgaacagctgggcacaccaagtgcagaattcatgaaaaaactccaacctaccgtcagaaactacgtggagaataggcccaagtatcctggaatcaagtttgaggaattattccccgactggatttttccttccgagtcagagcgagataagatcaagacctcccaggcaagagacttgctgtctaagatgctcgtgatcgacccagataagagaatctctgtagacgaggctctgaggcacccgtacattacggtgtggtacgaccccgctgaggcagaggcaccgcctcctcagatctacgacgcccagttagaggaaagagagcatgctattgaagagtggaaagagcttatatataaagaggtcatggattgggaagagcgctctaaaaacggtgttgtgaaggatcagccatctgatgcagctgtaagctctaacgccactccgtcccagtcatcaagcatcaatgacatcagttcgatgtccacagagcagacactcgccagtgacacagatagttccctcgatgcttccactgggccactcgaaggttgccggtag

SEQ ID NO: 230945 - DNA, 315 bp, synthetic construct
  misc_feature 1..315: note = Description of Artificial Sequence: Synthetic coding sequence
  source 1..315: mol_type = other DNA
atgtctgattccaagtgtgactcccaattttatagcgtgcaggttgccgacagcacatttactgttctcaaacgatatcagcagctcaaaccaattgggagcggagctcaggggatcgtgtgcgcggcattcgatacagtccttggtatcaacgttgccgtcaaaaagctgagcaggccttttcaaaaccagactcacgccaaaagggcgtaccgggagctagtgctgttaaaatgtgtgaaccataaaaatataatttcattgttaaacgtgttcaccccccagaagaccctagaagagtttcaggatgtgtag

SEQ ID NO: 230946 - DNA, 645 bp, synthetic construct
  misc_feature 1..645: note = Description of Artificial Sequence: Synthetic coding sequence
  source 1..645: mol_type = other DNA
atgtcagattcaaagtgcgactctcagttttattcggtgcaggtggcagacagcacatttaccgtgcttaagcgttaccaacagctgaagcccattggatctggggctcagggcatagtgtgtgccgcatttgataccgtgttgggtatcaacgtagccgtcaagaagctgtctagaccctttcagaaccagacccacgccaagcgggcttacagagagctggtcctgctgaaatgtgtaaatcacaaaaatataatatcactcttgaacgtgtttactccacagaagacccttgaggagtttcaggatgtgtacctggttatggaactgatggacgctaatctgtgccaagtgattcacatggaattggaccatgaacgaatgagctacttgttataccaaatgctctgcggaatcaaacacctgcatagcgccggtattattcatcgagatctgaagccatctaacattgtggtgaaatctgactgcacactgaaaattctggacttcggactcgcaagaactgcttgcacgaatttcatgatgacgccttacgtcgtcacacgttactaccgcgctccagaggtcattcttggcatgggctacaaggagaatgccatcaaatactggaccctctggcattag

SEQ ID NO: 230947 - DNA, 1347 bp, synthetic construct
  misc_feature 1..1347: note = Description of Artificial Sequence: Synthetic coding sequence
  source 1..1347: mol_type = other DNA
atgctgtggttggcgttagggcctttcccagccatggagaaccaagttcttgtgatcaggatcaagatccccaacagcggcgctgtagactggacggtgcactccggccctcaattgttgttccgggacgttttagatgttatcggacaggtgttgcccgaagccaccacaacggcattcgaatacgaagatgaggatggcgatcgaatcactgtgaggtcagatgaggaaatgaaggccatgttgtcctattactactccacagtgatggaacagcaggttaatgggcaattgatagagcctctacagatctttccccgagcctgtaaacctccaggcgaaagaaacattcatggacttaaggtcaatacccgcgcagggccttcacagcatagctctcctgcagttagcgattcattaccttcaaactctttgaaaaagtcatccgctgaactgaagaaaatcctggctaatggacagatgaatgaacaggatatacgctaccgagataccttgggacacggaaatggaggtaccgtgtacaaagcctaccatgtgccgtctggtaagattctcgccgtaaaggtgattcttcttgatatcacactggaactgcagaagcagatcatgagtgaacttgagatactttacaaatgtgattcctcctacataattgggttctacggagcttttttcgtagagaataggattagcatctgcacggagtttatggatgggggatcgctagatgtatatcgcaaaatgccggaacacgtcctgggccgtattgccgtcgccgtcgtaaaaggcctcacatatctgtggagtttgaagatcttacaccgcgacgtgaagccttcaaatatgctggtgaatactcgcggacaggtgaagctgtgtgatttcggtgtctctacacagctcgtgaacagtatcgctaagacatacgtgggaacaaatgcttacatggcgccagagagaatcagtggtgaacagtacgggattcattcagatgtctggtctttagggatctccttcatggagctagcgctaggcagattcccatacccacagattcagaaaaaccagggatcactcatgcccctccagctcttgcaatgcatcgtcgatgaggattcccctgtgttgccagtgggggagttctctgagcccttcgttcacttcattacacagtgtatgcgcaaacagcccaaagaacggcctgcccctgaagagctgatgggccatcctttcattgttcaattcaacgacggcaatgctgcagtggtgagtatgtgggtgtgccgggctctagaggagcggagatctcaacaaggacctccctag

SEQ ID NO: 230948 - DNA, 1317 bp, synthetic construct
  misc_feature 1..1317: note = Description of Artificial Sequence: Synthetic coding sequence
  source 1..1317: mol_type = other DNA
atgctctggctcgcactgggtcctttccctgcaatggagaaccaggtgctggttatccggataaagattcctaatagcggagccgtagattggaccgtccactccgggcctcaactgctgttcagagatgtcctggatgtaattggacaggtgctgccggaagccaccactaccgcttttgaatacgaggacgaggacggagacaggataacagtgagatccgacgaggagatgaaagctatgctgtcttattattacagtactgtgatggagcagcaggtgaatggtcagctcatagagccactccaaatcttccctcgggcatgcaagccaccaggagagagaaatattcatggtctgaaagtgaataccagggctggtccgtcccagcactcttctcctgctgtttccgacagtctcccatcaaatagtcttaagaaatcaagcgccgagttaaaaaagattttggctaacggccagatgaacgagcaggatataaggtacagagacacgctcggccacggaaacggcggaactgtttataaagcctaccacgtaccgagcgggaaaatcctggcagttaaagtgatactcctggacataacgctggaacttcagaagcagataatgtcagagctggagatcctatacaaatgtgactcaagctatattattggattttacggagccttttttgtagaaaatcgtatctccatatgcacggagtttatggacggcggaagcctggacgtgtacaggaaaatgccggagcacgtgcttgggaggatcgctgtcgcggtggtgaagggcttgacatacctctggagtctgaagatcctgcatcgggacgtgaaaccttccaacatgctagttaatacccggggtcaggtaaagctgtgcgattttggagtgagcacccagctcgtcaactccatagccaagacctatgtcggtactaatgcttacatggccccagagaggatctccggcgaacagtacggaatccactccgacgtgtggagtctgggaatctccttcatggagattcagaaaaaccaggggtcattgatgccactacaactcttgcagtgcatcgtcgatgaagactcgccagtacttccagtgggagagtttagcgaaccattcgtgcattttatcacccagtgcatgcgcaagcagcctaaggagcgccctgcacccgaagaactcatgggacacccatttattgtccagttcaacgacggcaatgccgcagtggtttcaatgtgggtttgcagagccctggaagagcgaaggtcccagcaggggccaccatag

SEQ ID NO: 230949 - DNA, 1335 bp, synthetic construct
  misc_feature 1..1335: note = Description of Artificial Sequence: Synthetic coding sequence
  source 1..1335: mol_type = other DNA
atgctgtggctggctctgggtcccttcccagccatggagaatcaggtgctggtgataagaataaagatcccaaattccggagctgtcgattggacggtgcactcgggacctcagctgctattcagggatgtgttggatgtcattggtcaggtgcttccggaagcgacaactacagccttcgagtatgaggacgaggatggagacaggattacagtgagatctgacgaggagatgaaagccatgctaagctactattattccacagttatggagcagcaggtcaacggccagctcattgagcccctccagatcttccctcgagcctgcaaaccaccgggtgaacgtaatatccacggcctgaaagtgaacacacgcgctggaccctcccaacattcatctcccgcagtgtctgattctctaccaagtaactctctcaagaagagctcggctgagttaaagaaaatcctggccaatggacaaatgaacgaacaagacattcgatacagggacaccttaggtcatggcaatgggggaaccgtgtacaaggcataccacgtgccctccgggaagatccttgccgtgaaggtcatacttttagatatcaccctcgagctgcagaagcagattatgtccgagctggaaatcctctacaagtgtgactcgtcatacatcatcggcttttatggggcatttttcgttgaaaataggataagtatatgcaccgagttcatggatggaggttcgcttgatgtgtatcgtaagatgcccgagcacgtgttagggagaatcgctgtggcggtggtgaagggtctgacgtatctttggagcctcaagatcctgcaccgggacgtgaaaccttccaatatgctcgtcaacactcgcggtcaggtcaagttatgcgattttggagtttcaacccagctagttaactccatcgccaagacctacgtggggacaaatgcctatatggcacccgagcggatctccggcgaacaatatggcatccacagtgatgtgtggagcctcggcatttcctttatggaaatccagaaaaatcagggctccctgatgcctctgcagctcctccagtgcattgtggacgaagactcccctgtgctgcctgtaggggagttctctgagcccttcgtccattttataacccagtgcatgcggaagcaacctaaggaacggcctgctcctgaggagctgatgggtcatccgtttatcgtccagttcaacgacgggaacgccgctgttgtaagcatgtgggtctgccgagccttagaagagcggaggtcgcccgcaagtttaccctccccaagctcttccatttag

SEQ ID NO: 230950 - DNA, 1239 bp, synthetic construct
  misc_feature 1..1239: note = Description of Artificial Sequence: Synthetic coding sequence
  source 1..1239: mol_type = other DNA
atgatggaaggccattttcctcagtccgacgtaatcggacaggttttgcctgaagccacaactactgctttcgaatatgaggacgaggacggggacaggatcactgtgcgcagtgatgaggagatgaaggccatgttatcctactactacagcacagtcatggagcagcaggtaaacggacagttgatcgaaccactacagatcttcccaagagcttgtaagcctcctggggaaagaaacattcatggactgaaagtcaatacccgcgctggccctagccagcatagttctcccgcagtaagtgactccctcccctctaacagcctgaagaaatcctccgcagaacttaagaagattctagccaacggccagatgaatgagcaggacatccgatacagggacactcttggtcacggtaacgggggtactgtgtacaaggcctaccacgtcccaagtgggaagatcctggcagtgaaagtgattctgttggatatcaccctggagctccagaagcagatcatgagtgagctcgagattttgtataaatgcgactcatcatacattattggattctatggcgctttttttgtcgagaatagaatctcaatatgcaccgaatttatggacgggggtagcctggatgtgtaccgcaagatgcctgaacatgtgctgggtagaattgcagtagccgttgtgaaaggcctgacatacctatggagcctgaaaatcttacaccgggacgtgaaaccaagtaatatgctcgtgaatacccgcggacaagtgaagttatgcgacttcggagtcagtacccagctagtcaatagcatcgctaagacctacgtcggaacaaacgcctatatggcgcctgagaggatcagcggcgaacaatatggcattcactccgatgtttggtccctgggaatctcttttatggaactggccttgggcagatttccatatccccagatccagaaaaaccagggaagtttgatgcctctccagctcctacaatgcatcgtggatgaggactccccagtacttcccgtgggagagttctcagagccattcgtgcactttattactcagtgcatgcgaaagcagcccaaggagcgacctgcccctgaggagctgatgggtcaccctttcatcgttcagttcaacgacgggaatgccgctgtggtctctatgtgggtgtgccgggctttggaagaacgcagatctcagcagggtccaccatag

SEQ ID NO: 230951 - DNA, 1005 bp, synthetic construct
  misc_feature 1..1005: note = Description of Artificial Sequence: Synthetic coding sequence
  source 1..1005: mol_type = other DNA
atgagccagtctaaaggaaagaaaagaaatcccggtcttaagattcccaaggaggccttcgagcagccacaaacctcctctaccccgcctcgcgatttggacagtaaggcctgtatctccataggcaatcaaaacttcgaggtgaaggccgatgatcttgaaccaattatggaactggggcgaggggcttacggggtagtggaaaaaatgcggcacgtgccttctggtcaaatcatggccgttaagcgcattcgcgcaactgttaactcccaggagcagaagcgtctcctcatggatctcgatatttcgatgcggacagtggattgcccattcacggtgacgttttacggtgccctgtttcgcgagggtgacgtctggatttgcatggagcttatggatactagcctagacaaattttacaaacaggtgattgacaaaggacagacgatacctgaggatatcctaggaaagattgcagtgtccatagtcaaagcacttgaacatctgcactccaaactgagcgtgatacatcgagacgtgaaaccatctaatgtgctgattaatgccctgggccaggtgaagatgtgcgattttggaatatctggataccttgtcgattcggtagccaagaccatcgacgccggatgcaagccctatatggcccctgagaggatcaacccagagttgaatcagaagggttactctgttaaatctgacatatggtccctcgggatcacaatgatcgagctggctatcctacgtttcccctacgactcttggggcacaccgtttcaacagcttaagcaggtggtggaagagccaagccctcagctcccagcagataaattctctgcagagtttgtcgatttcactagtcagtgcctcaagaagaatagtaaggagaggcccacgtaccctgagctgatgcaacaccccttcttcactcttcatgaaagtaaaggcaccgacgtggcaagcttcgtgaaactgatactgggcgattag

SEQ ID NO: 230952 - DNA, 1005 bp, synthetic construct
  misc_feature 1..1005: note = Description of Artificial Sequence: Synthetic coding sequence
  source 1..1005: mol_type = other DNA
atgagccagagtaagggcaaaaaacggaaccccggattgaaaattcctaaagaagcttttgaacagccccagacaagttcgacgccaccaagggatctggactcaaaggcttgcatctctataggcaaccagaactttgaggtgaaagcagatgacctggagccaatcatggagctggggaggggggcatacggcgtggtggagaaaatgcgccatgtgcctagtggtcaaattatggccgtgaagagaattagagcgacagtgaattctcaagagcaaaagcggctgctcatggacctcgatatctccatgcgcaccgtggactgtccatttactgtgactttttacggagcgctgtttcgcgaaggagatgtctggatctgcatggagctgatggacacttcccttgacaagttttataagcaggtaatcgataaagggcagaccataccggaggatatcttggggaaaatagcagtctctatcgtgaaagctctagagcatctgcactcaaaattgtctgtgatccaccgggatgttaaacctagtaacgtcctaattaacgctctgggccaggtaaagatgtgtgactttggtatctccggctacctagtcgattctgtggcgaagacaatagatgctggctgtaagccatatatggcccctgagagaattaatcccgagttaaaccagaagggctatagcgttaagtccgatatatggtctttaggtatcaccatgatagaactggcaatcctgcgatttccttacgattcttggggaacgccctttcagcaattaaagcaggtggtggaagagccgtcgccgcagctgccagccgacaagttctccgccgagtttgtggactttacctcacagtgtctgaaaaagaacagtaaggagaggcccacttaccctgagctcatgcaacatcctttcttcaccctgcacgaaagcaaggggactgacgtggcatcttttgtaaagctgatcctgggggattag

SEQ ID NO: 230953 - DNA, 2865 bp, synthetic construct
  misc_feature 1..2865: note = Description of Artificial Sequence: Synthetic coding sequence
  source 1..2865: mol_type = other DNA
atggaggaagaggagggtgcggtagctaaggaatggggtacaacgccagctggcccagtgtggactgccgtattcgactatgaagccgcaggagatgaggagttgaccctgcgacgcggagacagggtgcaggttctttcacaagactgcgccgtgtcaggggacgaggggtggtggaccggtcaattgcctagcgggcgagtcggagtgttcccttctaattacgtcgcccctggcgctccggctgccccagcaggtcttcaactgccccaggaaattccctttcacgagctgcagctagaagagataatcggagtaggcggattcggcaaggtctatcgggcactctggcgcggagaggaggtcgccgtgaaggctgccagactggatcctgagaaggaccctgccgtgacagcagaacaagtgtgccaggaagccagattgtttggggcactgcaacacccaaatatcattgcgctgaggggcgcttgtctaaatccaccacacctgtgccttgtgatggagtacgcaaggggcggagctctctcgagagttctggcaggacgacgggtgcctccgcatgttctcgtaaactgggcagtgcaggtcgcacggggtatgaactacctgcacaacgacgccccagtccccatcattcaccgggacctcaaatctatcaacattctcattctggaagccatcgagaaccataacctcgcagatactgtgctgaagattactgactttgggctagccagggaatggcacaagacaaccaaaatgagcgccgcaggcacctacgcctggatggccccagaggttataaggcttagcttatttagcaagtcatcggacgtttggtctttcggagtgttactctgggaacttctgaccggggaagtcccctacagagagattgatgctctggctgttgcctacggggtggcgatgaataagctgactctgccaataccttccacctgcccggagccctttgcaagacttctggaagagtgctgggacccggatccgcacggtagacctgattttggcagcattctgaagaggctcgaagtgatcgagcagtccgccctctttcagatgcccctggagtccttccactcactgcaggaagactggaaactggaaattcaacacatgtttgacgatcttcgtaccaaggaaaaggaacttaggagccgggaagaggaactgctgagggccgctcaggaacaaagatttcaggaggaacagctgagacggagagaacaggagctggctgaacgcgagatggacattgtagagcgggaactgcacttactgatgtgccaattgtctcaggaaaaaccgagagtacggaaacgcaaggggaacttcaagcgaagccgactgctcaaacttcgggagggcggaagtcacatctctcttccatctgggtttgagcataagataaccgtgcaggctagccctacgctcgataagcgaaagggaagcgatggggcttcaccccctgcaagcccatccataatcccacggctgcgcgctattcgtctaacccctgtcgattgcggaggctcttccagtggtagctcatccgggggttcaggcacttggtccagggggggaccacctaagaaggaggagcttgttggcggtaagaagaagggaaggacctggggaccctcttctactcttcaaaaggagagagtgggcggagaagaacggttgaaggggctgggagaagggtcaaaacagtggtcctcctcggcaccgaacctagggaaatctcccaagcacaccccgattgcgcctggattcgcttccttgaacgaaatggaggagtttgccgaggcagaggacggtgggagctccgtgcctccctctccttacagcaccccctcttacctctccgtgccactgccagcggaaccctccccgggtgctcgggctccctgggagcctacgccctcagcaccacctgccagatggggccacggtgcacgtaggcgttgtgatctcgccctcctagggtgtgcaactctgcttggagcggttgggctcggcgctgacgtagctgaggccagagcagccgatggtgaggagcaacgaagatggttggacggcttgttcttcccaagggctggcagattcccgcgaggcctgagtccccctgctagaccccacggcagaagggaagatgtcggtcccggactaggcctggctccgtccgcaaccctcgtatctttgagtagtgtgagtgattgcaatagcactaggtctcttctaagaagtgactcagatgaagctgcacccgcagctccgtccccacctccctcaccaccagcaccaacgcctacaccttcgccaagtaccaaccctttggtggatctcgagttagaaagtttcaagaaggatcctcgacaaagcctgacccctacacatgtaaccgcagcctgtgccgtcagtcgcggtcacagaaggacgccatctgatggggctctcgggcagcgcggaccaccagaacccgcaggacacggtcctggcccacgggacctgctagactttcccagactgcccgatccccaggccctgttcccagctcgtagacgcccacccgaattcccaggacgacccacaacacttactttcgcccctagacctaggccggctgccagccgtccacgattagacccatggaaactggtatcattcggtagaaccctcacgatctctcctccatctcgccctgatacgcctgagtcccccggacccccttccgtacaacctacgcttttagacatggacatggaaggccagaatcaggattctaccgtgccgttgtgcggagcccatggctcccactag

SEQ ID NO: 230954 - DNA, 2544 bp, synthetic construct
  misc_feature 1..2544: note = Description of Artificial Sequence: Synthetic coding sequence
  source 1..2544: mol_type = other DNA
atggaacccctgaaaagcctgtttctgaaatcacccttgggatcctggaatggctctggttctggtgggggagggggtggcggtggtgggagaccagaagggagtcctaaggctgccggatatgctaatcctgtgtggacagcgctgttcgactacgagccgtctggacaggacgaactggcattaaggaaaggagacagagtagaagttctgtcacgcgatgcggctatatcaggagacgaaggatggtgggccggtcaagtaggcggacaggttggaatcttcccatcaaactatgtttctcggggaggcggacctcccccatgtgaagtggcgagcttccaggaactgagacttgaagaggtgatcggaatcgggggatttggaaaagtttacagagggagctggaggggggagctggtcgctgtaaaagcagccagacaggacccggatgaggacatctctgttactgctgaaagcgttagacaggaggccagactctttgcaatgcttgctcaccctaatattatcgctcttaaagcagtgtgtctggaagagccgaatctgtgtctagtcatggagtatgctgcgggaggtccccttagtcgggcattggccggtagaagggtgcccccacatgtcctggtcaattgggccgtgcagattgccagaggcatgcactatcttcattgtgaagccctggtcccagtgatccacagggacctaaaatctaataatattctgctgttgcagcctatcgaatctgatgacatggaacacaaaaccctgaaaatcactgacttcgggctagctagggagtggcataagacaacccagatgagtgctgctgggacgtacgcttggatggccccagaggtaattaaggcttctactttttctaagggcagcgacgtatggtcgtttggcgttctgttgtgggagctactgactggcgaggtgccctatcgtgggatcgactgtctcgcggttgcatacggcgtggccgtaaataagcttactctgcccataccttccacctgcccagagccctttgcccagctcatggcggactgctgggcccaagaccctcaccggagaccggattttgcatccatcctgcagcaactggaggctctggaggcccaagtgctgcgagagatgccacgcgatagttttcactccatgcaggagggatggaagcgtgagatccaaggactgttcgatgagcttcgcgcaaaggagaaagaactcctctctagagaagaagaactgacacgagctgcaagagagcagagatcacaggctgaacagctgaggcggcgagagcacctgctcgcgcagtgggaattagaagtgtttgagcgggagctcacgctgctgttacagcaggttgatagggaacggcctcacgtgcggaggcgcaggggaaccttcaagaggagcaagttgagggcccgtgacggtggtgaaagaatttccatgcctctcgacttcaaacacagaattaccgtgcaggccagcccagggctcgatagacggaggaacgtttttgaggtgggtccgggtgattctcctacctttcctaggttcagagccattcagctagagccggcagagccgggacaggcctgggggagacaaagccctcgcagactcgaagattcatccaacggagaaagaagagcatgttgggcctggggtccatcttctcccaagcccggtgaggcccagaacggtcgaaggcggtcgcggatggacgaggctacgtggtacctggactccgatgactccagtccactgggctccccttccacaccgcctgccctcaacggaaatcctcctcggccttccctggagccagaagagcccaagagaccagtccctgccgaaagaggttcatcctcagggacgcctaaactgatccagagggctctgcttaggggtaccgctctgctggcctccttgggcctgggtagggacctgcagccgccaggcggtcctggtcgggaacggggagaatcacccaccactcctcctacccctaccccggctccttgtcctactgaaccccctccatcgccattgatctgcttcagtttgaaaaccccagacagcccacccacgccagctcccttgctgttggatttagggatcccggtggggcagcgtagtgcaaagtccccccgaagagaggaagaaccacgaggtgggactgtgtccccacctcctggtaccagcagatcggcaccaggcactcccggaacccctagatcccctccactgggtttgatctccaggcccaggccatctcctctccggagccgaatcgacccttggtctttcgtttctgccggacctcgtccctctcctctgccttccccacaacccgctcctaggcgtgccccatggactttattcccggattccgaccccttttgggacagccctcctgcaaacccatttcaaggaggcccacaggattgtcgggctcagaccaaggacatgggggctcaggccccatgggtaccggaagccggtccctag

SEQ ID NO: 230955 - DNA, 1773 bp, synthetic construct
  misc_feature 1..1773: note = Description of Artificial Sequence: Synthetic coding sequence
  source 1..1773: mol_type = other DNA
atggaacacaagaccctaaagattacggacttcggacttgcaagggagtggcataaaaccactcagatgagcgcggctggcacctacgcctggatggccccagaagttattaaagcatcgacttttagtaagggctcagacgtgtggagtttcggcgtgcttctctgggaactcctgacaggcgaagtgccatataggggcattgactgcctcgctgtggcctatggggttgccgtgaacaaactgacccttccgattccttcgacatgccctgaaccgtttgcgcaactgatggccgattgctgggcccaagacccccaccggaggcccgatttcgccagtatcttgcagcaactagaagcattggaggcacaggtgcttagagaaatgccacgtgatagtttccattccatgcaggagggctggaaacgagagatccagggcctgtttgacgagttgcgggcaaaagagaaggaattgttgtctcgggaagaggagctgactagagccgcacgtgaacagagatcccaagcagaacagctccgtaggcgagagcacctgctggcgcagtgggaactggaagtttttgagagggagttgacgctcttactgcaacaggtggatcgcgagaggccacatgtgcgcaggagacgtgggacgttcaagcggagcaaattgcgggcacgtgatggtggcgagcggatcagtatgccccttgatttcaagcaccggatcaccgtacaggcttcgcctggactcgatcggaggagaaacgtgttcgaagttggcccaggagatagtccgactttccctcgcttcagagccatccaactggaaccagccgaacctggccaggcctggggcaggcaatctccaagacggcttgaagacagttctaatggtgaacggcgtgcctgctgggcgtggggaccctcctcccccaagcctggtgaggcacaaaacggaaggcgccgttctcggatggatgaagcaacatggtacctggatagcgatgatagttctcctctcggttcacccagcacaccccctgccttgaacggcaatccccctcgcccttccctcgaaccagaagagcctaagcgcccagtgcctgccgaacgtggctcctcttcaggcactcccaagttgatccaacgggctttgctgaggggaacagctctcctagcgtcactagggctgggcagggatcttcaacctcccggaggacccggacgggagagaggtgaatctcctacgactccgcctactcctacgcccgcaccgtgtcctacagagcctccccctagtcccttgatttgcttctccctgaagacccccgattccccgccaaccccagcccctctgctgctggacctcggaatccctgtcggccagcgttcagccaagagtccaaggcgcgaggaggaacccagaggcggaaccgtcagcccgccacccggtacctccagatcagctccagggacgcctggaacgccgaggagtcccccacttggtctgattagccgacctagaccctctcctcttagaagtagaattgatccctggtcgtttgtgagcgccggtcccaggccatcaccacttccgagccctcagcctgccccaagacgcgctccctggacgctgtttcctgacagtgatcccttttgggactcacctccagcaaatccgttccagggagggcctcaagactgccgggctcaaaccaaggacatgggtgcccaggccccatgggtccctgaggccggaccatag

SEQ ID NO: 230956 - DNA, 2580 bp, synthetic construct
  misc_feature 1..2580: note = Description of Artificial Sequence: Synthetic coding sequence
  source 1..2580: mol_type = other DNA
atggcctgcctacacgagaccagaactccgtcccccagcttcggcggttttgtgagcacattgagtgaggccagcatgaggaagctggacccagatacctctgactgcaccccagagaaggacctgactcctacacatgtgttgcagctccacgaacaggacgccggtggcccagggggagcagccggatcccccgagtcaagagcgtcaagagttcgagccgatgaggtgcgtctgcagtgtcagtccgggtcaggatttctagagggcctgttcgggtgtttgagaccagtctggacaatgatagggaaggcctatagcacggagcataagcagcagcaggaagacctatgggaagtgcccttcgaggaaattctggacctgcagtgggtgggatctggagcacagggagccgtctttctgggaagattccacggggaagaagtggctgtgaaaaaagtgagggacctgaaggaaaccgacattaaacatctgaggaaactcaaacaccccaatatcattacctttaagggggtgtgcacccaggctccgtgctactgtattctgatggagttttgcgctcagggacagctctacgaggtgcttagggccggtcggcctgtcactcctagcctgctagtggactggagtatgggcattgccggaggaatgaactatctgcacctgcacaagatcattcatagagacctgaagtcacccaacatgctgataacgtatgatgatgtggtgaaaatttctgattttgggacctccaaggagctgtccgacaaaagcactaagatgtcttttgctggaaccgtcgcctggatggctcctgaagtgattcgtaacgaacccgtgtctgaaaaggttgacatttggtcttttggcgtggtgctatgggagctcctgactggcgagattccctataaggatgtcgacagcagcgccatcatttggggtgtggggtcaaattcgttacacttgcctgtgccttcaagctgtccagacggatttaaaatactgctgagacagtgctggaacagcaagcccagaaaccggccaagctttaggcagatcctgctccatcttgatatcgcgtctgccgacgttctctcaaccccccaggaaacgtatttcaagtcccaggccgagtggagggaggaggtgaagctccactttgagaaaatcaaatcagaaggcacttgtctccaccgccttgaagaagagctggtgatgaggagaagggaagaacttaggcacgccctggatatcagggagcattacgagaggaaactggaaagagccaacaatctgtatatggagctgaacgctctgatgctgcaactagaactgaaagaacgggagctgttacggagagagcaggctcttgaaagaagatgtcccggacttttaaaacctcacccaagccggggtctccttcacggcaacaccatggaaaaattgatcaaaaaacggaatgtgccccagaaactgtctccacattctaagcgccctgacatcctcaaaacggaaagccttctgccaaaactcgatgcggcactttccggagtggggctgcccggatgccccaaggggccaccttcccccggtcgttcccggagggggaagacacgccaccgtaaagccagcgccaagggtagctgcggcgatctgccaggcctcaggacagccgtgccgccacatgagcccggtggaccgggtagccccggtggactcgggggtgggccatccgcttgggaagcctgtcctccagctcttagggggcttcaccacgatcttctgctgcgaaaaatgtccagcagtagtcctgacctgctaagcgccgctcttggatcccgtgggcgaggagccaccggaggtgccggagacccaggctcacctcctcctgccaggggcgatacacccccttcggaaggttcagcaccgggatcaactagtcccgatagtcccggaggggcaaaaggagagccaccaccacccgtgggccctggcgagggggtcgggctgctcggcaccggcagggagggcacttccgggaggggaggatcgagggctgggtcacagcacctgacaccggctgctctgctgtaccgtgccgcagtgaccaggagccagaagcgcggtatatcaagtgaagaggaagaaggagaggtggattccgaagtcgaactgacatcctcacagaggtggccacaatctcttaacatgcggcagtctctgtcaaccttctcctccgaaaacccatctgacggggaagaagggaccgcttccgagccctcaccatcgggtacccccgaagttggaagcaccaataccgacgagcggcctgacgaacggagcgacgatatgtgcagtcaggggtcagagatcccgctcgatcccccaccgagcgaggtcataccaggaccagagcctagctcactccccatcccacatcaagagctgctgagggaacgcggaccccctaactcggaagactcagactgcgattcgacggagcttgacaactccaactctgtcgatgccctacggcctcctgcatccctgcccccatag

SEQ ID NO: 230957 - DNA, 2901 bp, synthetic construct
  misc_feature 1..2901: note = Description of Artificial Sequence: Synthetic coding sequence
  source 1..2901: mol_type = other DNA
atggcaaactttcaggaacatctctcctgcagttccagcccccacctgccatttagcgaatctaaaaccttcaacgggctgcaggatgagcttactgcaatggggaatcaccctagtccgaagctgctggaggatcagcaggaaaagggaatggttagaaccgaactgattgaaagcgtccattcaccagttaccacgactgtgttgacctctgtctctgaggattcccgagaccagtttgagaactcagtgctgcagctgcgagagcatgacgaaagcgagaccgccgtgtcccaagggaacagcaacaccgtggatggggagagtacatcaggaacggaagacatcaaaattcagttctcccgatctggcagcggctcgggaggatttctcgagggactgtttggttgtctccggccagtgtggaacatcattgggaaggcctattccacagattacaaactgcagcagcaggacacgtgggaagtgccatttgaagagatctcagaactgcagtggctcgggagcggagctcagggggcagtatttctagggaaattccgggctgaagaggttgccattaagaaagtcagggagcagaacgaaacagacattaagcacctcaggaagctcaagcacccaaatattatcgcattcaagggagtgtgcacacaagccccttgctattgtatcatcatggaatattgcgctcacgggcagctgtatgaagtgctgcgtgccggacgcaagatcaccccaaggttgctggtggactggtcgacaggaattgctagcggcatgaattatctccacttgcataagatcatccaccgggacctgaaatcacccaatgtactggtgacccacacagatgcagtgaagatttctgatttcgggaccagcaaagagctgtcggacaaatccacaaagatgtcatttgcgggaaccgtcgcgtggatggctccagaggtcatccggaacgaacctgtttccgagaaagtggacatctggtcgttcggcgtcgtgctgtgggagcttctcacaggcgagattccttacaaagacgtagatagttccgccatcatctggggagtgggaagcaacagtctgcatctgccagtgccctcaacatgccccgatggatttaagattctgatgaaacagacatggcagtctaagcctcgcaaccggccttcattcaggcagacactgatgcatttagatattgcctccgccgatgtgctggctacacctcaggaaacatattttaagtctcaggccgagtggagagaggaagtgaagaagcattttgagaagattaaaagtgagggaacatgcattcacaggctcgacgaggaattgataaggcggaggcgggaggagctgaggcacgctctcgacatcagggaacattatgaacggaagctggagagagccaataacctgtatatggaactgagtgctattatgctgcagctggaaatgcgggagaaggaactgatcaagcgcgaacaagccgtggaaaagaagtaccctggcacgtacaagcggcaccccgttcgcccaatcatccatcctaacgccatggaaaaactgatgaagcgaaaaggagtgccccataagtccggaatgcagaccaagagacctgatctgcttcgcagcgaaggcatccctactactgaagtcgcccctaccgccagtcccctgtcaggatccccgaagatgtcaaccagcagcagcaagtcacgctatagatctaagcctcgtcatcgacgagggaatagcagaggatcccatagtgatttcgccgctatccttaagaaccagccagcgcaggagaactctcctcatccaacctatttgcatcaggcacaaagtcaatacccttccctacaccaccataattccctgcagcagcagtaccagcagccacctcctgccatgagtcaatcacaccatccgcgactaaacatgcacggacaggacatcgctacatgtgccaataatctgcgatacttcggacccgcagcagccctgaggtctcccctcagcaaccatgctcagcgacagctccctggttcctccccggacttgatttccacagctatggcagcagattgctggcggtcttcagagcctgacaagggtcaagccggaccttggggctgttgtcaggccgacgcttacgacccctgcctgcaatgcagaccagaacaatacggctcattggatatacctagcgcagagccggtggggagaagtcccgatctcagtaagtctcccgctcataaccctctgctagaaaatgcccaaagcagcgaaaaaaccgaagagaacgagttttctgggtgtcggagcgaaagcagcctcggaaccagccaccttgggacacccccagcgttacctagaaagaccagacccctccagaagtcaggcgatgacagttccgaagaggaagaaggagaagtagactccgaagtcgagtttcctcggagacagagaccacatcggtgcatttcctcatgccagtcatactctactttttctagcgagaatttttcggtgtccgatggtgaggaaggaaacacctctgaccactcaaacagccccgacgagcttgccgacaagctggaagataggttggctgaaaagctagacgacctgctttctcaaactccagaaatccctatagatatctcttcacactcggatggcttaagtgataaagagtgcgccgtacgcagggtgaaaacgcagatgagcctagggaagctgtgcgttgaagagcggggatacgaaaaccccatgcagttcgaagaaagcgattgcgacagcagcgatggagagtgtagtgacgctactgttcgcacgaataagcattactcttccgcaacctggtag

SEQ ID NO: 230958 - DNA, 2901 bp, synthetic construct
  misc_feature 1..2901: note = Description of Artificial Sequence: Synthetic coding sequence
  source 1..2901: mol_type = other DNA
atggccaacttccaagagcatctctcgtgcagcagcagtccacatttgcccttttccgagtccaagacattcaatggcctccaggatgagctgacagcgatgggcaatcatccatcgcccaagctgctcgaggatcagcaggagaagggcatggtaaggacagagttgattgagtcagtgcactccccggttactaccaccgtgttaacaagtgtgtccgaggattcgcgggatcagtttgagaatagtgtcctgcaactaagggagcatgatgagtctgagactgctgtctctcagggtaactctaacaccgttgacggagagagtaccagcggtacagaggacatcaaaatacagttttcaaggtctgggtccggctcaggcggtttcctggaagggttgttcggctgtctccggccagtgtggaatattatcggaaaggcctactcaacagattacaagctccagcagcaggacacttgggaggtgccatttgaagaaatttcagagttgcagtggttgggatctggggctcagggagccgtgtttctgggcaagttcagggcggaggaggtggctataaaaaaggtccgcgagcaaaatgagacggacataaaacatttgcgaaagttaaagcatccaaacattatcgccttcaaaggggtttgcacgcaggccccatgttattgtataatcatggagtactgcgcacatggacagctctacgaagttttgcgcgcaggcagaaaaatcacaccccgacttctcgttgattggtctacaggaatagctagcggcatgaattacctgcatcttcataagataatacacagggacctgaaatcaccaaacgtgttggtcacccatacagacgcagttaaaattagcgactttggaactagcaaggagctctcagacaagtcaaccaagatgagctttgctgggaccgtagcttggatggcacctgaggtcattcgcaacgagccggtgtctgaaaaggtcgacatctggtcattcggcgtcgtgttatgggagctgttaacgggggaaattccatacaaggatgtggattcctccgccataatctggggagtggggtcaaacagccttcacctacctgtacctagtacatgcccggacggctttaagattcttatgaagcagacctggcaatcaaagcccaggaatcgtccgagctttcggcagactctgatgcacctcgacatagcatcagctgacgtgctggccactcctcaggagacgtatttcaaatctcaggccgaatggcgggaagaagtcaagaagcactttgaaaaaattaagtccgaaggaacgtgtatacaccgcctggatgaggagctaattcgccgacggagagaggagcttagacacgccctagacatcagggagcactatgaacgaaagttggagcgggctaataacctctatatggagctgagcgcaattatgttgcagctcgagatgagagagaaggaactaatcaaaagggaacaagcagtggagaagaaataccccggtacctacaaaagacatcccgtaagacctattattcatcccaacgcaatggagaagttgatgaagcgtaagggcgtcccccataagagcgggatgcagacaaaacgcccagatctactgcgttctgagggtattcctactactgaggtggcaccgaccgcctctccactttctggctccccaaaaatgtccacttcttcatccaaaagtcgctatcgcagtaaaccgcgtcataggaggggcaacagtaggggctctcattcagactttgcagcaatcctgaaaaatcagcccgcacaggagaattccccgcatcctacttatctccatcaggcacagtcccagtacccctcattgcatcatcataacagtttacagcagcaatatcagcagccaccacccgctatgtctcagagccaccaccctagactgaatatgcatggacaggatattgcaacttgtgccaacaacctgagatattttggcccagcagccgctttgagaagccccctaagtaaccatgctcagaggcaactgcccggaagttcccctgacctgatcagcactgccatggctgccgactgctggcgtagctctgaacccgacaaaggacaagctggaccatgggggtgttgccaggctgacgcttatgatccgtgtctgcagtgtcgccctgagcagtacgggagtctggatattccctcagctgagcctgtgggcaggtctccggacctgtccaagagcccagcccacaatccactgcttgagaacgcccagtcttctgaaaaaaccgaggagaatgaattttccggatgccgaagcgaaagtagtcttggcacctcccacttgggcactccccctgccctgcctcgaaaaacaagaccactccaaaagagtggtgacgactcctcagaggaagaggaaggcgaagtggacagcgaggtcgagtttcccagaaggcagcggccacatcgttgtatatcttcttgtcagtcctatagtacattttctagtgagaattttagcgtgtcggacggcgaggaagggaacacaagcgaccactcaaacagtcccgacgagcttgccgacaagttggaagaccgcctggctgaaaagctcgacgatcttctgagccagacacccgagatcccaatcgacatttcttcccattctgacggcctatccgataaggaatgtgctgtccgccgagtcaagactcagatgagcctagggaagctatgcgtggaagaaaggggatacgaaaacccaatgcagtttgaagaatcagactgtgatagttcggatggcgagtgctctgatgctacagtgcggacaaataagcactatagctcagcaacctggtag

SEQ ID NO: 230959 - DNA, 414 bp, synthetic construct
  misc_feature 1..414: note = Description of Artificial Sequence: Synthetic coding sequence
  source 1..414: mol_type = other DNA
atggcgaacttccaggaacacctgagttgtagcagttctccacatcttcccttctccgaaagcaagacattcaacggtctgcaagacgagctgactgccatgggtaaccacccatcccctaagttactggaggatcagcaggagaaggggatggtacgtacagagcttatcgaatcagtccacagccctgtgactacaacagtcctgacttctgtgtccgaagactcaagagatcagttcgagaattcagtgctacaactgcgggagcatgacgaatcagagactgctgtctctcaaggaaactccaataccgtagatggggaatcgaccagcggaaccgaagacataaagatccagttctcccgcagtggctctggaagcggcggtttcctggagggactgttcgggtgttag

SEQ ID NO: 230960 - DNA, 342 bp, synthetic construct
  misc_feature 1..342: note = Description of Artificial Sequence: Synthetic coding sequence
  source 1..342: mol_type = other DNA
atggctaactttcaagaacatttatcgtgctcctcatccccacacctgcccttctcggagtcgaagacctttaatggactgcaggatgaactaaccgccatggggaaccacccttcacctaaactccttgaagaccaacaagagaagggcatggtgcgaacggagctcatcgaatctgttcacagcccggtgactaccacagtccttacatcggtatctgaggactcccgcgatcagttcgaaaacagtgtcctccagctcagagaacacgacgaaagcgagacggccgtttcacagggcaattcgaacacagtggatggagaatccacatcaggcacctag

SEQ ID NO: 230961 - DNA, 2469 bp, synthetic construct
  misc_feature 1..2469: note = Description of Artificial Sequence: Synthetic coding sequence
  source 1..2469: mol_type = other DNA
atgagttatgtggaatgtaagtgcctgcagcttgagaacaagaacacctgggaagtgccctttgaggaaatctctgagctgcaatggttgggatctggcgctcaaggagcagtatttctagggaaatttagagctgaggaagtggctatcaaaaaggtgcgtgaacagaacgagactgatattaaacacctgagaaaactcaaacacccgaacatcatagccttcaagggcgtttgtacacaggcaccctgctactgtatcatcatggagtattgcgcccatggccagctgtatgaagtccttagagctggccgaaagattaccccccgacttcttgttgactggtccacagggatagcctctggtatgaattacctacacctacataaaatcatccatcgcgatctaaagagccctaatgtgcttgtgactcataccgacgccgtcaaaatttccgattttgggacatcaaaagaactttcagacaaatccacaaaaatgtctttcgcaggaactgtagcatggatggccccagaggtgatccggaacgagccagtcagcgagaaggttgatatctggtcttttggagtggttctgtgggagttgctgacgggagagattccatacaaagatgttgatagcagtgctatcatttggggcgttggatccaacagtctgcaccttccagtgccttcgacatgcccagacggattcaagattctcatgaagcagacgtggcagtccaagccaaggaaccggcctagttttcggcagaccctgatgcatctcgacatcgcttctgctgacgtgctcgccacgcctcaggaaacttacttcaaatctcaagcggagtggcgggaagaggtgaaaaaacatttcgagaaaatcaagagtgagggcacatgcatacaccggctggacgaggagttgataaggaggaggagggaggaattacgccatgcactggacattagagagcactacgagcgaaagctggagcgcgctaataacctctacatggaactgtctgccatcatgctccaactggagatgcgggagaaggaactgattaaacgagagcaggctgtggaaaagaagtatcccggaacttataagcggcacccggtgaggcccattatccatcctaacgctatggaaaagcttatgaaacggaaaggcgtaccacataagtccggcatgcaaacgaagaggcctgatctgcttagatcagaggggatccccacaaccgaggtagcacccactgcaagcccactgagcgggagccctaaaatgtctacgagcagcagtaaaagccgatacagaagcaaaccccgtcataggcgagggaattctcggggaagccactctgattttgcagcaattttgaagaaccagccagcgcaggagaacagtcctcatcccacatatttacaccaggctcagagccagtacccatctttacatcaccataatagcctccaacaacagtatcaacagccaccacctgcgatgtcacagagccaccatcctaggctgaacatgcacggccaggatatcgctacctgtgccaacaacctgcgatactttggcccagcggctgctctccgaagcccgctaagcaaccacgcccaacgccaactcccaggcagctcccccgaccttatcagcaccgccatggccgctgattgttggcggtcctctgagccagataagggccaggccggtccttggggatgttgccaagctgacgcgtacgatccttgcctccagtgccgccctgagcagtacggctctctggacatcccatctgccgaaccagtcggcaggtcaccggatttgtcaaagtcgcccgcacataaccccctcctggagaatgctcagagcagcgagaaaaccgaggagaatgaattttcggggtgccgaagcgagagctctctcggtacatctcaccttggaacccctcctgccttacctcgcaaaacacgaccacttcagaaatccggggacgactcatccgaagaagaagaaggcgaggttgatagtgaggtagagttccctcgtcgacagaggccccatcgctgcatctcgagctgccagtcttattccacatttagcagcgaaaatttctcagtctctgatggcgaagaggggaacacaagcgatcactcaaacagtccagatgagctggcggataaacttgaggatcgcctcgcagagaagctagatgacttactctctcagaccccagagattcctatcgacatctctagccattctgacggtttgagcgataaggagtgcgcagtaaggagagtcaaaacacagatgtccttgggcaagctgtgcgtggaggaacggggatatgaaaatcccatgcaattcgaggagtctgattgcgactcctccgacggagaatgctccgatgcgactgtcaggacaaacaagcattattcttccgctacttggtag

SEQ ID NO: 230962 - DNA, 2280 bp, synthetic construct
  misc_feature 1..2280: note = Description of Artificial Sequence: Synthetic coding sequence
  source 1..2280: mol_type = other DNA
atgtattgtggaatccagatcctggccctctgggagcggggagtctgcacccaggccccatgttattgcattatcatggagtactgcgctcacggtcagttatacgaagtgctccgagccggaaggaaaatcacccctcgcctgctggtagactggtctaccgggatcgccagcggaatgaactacttacatctgcataagatcatccacagggacttaaaaagtccaaatgtcctcgtgacacataccgatgccgtaaagatctctgacttcgggacttcaaaagagttgagtgataagagcaccaaaatgtccttcgccggtacagttgcctggatggcacctgaggtcatcagaaatgagcccgtgtctgagaaggtcgatatctggagctttggcgtggtgctgtgggaactactgaccggcgaaattccatacaaggacgtggactcctccgcgataatctggggggtaggatccaactcacttcacctccctgtgccctctacttgtcctgacgggttcaagatattaatgaagcagacctggcagtccaaacccaggaatcgccctagcttccggcagacattaatgcacctggacatagcctctgccgacgtgttggctacaccgcaggagacttactttaagtcccaggctgagtggagggaagaagtaaaaaaacactttgagaagattaaatcagagggcacatgtattcaccggctggacgaagagctcattcgtaggagacgcgaggagttgcgccatgctcttgacatacgcgaacattacgagagaaaactggagagggcaaataacctatatatggagttgtccgccattatgcttcaacttgagatgagggagaaagagttaattaagcgggagcaggccgtggaaaagaagtatcctggcacctacaagcggcatcctgtgagacctatcatccacccaaatgcaatggaaaagctgatgaagcgcaaaggtgtgccccacaaaagtggcatgcaaacgaagaggcccgatttgcttcgttccgaagggatccctaccacagaggtcgcccctaccgcatcccccctgagtggatcccccaaaatgagtacttcctcttctaagtcgcgctaccgctcaaaaccacggcatcggagaggaaattcgcgagggtcccattctgacttcgcagcaatcttaaagaaccaacctgcccaagaaaacagcccacacccaacgtatctgcatcaagcccagtctcagtatccttctctccaccaccacaacagtctccagcagcagtaccagcagcctccccctgcaatgagccagtcgcaccaccctaggcttaatatgcacggccaggacatcgctacttgcgccaataacctccgctacttcggcccagccgctgctttgagatcgcctttgtctaatcacgcacagagacagttacctggtagcagccccgacttgatcagtacagccatggccgctgactgttggcgttcttcagaaccagataaaggtcaagctggaccctggggctgttgccaggccgacgcctacgacccctgcctccaatgcagaccagaacaatatggaagtctggacatacccagtgccgaacccgtcggacgttcacccgacctgagtaaaagcccggcacacaatccactgttggagaacgcccagagtagcgagaaaaccgaagagaatgagttctcggggtgtaggagcgagagtagcctgggtacaagtcacctcgggactcctcctgcactgccgagaaaaacaaggcctctgcaaaaaagtggagacgacagctccgaggaagaggagggtgaggtggactccgaagtggaattcccgagaagacagagaccccatcggtgtataagcagttgtcagagctactctacctttagctccgagaacttttctgtgagcgacggcgaagaaggaaacacctccgaccactccaatagtcctgatgaactggcagataagctagaagacagattagcagaaaagctggacgacctcctgagtcaaacacccgaaattccgatcgatatcagttctcacagtgatggactgagtgacaaggaatgtgccgtgcggcgtgtcaagactcaaatgtctctcggcaagctctgtgttgaggagcgcggatacgagaatcctatgcagtttgaagagtccgactgcgacagttcggatggtgaatgcagcgacgctacggttcggaccaacaaacactatagcagcgccacatggtag

SEQ ID NO: 230963 - DNA, 2841 bp, synthetic construct
  misc_feature 1..2841: note = Description of Artificial Sequence: Synthetic coding sequence
  source 1..2841: mol_type = other DNA
atggcggtgatggaaatggcttgcccaggcgctccaggctctgccgtgggacagcagaaagagctgccaaaagccaaagagaaaactccacctcttggaaagaagcagtcttccgtctacaagctggaggctgtagaaaaaagccctgtgttctgcgggaagtgggagatcctcaacgacgtaattacaaaagggaccgccaaagaggggtctgaagccggacccgctgctatttccattatcgcacaggcagaatgtgagaactcacaagaattttccccaaccttcagtgaaaggatttttattgcaggttccaaacagtattcacagtccgaaagtctggaccagattcccaataatgtcgctcacgccaccgaggggaagatggctcgcgtgtgttggaagggcaaacgtagaagcaaggcccgtaagaagcggaagaaaaaatcctctaagagcctcgcacacgccggtgtggctcttgccaagccactccccagaacccctgagcaggaaagttgcacaatcccagtacaggaagatgagtccccactgggggcaccttacgtgaggaacacccctcagttcacaaagccccttaaggagccgggactcgggcagttatgcttcaagcagctgggggagggcttacgggctctgcctaggagcgagctgcacaaactgatctctcccctgcagtgtctgaaccacgtgtggaagctacatcatccacaagacggagggccactaccattgcccactcatccgttcccttatagtagactgcctcacccctttcccttccacccgttacagccttggaagccacatcccctagagtcttttttgggaaagttggcgtgcgttgattctcagaaacccctgcccgacccgcatctgagtaaattggcttgcgtcgatagtcccaagccacttccgggtccccatctggaaccgtcctgcctgtcccgaggcgctcatgaaaagttctccgtggaagagtacctggtgcacgccctccagggatctgtttcctccggccaggcccacagtcttaccagtcttgctaaaacctgggccgctcgcggaagccgctctagagaaccgagcccaaaaacagaggataatgaaggggtgctccttacggaaaagctgaagccagttgactacgagtatagggaggaagtccattgggccactcatcagcttcgcctcgggagaggtagtttcggtgaagtccaccgtatggaggataaacagactggtttccagtgcgcagtgaagaaggtccggttagaggtcttccgcgcagaagagctcatggcctgtgcgggacttacaagtccaagaatcgttccgctgtacggcgcagtgcgggaaggaccatgggttaatatttttatggagttgctggagggcggatctttgggacagttggttaaagagcagggctgcctgccagaggaccgagcactttactatctcggacaagccctggaaggcctggaatacctccattcccgcagaatcctgcatggagacgtgaaggccgacaacgtgctgctgagctccgacggcagccacgccgctttatgcgatttcgggcacgccgtgtgcctgcagcctgatggcttggggaaatccctgttgacaggcgattatattcccggaaccgagacacacatggcgcctgaggtcgttctcggcagaagttgtgatgccaaagttgacgtgtggtctagctgctgtatgatgctgcatatgcttaatggctgccatccgtggacacagtttttccggggacccctttgtttgaagatagcttcggagccacccccagtgcgcgagattcctcccagttgcgctccactgactgcccaagccatccaggagggactgcggaaggaacctattcatcgcgtgtccgccgctgaactcggtggaaaagtcaacagggctctgcagcaggtcgggggtctgaagagtccctggagaggggagtacaaggagcccaggcatccacctcccaatcaggccaactatcaccagacattacacgcccagccccgagagcttagcccgcgagctccaggtccgcgtcccgctgaagagacaactgggagagccccaaagctgcaacctccactgcctccagagcctccagagcctaataagtctccccctttaactttgagcaaggaagagtccgggatgtgggagccgctccctctgagtagccttgagccagcacctgcgagaaacccatcatcgccagagagaaaagcaacagtacctgaacaggagctgcagcagctcgaaatcgagttgttcctgaatagcttgtctcaaccattttcgctggaggagcaggagcagatcctgtcctgcctgagtattgactccctctcactgagcgacgatagtgagaaaaacccaagtaaggcgtcccagtcaagccgtgatacactgagcagtggcgttcattcttggagttcacaggctgaggccaggtcctctagctggaacatggtcttggcgaggggcaggcccacagataccccgtcttactttaacggcgtgaaggtccagatccaatcattgaacggggagcacctgcacatccgggaatttcatcgagtgaaggttggcgacatagccaccgggatatcatcgcaaatacccgctgctgcattttcactcgtcaccaaagatggccagcccgtgaggtacgatatggaggtgccggactccggcatcgatctgcaatgcaccctcgcccctgacggttcctttgcctggtcttggagagtcaaacacggacaattggagaatcggccttag

SEQ ID NO: 230964 - DNA, 1302 bp, synthetic construct
  misc_feature 1..1302: note = Description of Artificial Sequence: Synthetic coding sequence
  source 1..1302: mol_type = other DNA
tgctttaaacagctgggtgaaggcttgagggctctaccccgtagcgaacttcacaaattgatttcacccctgcagtgtctcaaccacgtatggaagttacaccaccctcaggacggtgggcctcttcccctcccgacccaccacccctttccgtttcacccgctgcaaccctggaaaccccaccccctggagtcctttcttggcaagctcgcttgtgtagatagccagaagcctcttcccgatccgcacctctctaaattagcttgcgtggactccccaaagcccctgccagggcctcaccttgagccctcctgtctcagccgcggtgcccacgagaagttctctgtggaagagtatctggtccatgcgttgcaaggcagtgtttcaagcggtcaggctcacagtctgacatcgctcgccaagacctgggctgctcgagggtctcgctctcgtgagccaagccccaaaacagaggacaatgagggagttttgctgacagagaagctcaagcctgtggattacgaatatcgtgaggaagtgcattgggccacccaccagttgaggctgggtcggggatctttcggcgaagtgcaccgcatggaggataaacagacgggcttccagtgcgctgtcaaaaaagtgcgccttgaggtatttcgggcagaggagctaatggcctgtgcagggcttacatcacctagaatcgttccactgtacggtgctgtaagggagggtccttgggttaacatctttatggaactgttggaaggtgggagtctggggcagctggtgaaggaacagggatgcttgcccgaagatcgcgcactctattatctgggtcaggctctcgaagggctggaatacctgcattcacgcagaattcttcacggggacgtaaaggcggacaacgtacttctgagcagcgatgggtcacatgccgctctctgcgatttcggacacgcagtttgtctgcagcccgatggactaggtaagtccttgttgaccggggattacatcccaggaacggagacccacatggcccctgaggtcgtgttaggccgtagttgcgacgctaaagttgatgtatggagttcatgttgcatgatgctgcatatgctgaatggatgtcacccgtggacccagttttttagaggccctctctgccttaaagtgggggatggcacgcagcacggccagcagggcgagcttcaggggccaggcgctcaggcggcaggatggcggggttgtagcgccgtggctgacggggctcggggtgggctagttatacacgtgggctcttag

SEQ ID NO: 230965 - DNA, 3942 bp, synthetic construct
  misc_feature 1..3942: note = Description of Artificial Sequence: Synthetic coding sequence
  source 1..3942: mol_type = other DNA
atggaaagcggagggggtaatgccccagctggggctctgggggctgcttccgagtcgccccaatgccccccacctcctggagtagagggggctgccggtcctgctgaaccagatggcgctgccgaaggcgctgccggtggaagtggggagggcgagtcaggcggaggtcccagacgcgcactccgcgctgtatacgtccgctctgagagttcccagggtggggctgccggtggcccagaagccggtgctagacagtgtttattgagggcatgcgaagcagagggcgcacaccttacatccgttccatttggggaactggactttggggaaaccgcggtcctggacgctttctatgatgctgatgttgccgtagtggacatgagcgacgtgtcccgtcagcccagcctcttttaccatctcggagtgcgggaatctttcgacatggccaacaacgtcatcctatatcacgacacggatgctgacacagctctgtcccttaaggatatggtgacgcagaaaaatactgcctcatccggtaattactacttcattccctacatcgtaactccatgcgcagattacttctgttgcgaatccgatgcccaacggagggcctccgagtacatgcagcccaattgggataacattcttgggccactgtgcatgcccctggtggatagattcatcagcctcttgaaagacattcacgtcacgtcttgtgtttactataaagagaccctgctcaacgacatacgaaaggctagagagaaataccaaggtgaagaactggccaaagaactcgctagaattaagttgagaatggataatactgaagtcctgacttcagacatcatcatcaacctgctactttcctaccgcgacattcaggattacgacgccatggtcaagctggttgaaacacttgagatgttgccaacctgtgacctcgccgatcaacacaatattaagttccattatgcattcgcactgaaccgccgtaatagtaccggcgaccgagaaaaagcgctacaaatcatgcttcaggtattgcagtcttgcgatcatccaggacccgacatgttttgtctctgtggacggatctataaggacatttttttggattctgactgcaaggatgatacatcccgcgattccgcaatcgaatggtataggaaaggtttcgaactgcagtcctcgctgtattcaggaattaatctcgcagttctgcttatcgtagccggacagcagtttgagactagtttggaactcagaaagattggagtccggttaaattcactgctaggacggaaagggtctctcgagaagatgaacaactattgggatgttggacagttcttctctgtgtctatgctcgcccacgacgtcgggaaagcagttcaagctgccgagagactctttaagcttaaacctccagtgtggtatttgcgttcactggtgcaaaatctgttgctaattagaagatttaagaaaacgatcatagaacactcaccgcgacaggagcgattgaatttttggctcgacattatctttgaggctacaaacgaagtgacaaatgggcttagatttccagtgttggtgatcgagccaacaaaagtgtatcaaccaagttatgtgagcattaacaacgaggccgaagagcgtaccgtctccctttggcatgtgtccccaaccgagatgaaacaaatgcacgaatggaactttaccgccagtagcatcaagggcatttctctctctaaattcgatgaacgctgctgcttcctgtacgtccatgacaatagcgacgatttccagatctactttagtacagaagagcagtgctccagattttttagcttggtaaaagagatgattactaatactgccggttcgaccgtggaactcgaaggggaaactgacggcgatacgctcgaatatgaatatgaccacgacgctaatggagagcgggtcgtgttaggcaaaggaacatacggcattgtgtatgccggaagagatctgtcaaaccaggtgagaatagctattaaagagatacctgagagagacagcagatacagtcagccgcttcatgaggaaattgcactccataagtatctgaagcatagaaacatcgtccagtatctggggtctgtatctgagaacgggtacatcaagatcttcatggagcaggtccccggagggagcctgtcggccctcttaagatcaaaatgggggccaatgaaagagccaaccataaagttctacacaaaacaaatcctggaaggcctgaagtacctccacgagaaccagatcgtacacagggatataaagggggacaacgtcctcgtcaacacctacagtggggtggttaagatcagtgacttcgggacttccaaaaggttggcaggcgttaatccctgtaccgaaacattcaccggtacattacagtatatggcacctgagattattgaccagggacccagaggatacggcgcaccggcagatatttggtctttgggctgtaccatcatcgagatggccacttcgaagcccccatttcacgagttaggcgagccacaggcagccatgtttaaggttggtatgtttaagatacatcctgaaataccagaggccctctccgccgaagcgcgagcattcatcctctcctgtttcgaaccagaccctcataagcgcgctacgacggctgagctgctcagagaggggttccttcggcaagtgaacaaaggaaaaaaaaacaggatagcttttaagccctccgaaggccctcggggagtggtattggcattgcctacgcaaggcgagccaatggctacgtcaagcagcgaacacgggagtgtttccccagatagtgacgcccagcccgatgcactatttgagcgcaccagagccccacgacatcacctcggacacttgttgtccgtccccgacgaatcatccgccctcgaggacagagggctggcgtcatcacctgaagacagagaccaaggtctctttttgctgcggaaggattcagagcggcgagcgatcctgtacaaaattctctgggaagaacaaaaccaggtcgcatctaatctacaggagtgcgtggcgcagagcagtgaggaactacatcttagtgtgggccatataaagcaaatcataggaattctgcgggacttcatacgctctcccgaacacagggtgatggccactaccatcagtaaactgaaggtagacctagatttcgattcttcctcaattagtcagatccacctggtcctctttgggtttcaagacgccgtcaataaaatactgcgcaatcacctgatcaggccacattggatgttcgcgatggataatatcatcagacgggcagtgcaggctgctgtcacgattctgataccggaactccgcgctcacttcgaacccacatgtgagacggagggagtcgataaagatatggacgaagctgaggaagggtacccgccagcaactgggcctggtcaggaagctcagcctcaccagcagcacctttctctccaacttggagagttgagacaggagacaaatcgactgctcgagcacctggtcgagaaagagagggaatatcagaatctgctgcgtcagactctagaacagaagacacaggaactctaccatttgcagctcaagctgaagtctaactgcattacggaaaatcctgctggaccatacggtcagcggactgacaaggagttaatcgactggttgcggttacagggcgcagatgcaaagaccatcgagaagatcgttgaggaggggtacaccctatctgatatcctcaatgaaattaccaaggaggatctccgatatcttcgcctgcggggaggactgctctgtcggctgtggtctgctgtgtcgcagtaccggcgagcccaggaggccagtgagactaaggacaaggcctag

SEQ ID NO: 230966 - DNA, 4677 bp, synthetic construct
  misc_feature 1..4677: note = Description of Artificial Sequence: Synthetic coding sequence
  source 1..4677: mol_type = other DNA
atgagagaagcagcggctgctctcgtcccccctcctgctttcgctgtaacccctgccgcagcaatggaggagcctcctcctccaccccctccccctcctccgcctccggaacctgaaactgaatcagaacccgaatgctgtctcgcagcgagacaggagggcacacttggtgactcagcgtgtaagtcccctgagtcagacctggaagatttcagtgatgaaaccaataccgaaaacctctatggcacgtcccctccttcaacaccacgccagatgaagaggatgtcaacaaagcaccagcgtaataatgtgggccgtccggcatccaggtccaatcttaaagagaaaatgaatgcacccaaccagccgccacataaggacactgggaaaactgtcgagaatgtggaagaatacagctacaagcaggaaaagaaaatccgcgcagcgctgagaactaccgagagggataggaagaaaaacgtgcagtgcagctttatgctcgatagtgtgggcggtagccttccaaaaaaatctattccggacgtcgacctgaacaaaccctacttgagcctgggatgcagcaatgcaaagttgcccgtgtccgtacctatgcccatcgcccgacccgctcgacaaacctccaggacagactgtcccgcagacaggctgaagtttttcgaaacacttcggctacttctgaagttaacctctgtgtcgaaaaagaaagatcgtgaacagagggggcaggaaaacacatccgggttctggttgaataggagtaacgagctgatttggttagaactgcaggcttggcacgccggaaggacaatcaatgatcaagattttttcttatatacagccagacaggcaatccccgacattataaatgaaattcttacattcaaagtcgattacggtagtttcgcttttgtgagggatcgggcaggctttaatggtacatcggtcgaaggtcagtgcaaggcaacccccggtaccaagattgtcggctactcgacacatcacgaacatctccagagacagcgtgtgtcctttgagcaggtgaaaaggatcatggaactgctggagtatattgaggccctgtatccgagtttacaggccctgcagaaggattacgagaaatacgctgcaaaagacttccaggaccgggttcaggccctttgtttatggttaaatatcactaaagacctgaaccaaaaattgcgtattatgggtacagtccttgggatcaagaacttgtccgatatcggatggcctgtgttcgagattccctcccctaggcccagcaagggaaatgaacccgagtacgagggagacgacaccgagggagaactcaaggagctggagtcttctactgacgagtccgaagaagagcagatctcagaccctcgggtgccagagataagacagcccattgacaactctttcgacattcaatccagggattgtatctccaagaagcttgaacgcctggaatccgaagacgactctcttggttggggcgctcctgattggagtacggaggccggtttctccagacactgcctgacctctatttatagacctttcgtagacaaagccctgaaacagatggggctgcggaagctgattctcagactgcataaactcatggacggatccctgcagcgggctagaatagccctcgtgaaaaatgatcgtcccgtagagttctcagaatttcctgaccctatgtggggcagcgattatgtgcaactcagccgcacccctccttctagcgaagagaaatgttcagccgtgtcctgggaggaactcaaagcaatggacttgccaagctttgagcctgcgttcctcgtgctatgtagagttctgctaaacgtgatccacgaatgtctgaaattgcggctggagcagaggcccgctggtgagcccagcctcctgagcatcaaacagcttgtccgcgaatgcaaagaggtgcttaaaggcggactgcttatgaagcagtattatcaattcatgctccaagaagtgctggaagatctggagaagcctgactgcaatatagatgcctttgaggaggatttgcataaaatgcttatggtatacttcgactacatgaggtcgtggattcagatgttgcagcagctgccgcaggccagtcacagcctgaagaatctgctggaggaggagtggaattttactaaggaaatcacgcattatatccggggaggcgaggctcaggccggtaaactattttgcgatatagctggcatgttgctgaaatcaaccggatccttcctggaattcgggctgcaggaatcttgcgccgaattttggactagtgccgatgacagctcagctagtgatgaaatcagaaggagtgtgattgagatttccagggcactcaaggaactgttccatgaggccagagagcgtgcatccaaggccttgggttttgccaagatgctgagaaaagaccttgagatagcagccgagtttcggctgagcgctcctgtgagggacttattagacgtgctgaaaagcaagcaatacgttaaagttcagattcctgggctggagaacctgcagatgttcgtgcctgacacactggctgaggaaaaatcgattatactgcagctcttgaacgctgctgccggaaaggattgttctaaagattcggatgatgttttgatcgatgcatatctcctcctgaccaagcatggcgaccgggctagggactcagaggactcatggggaacctgggaagcccagcctgtgaaggtggtgccgcaagtggagacagtggacaccctcaggtccatgcaggtggataatctacttttggttgtaatgcagtctgcacaccttacgatacaaagaaaagcctttcagcagagcattgaggggctgatgacactgtgtcaggagcagacatcatcccagcccgtcatcgctaaggccctgcaacagctgaagaatgacgcactcgaactttgtaatagaatctccaatgctatcgatcgtgtcgaccacatgttcacctccgagtttgatgctgaagttgacgagtcagagtccgtaacgcttcaacaatactacagagaagccatgatacaaggctataactttggattcgaatatcataaagaggtcgtcaggctcatgagtggcgagttcaggcaaaaaattggagacaaatatatcagctttgccagaaagtggatgaattacgtcttaacaaagtgtgagtcaggcagaggcacccgaccaagatgggcaacccaggggttcgacttcctgcaggctatcgaaccagcctttatctccgctctacctgaggatgacttcctctcccttcaggctctcatgaatgagtgtattggccatgtgatcggcaagcctcattcccctgtcactggcctttacctggccatccatcggaacagtcccagacccatgaaagtacctcgctgtcatagtgacccacccaacccccatctcatcattcctactccagaaggttttagggggtcctcagtcccagaaaacgacagactcgcctcgatcgctgctgaactgcaatttagaagcctgtccaggcattcctcgcctacagaagaacgcgacgaacctgcctacccgagaggtgatagctccggatcaaccaggagaagctgggagctgagaaccttgatcagtcagtctaaagacaccgccagtaaacttggtcctattgaggccattcaaaaatctgtgcggctttttgaagaaaaaagatatagggagatgcgtcggaagaacataattggccaggtttgcgataccccaaagtcctatgacaatgttatgcatgtcggtctgcgaaaagtgactttcaaatggcagcgagggaacaaaattggtgaaggacaatatggaaaggtgtacacttgtattagcgtggacaccggcgaactgatggctatgaaagaaatcagatttcaaccaaatgaccacaagaccattaaagagactgccgacgaattgaaaatcttcgagggaatcaaacatcctaatttggtccgctacttcggagtggaactgcaccgtgaagagatgtacatctttatggagtattgtgatgagggaactctcgaagaagtttcgaggcttggactgcaggaacacgtcatccgactttattctaaacagatcaccattgctataaatgttctccatgaacacggaattgttcacagggacatcaagggagcgaatatctttttgacatcgagtgggctgataaagctaggggacttcggttgcagcgtcaaacttaagaacaacgcccagaccatgcctggtgaggtcaattcaacacttgggacagctgcctatatggccccagaggttatcacccgcgctaaaggagaagggcatggcagggcagctgacatttggagccttggctgcgtggtgattgagatggtgactggcaagagaccgtggcatgagtatgaacacaacttccagattatgtataaggtaggcatgggacataaacctcccattccagagcggctgagccccgaaggcaaagactttctgtcacattgcctagaaagtgaccctaaaatgaggtggacagcctcccagcttcttgaccacagtttcgtgaaagtttgtaccgacgaagagtag

SEQ ID NO: 230967 - DNA, 4827 bp, synthetic construct
  misc_feature 1..4827: note = Description of Artificial Sequence: Synthetic coding sequence
  source 1..4827: mol_type = other DNA
atgagggaagccgctgccgctctggttccaccacccgctttcgcagtaacccccgcagctgccatggaggagccacctccaccccctccccctccccctccccctccggagccagaaacggaatctgaaccagagtgttgcttggccgcaagacaggaaggcactttgggtgactcagcttgcaaaagcccagaaagcgaccttgaggacttctctgacgagactaacaccgagaacctttacgggactagcccacccagcactcctcggcaaatgaaacggatgagcaccaaacaccagcgcaataacgtgggacggccagcctccagatctaatttaaaggaaaagatgaatgctccaaaccagcccccacacaaagatactggaaaaaccgtggagaatgtggaagaatattcatacaaacaggaaaagaaaatacgtgctgctctgcgcaccacagaacgcgataggaaaaagaatgtgcagtgtagttttatgcttgattccgtgggaggcagcttacccaagaagagcatccctgatgtcgatctcaacaaaccctacctatccctgggttgcagtaacgccaagctcccggtgtctgtacctatgcccattgctcgccctgcaaggcaaacttcccgtacggactgccccgctgatcggcttaaattttttgagaccttgcggctcctgctcaagttgacctccgtgtccaaaaaaaaagaccgggagcagagaggtcaggaaaatacctcgggattttggctcaatcgctccaatgagctgatttggctcgagctccaggcctggcacgctggccgaaccatcaatgaccaggactttttcctgtataccgccaggcaggctatccctgacatcattaacgaaatattaacattcaaggtggattatgggtcctttgcatttgttagagaccgcgcaggcttcaacggaacctccgtggagggacaatgcaaagccaccccgggtaccaaaatcgtagggtattctacccaccatgaacatctgcagcggcaaagggtctcctttgagcaggtgaagaggattatggagctgctggaatacatcgaggcgctctacccttctctccaggccctccagaaggactacgagaaatatgcggcaaaagatttccaagacagagtgcaggcgctgtgcctgtggttgaatatcacgaaggacctgaatcagaagctgcggattatgggaactgtccttgggattaagaatctctccgatattggctggcctgtgttcgaaataccctctcccaggccctcaaaggggaacgaaccagagtacgaaggagatgacaccgagggagagctcaaagaactggagtctagtacggacgagtctgaggaagagcagatctcagatccgagggtgcccgaaattagacagccaatagataactcattcgacattcagtcgcgcgactgcatcagtaagaagcttgaacggctggaatcagaggatgacagtcttggctggggggcacccgattggtccactgaagccggttttagtcggcactgcctgactagcatttaccgtccttttgttgacaaagccctgaagcagatgggccttaggaagctgattctgcgtctgcacaaactcatggacggaagtcttcagcgagcaagaatcgcactggtgaaaaacgaccgtccggttgaattcagtgagtttcccgatccgatgtggggctcagactacgttcagctctcccgaaccccacccagcagcgaggagaagtgcagcgccgtgtcttgggaggagctgaaggccatggatcttccaagtttcgagccagcctttctggtactgtgcagggtgctcctgaacgtcatccatgaatgtctaaagttgcggctcgaacagaggcctgctggggagccttcactgctgtcaataaagcagcttgtcagagaatgtaaggaggtccttaagggcggactgttgatgaagcagtactaccagtttatgctccaggaagtgctcgaggacctggagaagcctgattgcaatattgatgcttttgaggaagacttgcacaagatgttgatggtctatttcgactacatgcgatcctggatccagatgttgcagcaattgccgcaagctagccattcccttaagaatttgcttgaggaggaatggaactttactaaggaaattacacattacatccgcggtggagaggcacaggcagggaaacttttctgtgacatcgcgggaatgctgctgaagtccactggctcatttctcgaattcggacttcaggagagctgcgctgaattctggacatcggcggacgactcctctgcaagtgacgagatccgcaggtccgtgatcgagatttcacgtgccctcaaggaactgtttcacgaggcgagggagcgcgctagcaaagccctgggattcgctaaaatgctgcggaaagatctggagattgctgccgagttccgcctgtctgccccagtaagggacctgttagatgtactgaagagtaaacagtatgttaaagtgcagatcccgggtctggaaaatttgcagatgtttgtccccgacactctagccgaagagaagtcaatcattcttcaacttttgaacgcagccgcaggcaaggactgcagcaaagactctgatgatgtcttgattgatgcctatctgcttctgacaaagcatggcgaccgggctcgcgattctgaggattcttggggcacctgggaggcccagcccgtcaaagttgtacctcaggtggagaccgttgatacgctacggtcaatgcaggtagacaacctgttgttggtggtgatgcagagtgctcacctaacgattcagcgcaaggcctttcagcagtcaatagaaggtctgatgacgctgtgtcaggaacagacctcctcacagccggtgatcgcgaaggcgctgcagcaacttaaaaatgacgcgttagaactgtgcaatcgtatctccaacgccatcgaccgagtcgaccacatgtttacctctgaatttgatgctgaagtcgacgaaagtgaaagtgtgactctacagcagtactatcgggaagcaatgatccaaggctacaactttggattcgagtaccacaaagaagtggtgcgactgatgtctggtgaatttcgacagaagatcggcgacaaatacatatcttttgctcgcaagtggatgaactacgtgctgaccaagtgcgaatcgggacgcggaacgagaccgagatgggccactcaggggttcgactttctgcaggcaattgagccggcattcattagtgccctacccgaagatgattttttgagcctgcaggccctcatgaacgagtgcattggacacgtcattgggaaacctcatagccctgtcaccgggctctacctcgctatccatagaaactcccctaggcccatgaaagttccaagatgccattcagatccacccaatcctcacctgatcatccctacacccgagggattcagcacacgcagcatgccatccgatgcaagatcacatggttcaccagccgcagcagcggctgccgctgcggctgctgttgccgcttctagaccgtccccatccggcggagattccgtgttaccaaaaagcatcagctccgcacacgatacacgcggatcatctgtcccagaaaacgacaggctcgcttctattgctgcagaattacagttccgaagcttgtccagacacagtagtccaacggaagaacgggatgaaccagcgtaccccaggggcgattcttctggttctacccgcaggtcctgggaactgaggactctaatatcccagagcaaggacactgcaagcaaactgggaccgatcgaagccattcagaaatcggtaagactgtttgaagagaaacgatatcgggagatgcggagaaagaatatcatcggtcaggtctgtgacacacctaaaagttacgataatgtgatgcacgtggggctgcgcaaggtgacctttaagtggcaaagaggaaataagatcggcgagggccaatacggaaaggtctacacctgcatctccgtggacactggtgagctgatggcaatgaaagagatccgttttcagcctaatgatcacaaaaccataaaggagacagcagacgagcttaaaattttcgaggggatcaagcacccaaatttagtcagatacttcggggtggaactgcaccgagaagagatgtacatcttcatggagtactgcgatgaaggcaccctcgaagaagtctccaggctgggactgcaggaacatgtcatccgcctctactcaaagcagatcaccatagctattaatgtacttcacgaacatgggattgtccaccgagacattaagggcgcaaacatttttctcaccagtagcggcctcatcaaactcggggacttcggctgctctgttaaacttaagaataacgcacagactatgcccggtgaggttaattccacattgggaaccgcagcttatatggcccctgaagttatcacacgggcaaagggcgaagggcacggcagggcagcagacatctggtctcttggttgtgttgtaattgaaatggtcacagggaaacgtccatggcacgagtatgagcacaacttccagattatgtacaaggtcggaatggggcataagccacccatccccgaaagattgtcacctgaggggaaggactttctgtcccattgccttgagtctgaccccaagatgagatggaccgcctcccagctgctggaccattcgttcgtgaaagtgtgcaccgacgaagaatag

SEQ ID NO: 230968 - DNA, 4497 bp, synthetic construct
  misc_feature 1..4497: note = Description of Artificial Sequence: Synthetic coding sequence
  source 1..4497: mol_type = other DNA
atgagagaagctgcggctgcacttgtgcctccaccggcatttgctgtaacgcccgctgccgctatggaggaaccccctccccctcctccaccaccgccacctcctccagaaccggagaccgaaagtgaacccgagtgctgtctggctgccaggcaggagggcacactcggggactcagcctgtaagtctcccgagtccgatctcgaagattttagcgacgagacaaatacagaaaatctttatggcacatcccctcctagcacaccacgccagatgaagcggatgagtactaaacaccaacggaacaatgttgggcgacccgcttcgcgaagtaatctcaaggaaaagatgaatgctccaaaccagccccctcacaaagacaccggaaagacagtggagaacgtcgaagaatatagttacaagcaggaaaaaaagattcgcgctgctttgcggactacggagcgcgatagaaaaaaaaatgtccagtgttcctttatgctcgactcagtcggagggtctttacctaaaaagtctattcctgacgtggatctcaacaaaccctatttgtcacttggctgcagcaatgcgaagttacctgtgagtgtcccaatgcccattgccagaccagccagacagaccagcagaacggattgccccgcagatcgtttgaagttttttgagaccctccgtcttctgctgaaactcacaagcgttagtaaaaagaaagacagagagcaaagagggcaagaaaacacatcggggttctggctaaataggagcaatgagctcatttggctcgagctacaggcatggcacgcaggtaggaccatcaacgatcaggacttcttcctgtacaccgctcggcaggctatacctgacattataaatgagattctgacgtttaaggtggattatgggagtttcgccttcgttcgagaccgtgccggatttaatggcacgagtgtggagggccagtgcaaagcgacccctgggacaaaaatagtaggctacagcacgcaccacgagcacctgcagagacagcgggtgagtttcgaacaggtaaagcgcattatggagctattagagtacattgaggcactttatccctccctccaagctctccagaaggactacgagaaatacgccgctaaggacttccaggatcgcgttcaggcactgtgcctgtggctcaatataactaaggatcttaaccagaagctcaggatcatggggacagtcctggggatcaagaacctgtctgacatcggatggcccgtcttcgaaatcccaagcccacggccttctaagggcaacgagcctgagtacgagggcgacgacactgagggtgagctaaaggagctggaatcttcaacggacgagtccgaggaggaacagataagcgatccacgagtgcccgagatccggcagcccatcgataactctttcgacatacaatctcgcgactgtatttctaaaaaactggaaagacttgaaagcgaagacgattcattaggatggggagccccagattggtcaaccgaggcaggtttttcccggcattgcttgacgtctatctaccggccatttgtcgataaagccctgaaacaaatgggtttgaggaagctgattttgcgtcttcacaagctcatggacggaagtttgcaaagagcaagaattgccttggtgaaaaatgatcggccagtggagttttcagaattcccggaccctatgtggggctcggattatgtccagctgagcaggactccgccatcatcagaagagaagtgcagcgcggtcagctgggaagagcttaaagctatggatctcccctcattcgaacctgcttttctggtgctttgccgcgtgctgctcaatgtcatccatgagtgtctcaaactgcgtctggaacagcgtccggctggtgagccatccctcctgtccatcaaacagctcgtgcgcgaatgcaaggaggtgcttaaaggaggattgttgatgaaacagtactaccagttcatgttgcaagaagtgctggaggacctggaaaaacctgactgcaatattgatgcttttgaggaagacctgcacaaaatgctaatggtgtactttgattacatgcggtcatggatccagatgcttcagcagttacctcaggcctctcactcactgaagaacttgctggaggaagaatggaactttaccaaggagatcacgcactacatccgcggtggcgaggcccaggccggaaagctattttgtgatattgctggcatgctactcaagtcgacaggaagttttcttgagttcgggctgcaggagagctgtgctgagttttggactagtgcggacgattcatcggcatccgacgagattcgacgctccgtgattgagatcagccgcgcattgaaggagttatttcatgaggctcgtgagcgtgcttctaaagccctgggcttcgctaagatgctgagaaaagatcttgaaattgctgccgagttcaggctctccgcccctgtgcgcgacctgcttgatgtactgaaatcaaagcagtacgtgaaggtgcagatccctgggctcgaaaatttgcagatgtttgtgcccgacaccctcgccgaggaaaaatccattatcctccagctgctcaacgccgctgcagggaaagactgttccaaagattctgatgacgtcttgattgacgcttaccttctactgaccaaacacggcgaccgcgctcgcgactctgaggactcatggggcacttgggaggctcagcccgtgaaggtagtgcctcaggtggagactgtcgatacccttaggtccatgcaggtcgataatcttctcctggtggtgatgcagagcgcacacctgaccattcagaggaaagccttccagcagtcgatcgaaggccttatgacgctttgtcaggagcaaacctcatctcagcccgtaatagccaaagctttgcagcagttgaaaaatgacgctttagagttgtgcaataggatttcgaacgccattgatcgcgtggatcatatgttcacttcggaattcgatgccgaggtcgatgagagcgagtctgttaccctgcagcagtattaccgcgaggcgatgatccagggatacaacttcggatttgaatatcataaagaggtcgtacgtcttatgtctggagaattcagacagaagattggcgacaagtatatttctttcgccagaaagtggatgaactacgtcttgaccaaatgtgaaagcggcagaggcacacgacctaggtgggctacacaggggttcgactttcttcaagcaattgagccggcatttatcagcgctttgccggaagatgatttcctcagccttcaagccttgatgaacgagtgtatcgggcacgttatcggcaaaccacacagccctgttacaggattatatctggccatccatcggaatagccctcgacccatgaaagtgccaagatgccactctgacccaccaaaccctcatctgatcattccgacacccgaggggtttcgcggatcctcagtgccggaaaacgatcggctggcgtctattgctgccgagcttcaatttcgctcactgtccagacacagcagcccgacagaggaaagggacgagcctgcctatccccgaggggactccagcgggagtaccagaagaagctgggagcttaggacacttatctcacagtccaaggataccgctagtaagttggggcctatcgaggctattcagaagagcgtgcgtctattcgaggagaaaagatacagagaaatgcgtcgaaagaacatcatcggccaggtctgcgacacccctaagagttatgacaacgttatgcacgtgggcctgaggaaagtgactttcaaatggcaaaggggcaataaaatcggcgaaggccagtacggaaaggtatacacatgcatctcggtggacaccggcgagctgatggctatgaaggagatccgttttcagcctaatgaccataagactattaaagaaacagcagacgaactgaagatcttcgaggggatcaaacatcccaatctggtcagatatttcggtgtcgagctccatagggaggagatgtatatctttatggagtattgcgatgaggggacactggaggaggtgagcagacttggcctccaggaacacgtgattcgtctctattcaaagcagatcaccattgccataaatgtacttcatgagcacggaatagtacacagagacatcaagggtgccaatatttttctaactagcagcggactgattaaactgggggactttggttgtagcgtcaagttgaaaaataatgcccagaccatgcccggtgaggtcaactccacactggggactgccgcttacatggccccagaagtgattacgagggctaagggagaagggcacggacgcgcagccgacatttggagcctgggctgtgtcgtgatcgaaatggtcacaggaaagatttgtaaggacacggagtag

SEQ ID NO: 230969 - DNA, 324 bp, synthetic construct
  misc_feature 1..324: note = Description of Artificial Sequence: Synthetic coding sequence
  source 1..324: mol_type = other DNA
atggaggagccaccacccccacctcccccacctccaccccctcccgagcccgagactgaatccgagcccgaatgctgcctggcagccaggcaagaaggcaccttaggcgatagcgcatgcaagagcccagaatctgaccttgaagacttttccgacgaaaccaatacagagaatttatacggtactagtcccccaagtacgcctcggcagatgaagcgaatgtctactaaacaccagagaaataatgtgggcaggcctgctagtcggtctaacttaaaaggggtcaggcagatcagccatgcagtatcttcctccttgaactag

SEQ ID NO: 230970 - DNA, 1866 bp, synthetic construct
  misc_feature 1..1866: note = Description of Artificial Sequence: Synthetic coding sequence
  source 1..1866: mol_type = other DNA
atggagcaggttcccggaggaagcttgtccgccttgctcaggagcaagtggggtccactgaaagataacgagcaaactattgggttctacactaagcaaattctggagggcctcaaatacttgcacgacaatcagatagtccatcgtgatattaagggtgacaacgtgctcattaatacttactctggcgtgctgaagatttctgacttcggcaccagcaagcgactggcgggaattaatccatgtacagagacttttaccgggaccctccagtacatggcaccagaaattatcgataagggaccaagggggtacggtaaagcagcagatatctggagcctcggatgcaccataatcgaaatggccacggggaagcccccattctatgagttgggggaaccacaggccgcaatgtttaaggtcggtatgtttaaggtgcatcctgagatccccgaaagtatgagtgcggaggcaaaagctttcatcctgaagtgcttcgagcctgatcccgacaagagagcctgtgcgaacgatttgctcgtagatgagtttctgaaggtgtcgagtaagaaaaaaaaaacacaaccgaaactctcggcactgagtgccggaagtaacgagtacctaaggagcatctccctccccgtgccggtgctcgtggaggatacgtcgtccagcagtgagtacggttcagtgtcacctgacaccgagctgaaagttgatccattttcattcaagaccagggccaaatcttgtggcgagagggacgtcaaagggatcagaacacttttcctcggcattccggatgaaaactttgaagatcactccgccccaccttctccagaggagaaagatagtggattcttcatgttaagaaaggattctgaaagacgggctacacttcaccgcatccttacggaggaccaagacaagatagtccgaaaccttatggagtccctcgctcaaggtgccgaagagcctaagttgaagtgggaacatataacaaccctgattgcctctctacgcgagttcgttagaagcactgaccgtaaaattatagcaacgacccttagcaaactgaaactggaactggacttcgatagtcacggaatttcccaagtgcaggttgtcttattcggcttccaggacgctgttaacaaagtgttgcgcaaccacaacatcaagccacactggatgtttgctctggacagcattatcagaaaagcagtacaaacagccatcacaattctggtgcctgagttgaggccacatttctcactagccagcgaatctgacaccgcggaccaggaggaccttgacgttgaagatgaccacgaggagcagccatccaatcagactgttcgtcggcctcaggcagtgatcgaggacgctgttgctacaagcggcgtgagcacgttatcttctaccgtcagccatgactcacagagcgctcatcggtccttgaacgttcagttaggtcgtatgaagatcgaaacgaacagactcctagaggagctcgtgcgtaaggagaaggagctccaggccctgttgcatagggccattgaggagaaggaccaagagatcaagcacctcaaacttaaaagccagcccattgaaattcctgagctgccagttttccatctaaacagctcagggacgaatacggaagattccgagctgacagactggctaagggtgaacggcgcagatgaggacaccatttccaggtttcttgctgaggactacaccctgctggacgtgctgtattacgtcacgcgagatgacttaaagtgtttaagactgagggggggtatgctgtgtactctgtggaaggccatcattgattttcgaaacaagcagacttag

SEQ ID NO: 230971 - DNA, 4125 bp, synthetic construct
  misc_feature 1..4125: note = Description of Artificial Sequence: Synthetic coding sequence
  source 1..4125: mol_type = other DNA
atgtcaaccgaggctgatgaagggattaccttctcagtgcctccttttgctccatccggcttttgtaccataccagagggaggcatatgcagacgcggaggcgctgccgctgtgggggaaggagaagaacatcagctgcccccaccacctccaggctctttttggaatgtggaaagcgccgcagcacctggaatcggctgccctgctgccacctcatcctcttcggccactcgcggtaggggaagttctgtgggcggtgggtctagacgaactaccgttgcttatgtgatcaacgaagcgtctcagggccagctcgttgtggcagagtctgaggcgctgcaaagtttgcgggaagcctgcgaaaccgtgggcgctactctagagaccctgcactttgggaagctggacttcggagaaacaactgtgttggaccgcttttacaacgccgacattgccgtcgtggaaatgtcagacgcctttaggcagccttctctcttctaccacttgggcgtgcgagaaagcttctcaatggccaataatattatcctgtattgcgacaccaattccgactctctgcagtccctgaaggaaatcatctgccagaaaaacaccatgtgtactggcaactataccttcgtgccgtacatgatcaccccccacaacaaagtttactgttgcgattcctcttttatgaaagggcttacagagctgatgcaacctaattttgagctcctgctcgggccaatctgtctcccactggtagaccgcttcattcagttgcttaaggtggcccaggcctcatctagccaatacttccgcgagtccattctcaacgacattaggaaagccaggaacctgtatactggaaaggaactggcagccgagctagcgcgtatcaggcagcgggtggacaatatcgaggttcttaccgccgacatcgtgatcaacctgttgttgtcctatagagatattcaagactatgattccattgtcaaactggtggagaccctggagaagcttccaacattcgatctcgcatctcaccatcatgtcaaattccactacgcatttgctcttaaccgccgaaacctccctggagatcgggctaaggcactcgatatcatgatccctatggtccagtctgaaggacaggtggcaagcgacatgtattgcctcgtgggccgaatctataaagacatgtttctggactcaaatttcactgataccgaatctagggaccacggcgcttcctggtttaaaaaagctttcgagtccgaacccactctccagagcggcataaattatgccgttctgcttcttgccgctggccaccagtttgagtcatcatttgagcttcggaaagtaggagtgaaactgtcgagcctcctgggcaaaaagggcaatctggagaaactgcagagctactgggaagttggatttttcttgggcgcttcggtcttggccaatgatcacatgcgggtgattcaagcatccgaaaaactctttaaactgaagactcccgcatggtatctgaaatcaatcgtggaaaccatcctgatttacaagcattttgtgaaactgaccacagagcaaccggtggcaaagcaggaactggtcgatttctggatggactttctcgtcgaggcgactaagacagatgtgacagtagtgaggttcccagtcctcattctggaacctaccaaaatataccagccgtcttacctgtctatcaataatgaggtagaggagaagaccatatccatctggcatgtactccccgatgacaagaagggaatccatgagtggaattttagcgcttcctctgtgcggggtgtttccataagtaagttcgaggaaaggtgctgttttctgtacgtcctgcataactcggacgacttccagatatacttctgtacggagctacactgtaaaaagttcttcgagatggtcaatacaataactgaggagaaaggacgctctactgaagaaggggactgtgaatccgacctgcttgagtatgactacgaatacgatgaaaatggagacagagtggtgcttggtaagggtacctatggaattgtgtacgctggcagggacctaagtaaccaggtgcgtatagccattaaagagatccccgagcgtgatagcaggtacagccagcccttgcatgaggagatagccttgcacaagcatttgaagcacaaaaatatcgtccaataccttgggtcatttagcgagaatggcttcatcaagatctttatggagcaggtgccaggtggatcactctccgccctgctgcgttccaaatggggtcctcttaaggacaatgaacagacaatcggattttatactaagcagatcctggaaggactcaaatacctgcacgataatcaaatcgtgcatcgcgacatcaagggagataatgttctaatcaacacctactccggagtgctgaagatttctgacttcggcaccagcaaaaggttagccggtattaatccctgtactgaaaccttcaccggcacactccaatacatggcccctgagatcattgataaaggcccacgcggttatgggaaggctgctgacatctggtccctcggctgtacaattatagagatggccaccggaaaaccacccttttacgagttaggcgagccccaggccgctatgtttaaggttgggatgttcaaggtacatccggagattcccgagtctatgtcagctgaagccaaagcatttatcctcaaatgctttgaaccagaccctgataagcgggcatgcgccaatgatctccttgtggatgagttcctcaaggtgtcctcaaaaaagaagaagacacagcccaaactgtccgccctgtcagcgggttcaaatgaatatctgcggtccattagtctgccggttcctgtgctcgtcgaagatacatcgagctcctccgagtatggctcagtcagtcctgacacagagctgaaggtcgacccattttccttcaaaacacgcgcaaagtcctgtggcgaaagagacgtgaaggggatacgtaccctgttcctgggcatcccagacgagaacttcgaagaccactctgcgcctccgagcccagaagagaaggatagtgggtttttcatgctccgtaaagattctgaacgaagggccaccctccataggatcttaacagaggaccaggataagattgtacgaaatctcatggagtctctggcccagggggctgaggaaccgaagttgaaatgggaacacattactacactgattgccagcctacgcgagttcgtccggtcaaccgatcggaagataattgctacgacactgagtaagctgaagctggagctggatttcgactcccatggcatctcgcaagtacaagttgtgctcttcgggttccaagacgccgtaaataaagttctgagaaaccataatatcaagccccactggatgttcgccctggactccattatacgcaaggctgttcagacagccatcacaatcctcgttcctgaactcaggccccacttcagcctggcctctgagtcggatacagccgaccaggaggatctcgacgtggaggacgaccatgaggaacagcctagcaaccaaaccgtacgacgtccacaggccgtcatcgaggatgctgtggctacttccggagtctcaactctatcctcaactgtgtcacacgattcccagagcgctcaccggagtttaaatgtacagctcggcaggatgaaaattgagacaaaccgcctacttgaggagttagtgcgcaaggagaaggagcttcaggccctgctccatcgggctattgaagaaaaagaccaggagatcaaacacctgaaactcaagtcccagcccatcgagattcctgagttgccggtgttccacctgaactcttccggaactaacaccgaggattccgaactcaccgattggctcagggtgaatggggctgatgaggatacgatcagccgattcctggcagaagattacaccttgctggacgtcttgtactacgtgacacgcgatgatctcaagtgtttgagactgcggggagggatgctgtgcacactgtggaaggctatcattgattttagaaacaaacagacctag

SEQ ID NO: 230972 - DNA, 3771 bp, synthetic construct
  misc_feature 1..3771: note = Description of Artificial Sequence: Synthetic coding sequence
  source 1..3771: mol_type = other DNA
acccttcagagggcttcgggagccgcaaccgaagcaccaagaagatcagaaccgcctcctggcagcggcgtaccttccggcgagcgcgctccagagcgaaggcggaggagaggaggtgagggcgctgcccgtgacgggtcttgtttagcgaggagggcacgatctagcccagagctgtggcttgccaggcggtgtgggtgggccggtgatgcagctgctgtagctgccaggcccggagagatgtccaccgaagcagacgagggaataactttctcggtgcctccctttgccccaagcggtttctgtaccatccccgagggaggaatatgccgtagaggaggggcagccgcagtcggagagggggaggagcaccagctgcctcctccaccgccagggagcttctggaatgtggaaagtgccgctgcgccaggaatcggatgcccagcagctaccagttcctcaagtgcaacgagaggcaggggttcgtctgtcggtggaggctcaaggagaaccaccgtggcgtatgtgatcaatgaggctagccaaggacaactggtggtcgcagagagcgaggcccttcaaagtctgagggaggcctgcgaaacagtcggtgctacgcttgaaacgctgcacttcggcaagctggacttcggcgagactacagtgctggatagattctacaacgccgacattgccgtcgtcgaaatgagtgacgctttccggcagccttctctgttttatcacttaggcgtgagggaatcttttagcatggctaataatatcattctctattgtgacacaaatagcgactcacttcagtccttaaaggagatcatctgccagaagaacactatgtgcacaggcaactacacttttgttccctacatgatcaccccccataacaaagtatattgctgcgatagctcttttatgaagggcctcacagaactgatgcagcccaattttgaattgctgcttggcccaatctgcctgcctctggtggacagattcattcagttgttgaaagtggcccaggcctcctcctcacagtactttcgggagagcatcctgaatgatattcgaaaagcacgaaacctgtacaccgggaaggagctcgcagccgagcttgccaggattaggcaacgggtcgacaatatagaagtgttaaccgccgacatcgtgattaatttgctgctgtcctaccgtgacattcaggactatgatagcatagtgaagctcgtggagactctagagaaactgcccacatttgacttagcttctcaccaccacgttaaattccattacgcgtttgcactcaatcgccgaaaccttccaggggatcgagcaaaggcactggacattatgatccctatggtgcagtccgagggccaggtggcctcagacatgtattgcctcgtgggtcgcatatacaaggacatgtttttagactctaactttacagacacagaatctagggaccacggcgctagctggtttaaaaaagcttttgagtctgagcctacgctgcagtccggaataaactatgccgtgctcctacttgctgcaggacaccagtttgaaagtagctttgagctgcgtaaggtgggggtgaagctttcctcactgctcggaaagaaaggaaacttggagaagcttcaaagctactgggaggtcgggttcttcctgggggcatccgttctggccaatgatcatatgcgagtgatacaggcctctgagaaactgtttaaactgaaaaccccggcttggtacctcaaatccatcgtcgagactattctgatctataagcactttgtgaagctgaccacagagcaacccgtggccaagcaggaactggtggacttctggatggactttctggttgaggcaaccaaaaccgatgtcacagtcgtcagattccccgtgctcatcctggagcccacaaagatttatcagccctcctacttaagcatcaacaacgaggtcgaggaaaaaacgatcagcatatggcatgtgctgcccgatgacaaaaaaggcatccatgaatggaacttcagtgcttcctcggtgcggggtgtctctatcagtaaatttgaagagcgctgttgctttctttacgtgctgcacaactccgatgactttcaaatctatttctgtacggagctccattgtaagaaattctttgaaatggtgaacacaatcactgaagagaaaggacgcagtaccgaagagggcgattgcgaatctgacctgctggagtatgactatgaatacgatgagaacggcgatcgcgtggtcctgggaaaaggtacatacggcattgtctacgctggccgagacctgtcaaaccaggtcagaatagccatcaaagaaattcctgagagagactctcggtacagccagccattgcatgaggagattgcactgcataagcatctgaaacataaaaacattgtccagtatctaggctccttctccgagaacggcttcattaaaatctttatggagcaggttcctggaggatctctttccgccctgctacgatctaagtggggacccctgaaagacaatgaacagacaatcggtttttacactaaacagattttggaaggcttgaagtacctgcacgataaccagattgttcacagggacatcaagggagacaatgtgcttatcaatacttactcaggtgtgctgaaaatttccgacttcggtacctctaagaggctagcaggaatcaacccatgcaccgaaacctttacaggtaccctccaatacatggctcctgagattatagacaaagggccacgaggatatgggaaagcagctgacatctggagcctgggatgcaccattatcgaaatggcgactggaaagcccccattttacgaattgggcgagcctcaggccgctatgtttaaagtcggaatgtttaaggtgcatccagagatccccgagtccatgagtgcggaagccaaggcttttattctcaagtgttttgagccagatccagacaaaagagcctgcgcgaacgacctactggtcgatgaattccttaaggtttcttcaaagaagaagaagactcagcctaagttaagcgacctcagcattgctcaagctgagtacctgagatctataagccttcccgtacccgtgctcgtcgaggatactagttcatcctcagagtatggatcagtctctcccgatacagagctcaaggtagacccattttcatttaaaactcgcgctaagagctgcggcgagcgcgacgttaagggaatcagaacactgttcttgggaatacccgacgagaattttgaagaccattcagccccaccctctccagaggaaaaggacagcggtttttttatgctgagaaaagatagtgaacggagggccacacttcaccggatcctcactgaagatcaagacaagatcgtgcgcaacctgatggaatcactggcccagggagcggaagaaccaaaactcaagtgggagcacattaccaccttgatcgctagtctgagggagttcgttcgctcaacagacagaaagatcattgcaacaacgctgagcaaattgaagctcgaactagatttcgatagccacgggatttcacaggttcaggtggtgttgttcggctttcaggatgcagtgaataaagtgttgcgtaaccataacatcaagcctcactggatgtttgctctcgacagtattatcagaaaggccgtgcaaacagcgatcactattttggtacccggaattaagccctag

SEQ ID NO: 230973 - DNA, 3867 bp, synthetic construct
  misc_feature 1..3867: note = Description of Artificial Sequence: Synthetic coding sequence
  source 1..3867: mol_type = other DNA
atggcaggcccatgtccaagaagcggagctgagcgggcaggttcctgctggcaggatcctctcgcagtggccctttcgagaggacggcagttggcagccccacctggtcggggatgcgcgcgtagtcggccactcagtgttgtctacgttttgacacgtgagccgcagccaggcttagaacccagggaaggaacagaggcggagcccttgcccctgcgttgcctgcgcgaagcatgcgcacaagtgccccgacctcggccaccccctcagttgagaagcctaccgttcggaaccctggagcttggcgatacagctgcactggatgctttctacaacgctgatgttgtcgtgcttgaagtatcttcctccttggttcagcccagcctgttttatcatctgggcgtgcgtgagagctttagcatgaccaacaacgttctcctgtgtagtcaagcggatctcccagacctgcaggcgctccgcgaggacgtttttcagaagaatagcgattgtgtaggttcctatacactgatcccatatgtagttacggctactggcagggttctgtgtggggacgctggtctgttgaggggactggccgatggccttgtgcaggcaggggtcggtacggaggccctgctcacccccctggtgggaaggctggctagactgctagaggcaactcccacggattcttgtggttacttccgggagaccatacgcagagatatcagacaggcgagagaacgattctctggccctcaactgcgacaggagctggctcgcctgcaacggagactcgactcagtcgaactactcagccccgatattatcatgaacttgctcctcagctaccgcgacgtgcaggactacagcgccattatcgagctggttgaaacactgcaagctctccctacctgtgatgtggccgagcagcacaacgtctgtttccactataccttcgctctgaaccgacgcaatcggccaggagacagagccaaagccttatccgtgctgctgccgcttgtgcagctggaaggcagcgtggcacctgacttgtactgtatgtgtggtcgaatttacaaagacatgttctttagttctgggtttcaggacgctgggcatcgcgaacaggcatatcattggtacaggaaggcgtttgatgtggaacccagtctacattcgggcattaatgcggcagttctgctgatcgcagctggacaacactttgaggattccaaggaattgcggttaataggcatgaagctgggctgtcttctggcgaggaaaggctgcgtggagaagatgcagtattattgggacgtgggtttttatctaggcgcacaaatcctagctaacgaccctacacaagtggtgctggctgccgagcaactatacaaattgaacgcaccaatttggtatctcgtgagcgtgatggaaactttcctcctttatcagcacttccgtcctacccctgagccaccaggagggcctccgcgaagggctcacttttggctccatttcttacttcagtcctgccagccatttaaaacagcctgcgctcagggtgatcagtgcttggtcctggtactagagatgaataaggtgctgctacctgccaagttggaggtgcgtgggacagacccagtctcaacagtcactctatccctcctggagccggagacacaggatatcccgagtagttggacctttcctgtggcaagcatctgcggagtcagtgcttctaaacgggatgaaagatgctgtttcctttacgctcttcccccagctcaggacgtacagctttgttttcccagtgtggggcactgtcaatggttctgcggtcttatacaggcatgggtcactaaccctgattcaactgctccagcagaagaggcagaaggagcaggcgagatgttggagtttgactacgagtacactgagactggagaacgacttgtgctggggaagggcacgtatggcgtggtgtacgccggtagggaccgccacacaagagtgcgaatcgcaattaaggagatccccgaacgcgactctcggttttcacagccactgcatgaggagatcgccctgcaccggcgtctcagacataagaatatcgtccgctacctcggatccgccagtcagggaggctacctgaagatttttatggaagaagtaccaggcggaagcctttctagcctgctccgctccgtgtggggccctttaaaggataatgaatcaacaattagtttctacacacgccagatcctacagggcctggggtatctgcacgataatcacatagtgcaccgggacattaaaggcgacaatgtgttaatcaatacttttagcggcctgctaaagattagcgatttcggtacaagcaagagactcgctggtatcacaccttgtaccgagacatttaccggtacattgcagtacatggcccctgagattatagatcagggacctcgaggttacggtaaagccgctgatatctggagtctggggtgcactgtgatagaaatggcaacggggaggccgccattccatgaactggggtcgccgcaagccgctatgtttcaggtagggatgtataaggtacacccacccatgccatccagcctttcagccgaagcccaagcgttcctcttgcgaaccttcgaaccagatcccagactcagagcaagcgcacaaaccctgttgggcgacccctttttgcaaccaggaaagcggtcgaggtcgccatcttcccctcggcacgccccacgaccgtccgacgctccctcggcctcacctacgccgagcgcaaattcaaccacccaatctcagactttcccatgtccacaggctcccagccagcaccctccatctccacccaaacggtgtctgtcctacgggggaacgtctcaactgcgggtgcctgaggagccagcagccgaagagcccgctagcccagaggaatccagcggactttctctgctccaccaggaaagcaaaaggcgcgctatgctcgcagccgtcttagaacaggagctccccgcactagccgagaatttacaccaggagcagaagcaggagcaaggggctaggctgggtcggaatcatgtcgaggagctcttacggtgtctgggggcacacattcacacacctaacagacgccagctggcccaagaattgagggctctgcagggccgtctgcgggctcagggactgggccctgcgctcctccatcgaccgttgtttgccttcccagatgccgtaaagcagatactacggaaacgtcagatccggccacactggatgttcgtcctggactccttgctgtcccgcgctgtgcgcgctgctcttggcgtccttggcccagaagttgaaaaggaagctgtcagcccccgttccgaggaactgagtaatgagggagatagccaacaatcccccggacaacaatctccattgccggtagagccagaacagggccctgccccattaatggtgcagctgagcttactccgagcggagaccgaccgactccgggagatactggccggaaaagaaagagaataccaagctttagtacaaagggcactgcagcgccttaacgaggaagctcgaacttatgtgctcgctcctgagccccctaccgccctatcaaccgatcagggcctggtgcagtggctgcaagagctcaatgttgattcagggactatccagatgctgttgaaccacagcttcactcttcataccctgttgacatatgccactagagacgacctaatttacacacgaataaggggagggatggtgtgtcgcatctggcgcgcaatcttagctcagcgggcaggatcaacacctgtaacaagcggaccatag

SEQ ID NO: 230974 - DNA, 315 bp, synthetic construct
  misc_feature 1..315: note = Description of Artificial Sequence: Synthetic coding sequence
  source 1..315: mol_type = other DNA
atggtccagctctccctgctgcgtgcggagaccgaccggctcagagagatcttagcaggcaaagagcgagaataccaagccctggtccagagggctctgcagcggctgaatgaagaagccaggacttacgtcctagcccctgagccaccaacagctttatcgaccgaccagggactggtgcagtggctgcaggagttgaatgttgacagtggtacaatccagatggggagggatggcatgccccatcttgaaggacacctcggtacagcaagccggattcatacctcccatctttggacgctgcgcgcagaatag

SEQ ID NO: 230975 - DNA, 3843 bp, synthetic construct
  misc_feature 1..3843: note = Description of Artificial Sequence: Synthetic coding sequence
  source 1..3843: mol_type = other DNA
atggctggcccatgtcctcggtccggcgctgagagggccggatcctgttggcaagacccactggctgtggccctgtcacggggacgccagctggctgctcctccaggcagaggatgtgctaggagccgacctctatcagtggtgtacgttctcactagggagccccaacctgggctggagccgagagagggcactgaagcagagccactgcctctgaggtgcctccgggaagcctgcgcacaggtgccacgccctaggcctcccccacaacttcgcagtctgccatttggcacactggaattgggcgataccgctgctttagacgcattctacaatgccgacgtcgtggtgctggaggttagcagctcgctcgttcagccctccctgttctatcatctgggagtgagagagtctttttcaatgacgaacaacgttctactgtgcagccaggccgacctacctgatctccaagccctgagggactgtgttggcagctacacccttattccctacgtagtgacagccacagggagagtgctgtgtggggatgccggtcttctacgcggtctggctgatggtcttgtgcaggcgggagttggtaccgaagcactgttgactcctttagtgggacgcctcgcaaggcttctggaggccacacctacggactcatgtggttactttcgcgagactatccgcagagatattagacaggcacgggagcgcttctcaggtcctcagctgagacaggaactggcaagactgcagagaaggctggattctgtcgagcttctgtctcccgatattatcatgaatcttctcctgagctacagggatgtccaggattatagtgctatcatcgaactggtggaaacacttcaggctttgcctacctgtgacgtcgccgaacagcacaatgtctgttttcactatactttcgcgctgaatagaagaaaccgccctggcgacagggccaaggccttaagcgtgctgctgcccctggtgcagctggaggggtccgtcgccccagatctctactgtatgtgtggcagaatctacaaggatatgttcttttcgtcaggattccaggatgctggtcacagagagcaggcatatcactggtaccgcaaagctttcgatgtggaaccctctctgcatagcggaatcaatgctgccgtgctgctgatcgctgctggccaacatttcgaagactccaaggaactccgtctcatcgggatgaagctggggtgcctcctcgctaggaagggttgcgtcgagaagatgcagtattactgggatgtgggcttttacctgggcgctcagatactcgccaacgacccaactcaagtcgtgcttgccgcagaacaactttacaagctgaacgctccaatttggtacttagtcagtgtgatggaaacatttctactgtaccaacattttcgcccaactcccgagcccccaggaggcccaccacggagggcccacttctggctccactttttgttgcagtcttgccagccatttaagaccgcctgcgcccagggcgaccaatgtcttgtcctggttcttgaaatgaacaaggtgctcctgccggcaaaattggaggtccgtggaactgacccagtctcgactgtgacattgagcttgctcgagccagaaactcaggacatcccaagctcgtggacgttcccagtggcctccatttgtggagtatcagctagcaagcgggacgaacggtgctgcttcctttatgccctacctccagcccaggacgtccagttgtgttttccatcagtgggacactgccagtggttttgcggacttatacaagcctgggtcacaaaccctgactccactgctcctgctgaggaggccgaaggagctggggaaatgctggaattcgactacgagtacacagagacaggcgaacgcttagtcttagggaaaggcacttatggcgtagtctacgcgggtagagacaggcatacccgcgtgcgtatcgctatcaaggaaattccggagcgcgactcaagattttctcaacccttgcacgaagaaattgctcttcatcggcgactcagacataagaatatcgtccgctatcttggatccgcgtctcaggggggataccttaagatctttatggaagaggttcccggtggatcactctcaagcctcctgaggtctgtgtgggggccactcaaggacaatgaatccaccatctcattctacacccgacagatccttcagggcttagggtaccttcatgacaaccacatcgtgcaccgagacattaagggtgataatgtgctgattaatacattttcaggtttgctaaagatcagtgatttcggaacatctaagaggctggcagggatcacaccgtgcacggagacctttacagggacgctgcaatacatggctcctgaaatcatcgatcagggtccgagaggctatggaaaggctgccgacatctggagtcttggatgcacagtcatcgagatggctactggcagacctccctttcacgaactggggtccccacaggcggctatgtttcaagtgggaatgtacaaagtccacccccctatgccaagctctctaagtgctgaagcccaggcctttttgctgaggacctttgaacctgacccaaggctcagggcttcagctcagacactgctgggagatcccttcctgcaacctgggaaacggtctcgtagcccctcctctccgaggcacgctccgagaccaagcgatgcaccgagcgcatcacctacccccagtgcgaattctactacccagtctcaaacctttccatgtccacaggcccctagccagcaccctccatcaccccctaaacgctgtttgtcctatggcggaacctctcagttacgcgttcctgaagaaccagccgcagaagagccagcatctcccgaggagagcagcggattgagcctattgcaccaggaatccaaaaggagagctatgttggccgctgtgctagagcaagagctacctgcacttgcggaaaaccttcatcaggaacaaaagcaagaacagggggcacgccttgggagaaaccacgttgaagaactccttagatgtctgggtgctcatatccataccccaaatcgcaggcaactcgcccaagaacttagggcccttcagggtcggttgcgggcacagggattgggccctgcattattgcataggcctctgttcgcgttccccgacgcggtcaaacagatcttgcggaaacggcagatcagacctcactggatgttcgtgcttgattcgttgctgagtcgagctgtgagggctgcgctgggcgtgctcggaccagaggttgagaaggaagctgtgagtcctaggtcagaagaactgtctaatgaaggcgacagccagcagtcgcccggacagcaatccccactgcccgtcgagcctgagcaaggtccagctccgcttatggtgcaactgtccctgttgagggctgaaaccgaccgtcttagagaaattctcgccggaaaggagcgcgagtaccaagcactggtgcagagggccctccagagactgaacgaggaggccaggacctacgtattggccccagaaccccctacagccctatccaccgatcagggacttgttcagtggttacaagaattaaacgttgatagcggaactatccagatgctgctcaaccacagctttaccctacacactctcctcacatatgccacccgggacgatctgatttatacaagaatccgtgggggaatggtgtgtagaatctggcgggctattctcgcacagcgagctggcagcacccctgtgaccagtggaccctag

SEQ ID NO: 230976 - DNA, 2397 bp, synthetic construct
  misc_feature 1..2397: note = Description of Artificial Sequence: Synthetic coding sequence
  source 1..2397: mol_type = other DNA
taaatgaatctgttgctgtcttatcgcgatgtccaggattattcagcaatcatcgagttagtggaaaccttacaggccctgccaacctgcgatgtcgccgaacagcataatgtgtgttttcattacacctttgctctgaaccgtagaaatcggcctggagacagagcgaaggcactgtctgtgctcttgcctctggtccagcttgagggcagcgttgcgcctgacctgtattgtatgtgcggtcgtatttacaaagatatgttcttcagttcaggttttcaggatgccggtcatagagagcaggcttaccactggtaccggaaggctttcgacgtggagccttctctccattcaggaattaatgcagccgtgctcctgatagcagctggccaacacttcgaagacagtaaggagcttcgacttataggtatgaaactggggtgtctgttggccaggaaggggtgtgtggaaaagatgcagtactactgggatgttgggttttacctgggcgctcagatcttggcaaacgatccaacccaggtcgtccttgccgcagaacagctctacaaacttaacgccccaatatggtatctggtcagcgtgatggaaaccttcctcttgtatcagcacttccgccctacaccagaaccaccaggcggtcctcccaggagggcgcacttctggctccacttccttctccagtcatgtcagccctttaagactgcttgcgctcagggtgatcagtgtctggtcttggtgctggaaatgaataaggtactgcttcccgctaagctggaagtacgaggcacagaccccgtgagcactgtgactttgtctttgttggagcccgagactcaagacatcccttcctcttggacgttcccagtcgcgagtatttgtggggtgtccgcatccaagcgggacgagcgttgttgctttctttatgctttgccccctgcccaggatgttcaactgtgtttccccagcgtgggacactgccagtggttttgtggcttgatccaggcctgggtcacaaatcctgacagcacggcacctgccgaggaagcagagggcgctggcgagatgcttgagttcgactatgagtatactgaaaccggcgagcggctggtgcttgggaagggaacttatggggtggtgtatgctggcagagatagacacaccagggtgcggattgctatcaaagagataccagaaagagacagtcgctttagccagcccttacatgaggaaatcgcactgcataggcgcctgaggcacaaaaatattgtgcgctatctgggcagcgccagccagggagggtacctgaagatctttatggaagaagtccccggaggttcactgagttctctgcttagatcagtgtgggggccattaaaagataatgagtctaccatatccttctatactagacagatattgcagggccttgggtacctgcatgataaccatatagttcatcgcgacatcaaaggcgataacgtgcttataaacactttcagtggattgctgaaaatctccgacttcggaacctctaaaagactggctggcatcactccgtgtacagagacgttcacaggaaccctgcagtatatggcgcctgagatcatcgaccagggccctagaggctatggtaaagccgcagatatttggtccctgggctgcactgtaattgagatggcaaccgggagacctccatttcacgaactaggcagcccacaagcagccatgtttcaggttggaatgtataaagtccacccccctatgccttcaagtctcagtgctgaagcgcaggcctttctgctccgaacattcgaaccagaccctagactgcgggcttccgcccagacattattaggagatccatttctccaacccggtaaacgctctcgatctccctcatccccgagacatgcccctcgccctagtgacgctccttctgcatcacctaccccgagcgccaattcaactacacagagccagactttcccatgtcctcaggcaccgagtcaacatcctccttcaccccctaaacgctgtcttagttatggtggtaccagccaactgagagtcccggaggagcctgctgctgaagaacccgcatctccggaagagagttcaggcctgtcattgctgcatcaggaatctaagcgcagggctatgctggctgctgtgctggagcaggaactgcccgctttggcagaaaatctgcaccaggagcagaagcaagagcaaggtgcgaggttaggacgaaaccatgtagaggaattgcttagatgccttggtgcacatattcacacccctaatagaagacagctagctcaggagctccgcgcattgcagggatggatgaatggcgaagataaagggagcttttag

SEQ ID NO: 230977 - DNA, 249 bp, synthetic construct
  misc_feature 1..249: note = Description of Artificial Sequence: Synthetic coding sequence
  source 1..249: mol_type = other DNA
taggagtaccaggccctcgtgcagcgggcattgcaaaggctgaacgaggaggctcgcacgtacgttctcgcccctgagccacccacagctctctcaactgaccaggggctggtgcagtggctacaagagctgaatgtcgactccggaactatccaaatgggcagagatggcatgccccacctggaggggcacctggggacagctagcagaattcacacttcacacctgtggaccctcagagccgaatag

SEQ ID NO: 230978 - DNA, 3867 bp, synthetic construct
  misc_feature 1..3867: note = Description of Artificial Sequence: Synthetic coding sequence
  source 1..3867: mol_type = other DNA
atggcaggaccgtgccctcgaagtggcgctgagagagctggctcttgttggcaggaccctctagccgtggcactgtccaggggtaggcagctagctgctcctcctgggagagggtgtgctaggagtcgtcctttatcagtggtttatgtgttaactcgggaaccacaaccgggtctcgagcccagagagggtactgaggctgagcccctcccgttgagatgtctgcgggaggcgtgtgcccaagtgcctaggcctcgccctccgcctcaactaagatcattgcccttcgggactttagaactcggagatacagccgcattggatgcattttacaatgctgatgtcgtcgtcctagaggtgagtagctccttggtccaaccttccctgttctaccacctgggggtgcgtgagtcttttagcatgaccaacaacgtgcttctttgcagccaggccgatctcccagacctccaggcactgcgggaggacgtgtttcagaaaaacagtgattgtgttggaagttacactctgattccttatgtcgtcacagcgactggaagagtgctgtgcggcgacgccggactccttaggggactggccgatggtctggtgcaagctggggttgggacagaagcactccttactccacttgtaggcagactcgcgagactcctggaagctaccccgacggactcctgtggatatttccgcgaaactatccgtcgcgatattagacaggctcgcgagagattctcgggcccacagctacggcaggagctagcaaggttacaacgcagactggacagcgtcgagctcctcagtcctgacattattatgaatttactgctctcctatagagatgtacaagactactccgctattatagagctcgttgagacactgcaggcccttccgacctgcgatgtagccgagcagcataatgtgtgcttccattacaccttcgccctcaatagacggaatagaccgggagaccgggctaaggcactgtccgtcctgcttcctcttgttcagctggagggatccgtggccccagacctgtattgcatgtgcggtcggatttacaaagacatgttcttcagcagtggcttccaagacgctgggcaccgcgagcaggcctaccattggtaccgcaaagccttcgacgtggagccttcactgcactccggtatcaatgccgctgtattgctcattgccgctgggcagcattttgaagacagtaaagaactcagactgattgggatgaagttagggtgcctgctggcgagaaaagggtgtgtcgagaaaatgcagtactactgggacgttggcttttatctgggcgcacaaatcctggcaaatgatcctacccaggtcgtcctggccgctgagcagctctataagctgaacgctcccatttggtacctagtatccgttatggagacatttctcctgtatcaacatttccgcccaacacctgagcctcccggaggcccaccgcgacgcgcacacttctggctgcacttcctccttcaaagttgccagcctttcaagacagcttgcgctcagggcgaccagtgcttagtgctcgtgcttgagatgaacaaggtactcctccccgcaaaactggaagtgagaggcaccgatccagtaagtaccgtcactcttagcttactggaacctgaaacgcaagacataccctccagttggacctttccagtagctagtatctgtggggtgtcagcctctaagagggatgagagatgctgctttctctacgctctgccaccagcccaggacgtgcagctttgtttccccagcgtagggcattgccagtggttctgcggactgatacaggcttgggtcactaaccctgacagcaccgcccctgccgaggaagccgagggcgctggggaaatgctcgaatttgattatgaatatacggaaacaggggaaagactggttctgggaaaaggcacttatggagtggtgtacgccggaagggaccggcataccagagtgcgcatcgcgatcaaggagatcccagagagagactcaagattcagtcagcccctccatgaggagattgcactgcataggagacttaggcacaaaaacatcgtccggtatctgggaagcgcatcccagggaggctacctgaagattttcatggaggaggtgcccggaggctctctgagttccctgttgcgaagtgtctggggcccactcaaggataacgagagtacgatttcattctacacaagacagatactgcaggggcttggctatttgcatgacaaccacatcgtccatcgtgacattaagggagacaacgtcttgattaatacttttagtgggctgctgaagatcagcgactttggcacctcaaagcggctggcagggatcacgccatgcacggagaccttcaccggaaccttgcaatacatggctccggaaattatcgaccaggggcctagggggtacggaaaggcggcagacatatggtctctgggctgcactgtgattgaaatggccaccggtcggcctcccttccatgagctcggtagcccccaggccgctatgttccaggtggggatgtacaaggtgcatccccctatgccatcctctttgagtgctgaggctcaggcctttttgctgagaacgttcgagccggatccccgactgcgcgcttccgcccagactcttctgggggatccctttctccaaccaggtaagagatccaggtccccctcatcaccaagacacgcaccacggcctagtgacgctccatcagcatcacctaccccatctgctaatagcactacccagtctcagacgttcccctgcccacaggccccatctcaacaccctccatcaccacccaagaggtgcttgagttacggcggaaccagccagcttagggtgccagaggaacctgcggctgaggaacccgcatctccggaagagagctcagggctgagccttttacaccaggaaagcaaaaggcgggcaatgctggcggctgtgctggagcaagagttacctgcactcgctgaaaacctgcaccaggagcagaagcaggagcagggtgcacggctggggaggaatcatgtggaggaacttctgcgttgtctcggggcacatatccacacccctaaccgcaggcagcttgcccaggagctgcgtgctctgcagggacggcttcgagcgcaaggactcggccctgcattactgcatagacctctgtttgccttcccggatgccgttaaacagattctcaggaagagacagatccgccctcattggatgttcgtgctagatagtcttctctcccgagccgtgagagctgctctgggcgtgctcggtccagaggtggagaaggaagccgtgtctcccaggtcggaagagctgagcaatgaaggggactcccagcagagtcctggtcagcaaagcccactgcccgtagagcccgaacaggggcctgcccctctgatggtccagctcagcttattgagagcagagacagaccggttaagagaaatcctggcagggaaggagcgcgagtaccaggccctcgtccaaagagcgctccaacgactgaatgaggaggcacgcacatacgtcctggctcctgagccccctacagccctgagtactgaccaggggctcgtgcagtggctacaggaactgaatgttgactccgggacaatccagatgctgctgaaccacagctttacgctgcacactctgttaacttatgcaactagggatgacctgatttatacccgaatacggggtggtatggtgtgccgcatctggcgcgcaatcctggcccagagagctggcagtactccagtcactagtggcccttag

SEQ ID NO: 230979 - DNA, 2394 bp, synthetic construct
  misc_feature 1..2394: note = Description of Artificial Sequence: Synthetic coding sequence
  source 1..2394: mol_type = other DNA
atgaacctgttattgtcttaccgggatgtgcaagactatagcgctattattgagctggtggagacgctgcaggccctcccaacctgtgatgtagctgagcaacataacgtttgttttcattacactttcgcgctcaatcggcgaaatcgcccaggcgaccgggcaaaggcactctcagtgctcctccccctggtacaactggaaggctccgttgccccagatctgtattgcatgtgcggcaggatttataaagatatgttcttcagttccggattccaggacgccggtcatcgggagcaggcttatcattggtaccgcaaggcctttgatgtggaacccagcctacacagtgggattaatgcggcagtgctgctgatagctgccggtcagcactttgaggacagtaaagagctacgactgattggtatgaagctgggttgccttctcgctcgaaaaggctgcgtggagaagatgcaatactactgggatgttggattctacctcggtgctcagatcctcgcaaatgaccctacacaggtggtgttagcggcagagcagctctataagctcaatgcccctatttggtatctggtctccgtgatggaaacattcctcctttaccaacacttccggccaacccctgaaccacccggaggacctccaaggcgcgcacatttctggttacacttcctcttgcaatcctgtcagccctttaagacagcatgcgcccagggggaccagtgcctggtattagtcttggagatgaataaggtactgttacctgccaagcttgaggtgagggggactgatcccgtctcaactgtgacgctctcactcttagagcctgaaactcaggacatcccttcaagttggaccttccctgtggcgagcatttgcggggtatctgcaagcaaaagagatgagagatgttgtttcctttacgcactgccacctgcacaagacgtgcagctctgtttccccagcgtgggtcactgccagtggttttgtggcctgatccaggcctgggtcacaaaccctgatagcactgcgccagcagaggaggccgaaggggctggcgagatgctagagtttgactatgagtacaccgaaacaggagagcgtctggtgctcgggaaaggcacgtacggggtggtctatgccggtcgggatagacatacccgtgttcgcatagcgataaaagagatccctgaacgtgattcgaggttttcacagccacttcatgaggagattgctttgcaccgaagactccgtcacaagaacatagtacgctacctcggatcggcgtcacagggaggctacctcaaaatttttatggaggaagtcccaggtggaagcctttcctccctcctgaggtccgtgtggggccctctgaaggataacgaatctaccattagtttttatacgcggcagatactgcaggggttgggttatctccacgacaaccacatagtgcaccgagatatcaagggcgacaatgttctcatcaacactttcagtgggctccttaaaatctctgatttcggcactagtaagaggctagctggcatcaccccgtgcacagaaacgttcaccggtacacttcagtacatggctcccgaaattatagatcaaggccctaggggctatgggaaagctgccgacatctggagtctgggttgtaccgtcatcgaaatggccacgggccgaccccctttccatgagcttggctcacctcaggcggctatgttccaggttggaatgtataaggtccatccgccaatgccttcttcccttagcgcagaggcgcaggcctttttattgagaacgtttgagcccgacccccgactgcgggcatcagcacagacactcctgggagatccatttctacagcccggaaagcgttcgcgcagtcccagtagtccgaggcatgcgccacgcccttcagatgcaccttctgcctcccctacaccttctgcaaactctaccacacaatcccagaccttcccctgtcctcaggctccatctcaacacccaccgtcaccccctaagcgatgcctttcatatgggggaacttcccaactgcgggtgcccgaagagcccgcagcggaggagcctgcttcgcctgaagaatcttcaggcctgagcctcttgcaccaggagagcaagagacgagcaatgctggcagcggttttggaacaggaactgccagcactggccgagaatctgcatcaggaacagaaacaggagcagggtgcacggctgggcagaaatcacgtcgaggagctgctgcggtgcctcggcgctcacattcatactcctaaccgcaggcaactggcccaggagctgcgggctctccaggggtggatgaatggagaagacaaaggttctttctag

SEQ ID NO: 230980 - DNA, 783 bp, synthetic construct
  misc_feature 1..783: note = Description of Artificial Sequence: Synthetic coding sequence
  source 1..783: mol_type = other DNA
atggatatcgccagcactaacaccagcaataagtcggacaccaatatggagcaagtgcccgctactaatgataccattaaaagacttgagagcaagctgcttaaaaaccaagcaaagcagcaatcggagtcgggtaggctctccctaggcgcatctcgagggtcaagtgtggagagcctgccacctactagcgagggaaagcgaatgagcgcagacatgtctgaaattgaggccagaatcgctgccacaacggggaatggtcagcctagacgcaggagcatccaggatctgaccgtgacaggaaccgaacctggccaggtgtcctctcgaagttctagcccatccgtgcggatgattactacatcaggccctaccagtgagaagcctactcgctctcacccttggaccccggacgattccaccgatactaatggcagcgataacagtatacctatggcctaccttacactcgaccaccagctccagccactggcgccatgcccgaattcaaaagaatccatggccgtatttgagcaacattgtaaaatggctcaagaatatatgaaggttcaaacggagattgctctgctgttgcagaggaagcaagaactcgtcgctgaactcgaccaggatgagaaagatcagcaaaatacaagtcggctggtacaggagcataagaagctgttggacgagaacaaatctttgagtacatactatcagcagtgtaagaaacaactggaggtaattcggtcacagcagcagaaaaggcaggggacctcctag

SEQ ID NO: 230981 - DNA, 1557 bp, synthetic construct
  misc_feature 1..1557: note = Description of Artificial Sequence: Synthetic coding sequence
  source 1..1557: mol_type = other DNA
atgtcaaccgcctccgccgcatcatcgagctcaagctcctcagccggagaaatgatcgaagccccttctcaggtattgaactttgaagagatcgactataaggagattgaggttgaggaggtagtaggcagaggagctttcggagtggtgtgcaaagcaaaatggagggccaaagatgttgcaataaaacaaatagagtctgaaagcgagcgcaaagcttttattgttgaactccgccagttaagtcgagttaaccaccctaacatcgtgaagctctacggtgcttgtctcaatcccgtttgtctcgtgatggagtacgccgaaggaggcagcttgtataacgtgctgcatggtgctgagccacttccttattacactgctgctcacgcaatgagctggtgcttgcagtgctcccagggcgtggcatatctgcattccatgcagcccaaggccctgattcaccgcgatctgaaacctcctaaccttctgctggttgcaggaggcaccgttctaaagatatgcgattttgggactgcgtgcgatattcagacccacatgactaacaataaggggtctgctgcatggatggcaccagaggtttttgagggctcaaactacagcgagaaatgtgacgtcttcagctggggtattatcctgtgggaagttattacaagaaggaagccctttgacgagattgggggacccgctttccgaatcatgtgggcagtgcacaacggaacacgccctccgctcatcaaaaacctgcctaaacccattgaatcacttatgacacgatgttggtccaaagacccaagtcagagaccaagtatggaggagatcgttaagatcatgacccacctgatgagatactttccaggcgcagatgagccactgcaatatccatgccagtactcagacgagggccagagtaactcggctaccagtactggcagcttcatggacattgcctctaccaatacatccaacaagtcagatacaaatatggaacaggtgcctgcgactaatgataccatcaagcgcctggagtcgaaactactgaaaaaccaggcaaaacaacagagcgagtcaggccgattatccctaggggctagtcgcggatcaagtgtcgagtcattgcctccaactagcgaaggaaagcgcatgagtgcagatatgtctgaaatcgaagctcgcatcgctgccactaccgcttacagcaagcccaaaaggggacacaggaagacagctagctttgggaatattcttgacgttcctgagatcgttatcagtggtaacgggcagcctcgccgtagaagtattcaggaccttactgtgacgggcacagaacctgggcaggtctctagcagatcttcctctcccagcgtgcgtatgatcacaacttctggtccaacctcagaaaaacccacacgctcccatccatggacccctgatgatagcactgatacaaacggatcagacaattctatccctatggcctatttaactctggatcatcagctgcaggctagaacctcatgtagaaccggccctgggtag

SEQ ID NO: 230982 - DNA, 1476 bp, synthetic construct
  misc_feature 1..1476: note = Description of Artificial Sequence: Synthetic coding sequence
  source 1..1476: mol_type = other DNA
atgtcgacggcctcagccgctagtagctcctcgagttcaagcgccggagagatgattgaggctccttcacaggtcctgaattttgaggaaattgattacaaagaaattgaagtggaagaggtcgtggggcgtggggcattcggggtggtgtgtaaggccaaatggagggccaaggacgttgccattaagcaaatcgaatccgagtctgagcgcaaagcgtttatcgttgaacttaggcaactgagtcgggttaatcacccaaacatagtgaaactgtatggcgcatgtctaaatcctgtctgcctcgtcatggagtacgccgagggaggaagtctgtataacgtcctgcatggagcagagccccttccctactataccgctgctcacgctatgagttggtgtcttcaatgtagccagggagtcgcctacctgcatagcatgcaacccaaggctctaattcaccgggacctgaaaccgccaaatctgctgttggttgctggtggcacggtgctcaagatatgtgactttggcactgcatgtgatattcagactcacatgaccaataataagggttcagcagcgtggatggcccctgaagtcttcgagggttccaactactcagaaaagtgcgacgtgttctcttggggaatcattctttgggaggtcattactcgccgaaaaccattcgatgagatagggggtccagcattccgaatcatgtgggctgtccataatggcacgcgcccacctctcatcaagaatctcccaaaaccaatcgagtccctaatgactagatgttggtcgaaagatccttctcaacggccttccatggaggagatcgtgaagataatgacccacctcatgcgctactttcctggggcagacgaaccccttcagtacccctgccagtattccgacgaggggcagagcaacagtgcaacttctaccggttcttttatggacatcgcctctactaatacctccaataaatctgataccaatatggagcaggtgccagccaccaatgatacgataaagaggctggagtctaagctccttaagaaccaagcaaagcagcagtccgaaagcgggcgtctctcactgggcgcttctagggggagctctgtggagtctcttccccctacttccgagggtaagcgaatgtctgctgatatgtcagaaatagaggctagaattgctgccaccacaggcaacggacagcccaggcgcagatctatccaagaccttacggtaacaggcaccgagcctggacaggtaagctctaggtcctcttctccctctgtgagaatgatcactacctccggcccaacgagtgagaaacctacaaggtctcatccctggacccctgatgatagtactgatacaaacggctcagataactcaattcctatggcctacctcacactggatcaccagctgcaggcccgaacctcttgtcgcactggcccaggatag

SEQ ID NO: 230983 - DNA, 1821 bp, synthetic construct
  misc_feature 1..1821: note = Description of Artificial Sequence: Synthetic coding sequence
  source 1..1821: mol_type = other DNA
atgtcaacagccagtgctgcttcctcctcttcctcctcttccgcgggagagatgatagaggccccatctcaagtcctgaactttgaagaaatcgactacaaagaaatcgaagtggaggaggtggtcggaaggggcgcttttggggtagtatgcaaagcaaagtggcgcgctaaggacgtggcgattaaacagatcgagtccgagtccgaacgtaaggccttcattgttgaacttcgccagctcagcagagttaaccaccccaacattgtcaaactctacggcgcttgtctgaacccggtctgcctggtgatggaatacgctgaagggggaagcctgtataatgtgctacacggggctgagcctctgccatattacactgcagcgcacgccatgtcatggtgcctacagtgcagccagggtgtcgcttacctacattccatgcagccaaaagccctgatccacagagacctcaagccgcctaacttgttactggtggctggcggaacagtgttaaagatttgtgatttcggcaccgcttgcgatatccaaactcatatgacaaataataagggctccgcggcttggatggctccagaggtgtttgaaggatctaattactccgagaagtgtgatgtcttctcatggggcataatactgtgggaggtgatcacccgccgtaaaccttttgatgagattggcggtcctgcctttagaataatgtgggccgtccataatggaacacggccacccctgataaaaaacctgcctaagccaatcgagtcattaatgacacggtgctggtcaaaggacccttctcagcggccttcaatggaggaaatagtaaagattatgacacacttgatgaggtatttccctggagccgatgaacctctccagtatccgtgtcaatacagcgatgaagggcaaagtaactcagccacttctaccggctccttcatggacattgcctccacaaacaccagcaataagtctgatactaatatggagcaggtcccggcaaccaacgatacaatcaagagactggagtctaagctgttgaagaaccaggccaagcagcagtcagagagcggccgactgagcttaggcgcttctagagggtcatccgtcgaatccttgcccccaacgtcagaaggcaagcgcatgagtgccgacatgtctgaaatcgaagcgagaattgcagctactactgcatactccaaaccaaaacggggacataggaaaacagcctcctttgggaacattctggatgtcccagagattgttatttctggaaatggtcagccaagacgcagaagcatccaggatttgacagtgaccggcacagagcccggacaggtgagttctcgttcgagcagcccgtcagtccggatgataaccacaagcgggcctacgtctgagaagcccacccgcagccatccctggacccctgatgacagtaccgataccaacgggagcgataattcaatcccaatggcctacttgaccttggaccaccaattgcagccactggccccttgtcctaattccaaggagagcatggccgtcttcgagcagcactgtaagatggcacaggaatatatgaaggttcagactgaaatcgcactacttctccagcgcaaacaggagctggtggccgagctggaccaggatgagaaagaccagcagaatacctcccgcctggtccaagaacacaagaaactgttggacgagaataagtctctatccacatattaccaacagtgcaagaagcagctcgaggtgattcggagtcaacaacaaaaacggcaaggaacctcctag

SEQ ID NO: 230984 - DNA, 1740 bp, synthetic construct
  misc_feature 1..1740: note = Description of Artificial Sequence: Synthetic coding sequence
  source 1..1740: mol_type = other DNA
atgtccaccgcttccgcagcttcttcctctagttcctccagtgccggagaaatgatcgaagccccatcccaggtgctgaatttcgaggagattgattacaaagagattgaggtcgaagaagtggtgggcaggggggcttttggcgtggtttgcaaagcaaaatggagggctaaggacgtagcaattaaacaaattgagagtgaaagtgagaggaaggccttcatagtcgaactgaggcaattgagccgcgtgaatcatcctaatatcgtaaagttgtatggagcctgcctaaatcctgtgtgtttagtgatggaatatgccgaaggtggttccctatacaacgttctgcatggagcagagcccctgccatattatacagcagcacatgcaatgtcttggtgcttacagtgcagtcagggcgtcgcatatctgcactcaatgcagcctaaagctcttattcacagagacctgaaaccacccaatctccttctcgtggccggagggactgtattaaaaatttgcgactttggcaccgcttgcgacattcagacgcatatgactaacaacaagggaagtgccgcatggatggcacctgaagtgtttgagggttcaaattattccgagaagtgcgatgttttttcatggggcattatcctgtgggaggttataaccaggaggaaaccattcgacgagatcggcggacccgcatttcgaatcatgtgggctgtgcacaacgggacacgcccaccactcataaagaacctgcctaagcccatcgaatctctaatgaccaggtgctggtcaaaggatccaagccagcggccatccatggaggaaatagtgaagatcatgacacatctgatgcgttacttccctggcgctgatgaacctctgcagtacccttgtcagtacagcgacgaggggcagtccaactccgcaaccagcacaggaagctttatggacatcgccagcacaaatacatccaataaatccgacaccaacatggagcaggtccccgcaacaaacgatacgatcaagcgcttggagtccaagttacttaagaaccaggctaagcagcaatcagagtctgggagacttagtctgggagcgagccgcggttcctccgttgagtctctgcctccaactagcgaaggaaagaggatgtctgctgatatgagcgagatagaggctaggatcgctgctactactggcaatggccagcctcgcaggcgctctattcaagacctgacagtgaccggaacagaacccggacaggtttcgagtcggagttccagcccctccgtgcgaatgattaccacatctggccctacatccgaaaagcccacaagatcccacccatggacgcctgatgatagtactgacactaacggctctgataacagcatccctatggcatacctgaccctggatcatcagttacaacccctggccccttgcccaaattctaaggaaagcatggctgtgttcgagcagcactgcaagatggcccaggagtatatgaaagtccagacagagatcgctcttctgctccaaagaaagcaagaactggtagctgagctggatcaggatgagaaggaccagcagaatacaagcaggttagtgcaagagcacaaaaaattactggacgagaacaagagcttgtcaacgtattatcagcagtgtaagaagcaactggaggtgataagatctcagcagcagaaacgccagggcaccagttag

SEQ ID NO: 230985 - DNA, 1257 bp, synthetic construct
  misc_feature 1..1257: note = Description of Artificial Sequence: Synthetic coding sequence
  source 1..1257: mol_type = other DNA
atgagcacagcctctgccgcatcttcatctagtagcagtagtgccggtgagatgatagaggccccaagccaggtccttaatttcgaggaaattgactataaagaaattgaagtagaggaagtggtggggagaggcgcatttggcgtggtttgcaaagctaagtggagagctaaagatgtcgccataaagcagatcgagtcagaatcagagcgcaaggcatttattgttgagctgaggcagctgagtcgggttaatcacccaaatctcctgcttgtcgccggtggcacagtgcttaaaatctgtgactttggcaccgcttgtgacatccagacacacatgactaataacaagggctccgctgcttggatggccccagaggtcttcgagggttccaactatagcgagaaatgcgatgtattctcctggggaatcattttatgggaggtgattactcggaggaagcctttcgacgagatcggcggtcccgcattcagaattatgtgggcagtccataacggcacacgaccccctctcataaagaatttgccgaagcctattgagtctctgatgacgcgttgctggtcaaaggaccccagtcaacgcccttccatggaggaaattgtcaaaatcatgacacacttgatgaggtacttcccaggagccgatgaacccctgcagtacccatgccagtatagtgatgaaggacagagcaacagcgcaaccagtaccggatctttcatggacatagctagcaccaacaccagtaataagtccgacacaaatatggagcaggtgcctgccacgaacgataccattaaacggttagagtcaaagctgcttaagaaccaagccaagcagcagtccgagagcggtcgactaagcctaggcgcatcgcgaggaagtagcgtcgaatcattacctcccacgtccgaagggaagcgcatgtctgctgatatgtcggagattgaggccagaatagcagccacaacaggcaacggtcagccacggcgaaggagtatccaagaccttacagtcactgggacagagccgggacaggtctccagccgaagctcatctccctcggtccgcatgatcacaacttctggtccaacatcggagaaaccaaccagatctcacccttggacccccgatgattctactgatacgaacgggagcgacaattccatccccatggcttatctaacacttgatcatcaactgcaggcgagaacctcctgtagaaccgggcctgggtag

SEQ ID NO: 230986 - DNA, 1404 bp, synthetic construct
  misc_feature 1..1404: note = Description of Artificial Sequence: Synthetic coding sequence
  source 1..1404: mol_type = other DNA
atggagtatatgagtaccggatcggacaataaagaagaaatcgatctcctgatcaagcacctgaatgtatcagacgtgatcgatatcatggagaacctctacgccagcgaggagccagctgtctacgagccttcccttatgaccatgtgtcaggactcaaatcaaaacgatgagagatccaaatccttgctgctgtccggccaggaggtcccgtggttgtcatcagtccgatatggcactgttgaggacctgcttgcattcgccaatcatatcagcaatactgctaagcacttttatggtcagcgaccccaggagtctggaatcctgctcaatatggtcataaccccccagaacggccgataccagatcgacagtgatgttctgctgattccctggaagttgacatatagaaacatcggatcagattttatacccaggggagcattcggcaaggtgtacttggctcaggatattaagaccaagaaaagaatggcctgcaagcttatcccagtggaccaatttaagccctctgacgtggagatccaggcttgcttcagacacgaaaatatcgccgagctctacggcgctgtcttgtggggtgaaaccgttcatctctttatggaagctggtgaaggcggatcggtgctggagaaacttgagagctgtggaccaatgcgtgagttcgaaatcatttgggtgaccaaacacgtgctcaaaggactggatttcctccactccaagaaagtaatccatcacgatattaagccttctaacatcgtgttcatgagcacaaaggccgtcctggttgatttcggcctcagcgttcagatgacggaagatgtctattttcctaaggatttgcgtgggacagaaatctacatgtctcccgaggttattctttgcaggggacacagtaccaaggctgatatctatagcttgggggctacattgattcatatgcagactgggacgcctccctgggtgaagaggtatcctagatccgcctacccatcctacctctacataattcataagcaggcacctcctttggaagatatcgccgacgattgtagtcctggcatgagagagcttattgaagcgagccttgaacgtaatccaaaccatagaccgagagcagccgacttgcttaagcacgaagctctgaaccccccacgggaggaccaaccgagatgccagagcctggattcagcccttctggagagaaagcggttactgtcaaggaaggagctcgaattaccagagaacattgcagactcctcttgtacgggctctaccgaagagagtgaaatgctgaaacgacagcgttcactttacatcgacttgggagccctcgccggatacttcaacctggtccggggaccccctacactggagtatggttag

SEQ ID NO: 230987 - DNA, 1404 bp, synthetic construct
  misc_feature 1..1404: note = Description of Artificial Sequence: Synthetic coding sequence
  source 1..1404: mol_type = other DNA
atggaatatatgagcacggggtcggacaacaaagaagagatagatttgttgataaagcatttgaacgtgtctgatgttatagacattatggaaaacttgtatgcttcagaagaacccgctgtctatgaacctagtctaatgacgatgtgtcaagactcaaaccagaatgacgaacgatcaaaatctttactcctgagcggacaagaggtgccctggctatcatccgttaggtacggaacagtcgaggatctgttagctttcgccaaccacatctccaataccgcaaaacatttttacggccagcgaccccaagagtccggcatcctcctgaacatggtgatcaccccacaaaatggaagatatcaaatcgattcggacgtcttactcatcccgtggaagctgacttatagaaatataggtagcgattttatccctcgaggcgctttcggcaaagtgtacctggctcaagatatcaagacaaaaaagcgcatggcctgcaagttgatccctgtggaccagtttaagcctagtgacgtcgagatccaagcctgcttcaggcatgaaaacattgccgagctgtacggagctgtcctgtggggtgagacagtccatctattcatggaagccggagagggtgggtcggtcctagaaaagctcgaatcctgtggcccaatgagggaattcgaaataatctgggtaacgaagcacgtcctgaagggcttggactttctccactccaaaaaggtcatccatcatgatattaagccttccaacatcgtgttcatgagtaccaaagccgtgctcgtggacttcggtctatccgtccaaatgacagaggatgtgtacttcccaaaggatctcagggggaccgagatctacatgtctccagaggtcatcctatgcagaggccatagtacaaaagccgacatttacagcctgggggcaaccttgatacacatgcaaacgggaacccccccttgggtcaagagataccctcgaagcgcgtatccatcctacttatatattattcacaagcaagcgccacccttagaggatatcgcggatgattgttcaccgggaatgagagagttgatagaggcgagcctcgaaagaaacccaaaccaccgcccaagagccgctgaccttttgaaacacgaggccctgaatccaccaagagaagatcagccgaggtgccaatcgctcgattccgctctgctggagcgaaagaggcttctgtccaggaaagaactcgaactgccggagaacatcgcagacagttcatgcactggcagcacagaggagagcgagatgctgaaacgacagagaagtctctacatagacctaggagcgttagccggttatttcaacctcgtgcgaggcccaccaacattagagtatggctag

SEQ ID NO: 230988 - DNA, 399 bp, synthetic construct
  misc_feature 1..399: note = Description of Artificial Sequence: Synthetic coding sequence
  source 1..399: mol_type = other DNA
atggagtacatgagtaccggcagtgacaacaaggaggaaattgatctcctcataaaacatctgaatgtttctgacgtgatcgatatcatggagaacctgtatgcgtctgaggaacctgccgtttacgaacccagccttatgacaatgtgtcaggacagcaatcagaacgacgaaagatctaaatcgctgctgttgtccggacaggaggtcccttggctgagtagtgtccgttacgggacagtggaggatctactggcttttgctaaccatatctcaaacaccgcaaaacacttttacggacagcgaccccaggagtccggtatcttactgaacatggtgcggttcttccccatctcctgggtcctgtgcgcacaattaagctattgctctttcatatag

SEQ ID NO: 230989 - DNA, 1404 bp, synthetic construct
  misc_feature 1..1404: note = Description of Artificial Sequence: Synthetic coding sequence
  source 1..1404: mol_type = other DNA
atggagtatatgagtaccgggagtgacaacaaagaggaaatcgacctgctgattaagcatctcaacgtcagtgacgtgattgatattatggagaacttgtacgcaagcgaagagcctgcggtttatgagccctcactgatgacaatgtgtcaggacagcaaccaaaatgacgagcggtcaaagtcgctgctgctatctggccaggaggtcccatggctgagttcagtccggtatggaaccgtggaagacctgctggcctttgcaaatcatattagcaacacagccaagcatttctacgggcagaggccacaggaatcagggattctgctgaacatggtcatcacgccacagaacggcagataccaaatcgacagcgatgtcctgttgatcccttggaaactgacatatagaaatattggatccgatttcatccctcggggagcctttgggaaggtgtacctggcccaggatattaagactaagaaacgcatggcctgcaaacttatcccagtcgaccagttcaagccgagcgatgtggagatccaagcctgcttccgccacgagaacatcgccgaactttatggtgctgtcctttggggagagacagtgcacctgttcatggaagccggagagggcggtagtgtgctggagaaactggagtcctgtggtcctatgagggaatttgagatcatatgggtaactaagcacgtccttaaaggactcgactttttacacagtaagaaggtgatccaccacgacatcaagcctagcaacatagtgtttatgtccaccaaagcggtgctcgtcgatttcggcctctccgtacaaatgactgaagacgtgtattttcctaaggacctgagaggcactgaaatttacatgtctccagaggtaatcttgtgccgcggacacagtacgaaagccgacatttattcattgggcgcaacgcttatccacatgcagaccgggaccccgccttgggtcaagaggtaccctagatcggcctacccgagttatctgtacataatccataagcaggcccctcctctagaggacatcgctgatgattgttctccagggatgcgcgagctgatcgaggcgtccctggagcggaatcctaatcaccggcctcgtgcagccgatcttctgaaacacgaagcattgaatccacccagggaagaccagccgcgatgtcagtccctggacagtgcactcctggagcggaagaggctgctgtccagaaaggagttagaactacctgaaaatatagccgattcaagctgcacaggctccacggaggagtcagaaatgttgaagagacagcggtcgctatatattgatctgggagccttggcaggttacttcaatttagtccgaggcccacccacactcgaatatggctag

SEQ ID NO: 230990 - DNA, 672 bp, synthetic construct
  misc_feature 1..672: note = Description of Artificial Sequence: Synthetic coding sequence
  source 1..672: mol_type = other DNA
atggagtacatgtcaaccgggtccgataataaggaagagatagatctgttgataaaacacctgaatgtatcggacgtcatcgatatcatggagaatttgtatgcctccgaagaacctgccgtgtatgagccatcactcatgacaatgtgtcaggactccaatcaaaacgacgagaggtcaaagtcacttctgctgtccggtcaggaggtcccttggctgagctccgtacgttacggcactgtggaggacctattagcgtttgcaaatcatatatctaatactgctaaacacttctacggacagcgccctcaggagtccggcattctcctcaacatggtgatcacaccacaaaacggcaggtaccaaattgactcggacgttctacttatcccctggaagctgacatacagaaacatcggatctgattttattccccgaggtgcattcgggaaggtgtatctggcccaggacatcaaaacaaagaagcgtatggcctgcaaactgatcccagtcgaccagttcaagcccagcgacgtagagatacaagcgtgcttcagacatgaaaacatcgccgagctgtatggtgcagtgctgtggggcgagaccgtgcatctcttcatggaggccggtgaagggggtagcgttctggagaagctcgagagttgcggatag

SEQ ID NO: 230991 - DNA, 768 bp, synthetic construct
  misc_feature 1..768: note = Description of Artificial Sequence: Synthetic coding sequence
  source 1..768: mol_type = other DNA
atggagtatatgtcaaccggatccgataataaggaggaaatcgacctcctgatcaagcaccttaatgtttccgacgtgatcgatatcatggaaaatctctacgcatctgaggagcctgccgtgtacgagcctagccttatgacaatgtgccaagatagtaaccagaacgacgaaaggagcaagagcctactgctgtcgggacaagaggtcccctggttaagtagcgtcaggtacgggacagtggaggatcttctggcctttgccaaccacatttctaatactgcaaaacatttctacggtcagagaccgcaagaatccggtatactgctcaatatggtgattacgcctcaaaatggcagatatcagattgactccgatgtgttactcatcccgtggaagttgacctaccggaacatcgggtccgactttattccaaggggggctttcgggaaagtgtacttggcacaggatattaaaacaaaaaagcgtatggcatgtaagctaataccggtggatcagttcaagcccagcgatgtggagattcaggcgtgttttcggcacgagaacatagctgaactatacggggcagtgctatggggagagacggtccatctgtttatggaggcaggcgaggggggtagtgtgctggagaaactcgagtcgtgtggcccaatgcgagagtttgaaattatctgggtcacaaagcatgtccttaaaggactagatttcctgcattccaagaaagtaatccaccacgatattaagtag

SEQ ID NO: 230992 - DNA, 573 bp, synthetic construct
  misc_feature 1..573: note = Description of Artificial Sequence: Synthetic coding sequence
  source 1..573: mol_type = other DNA
tgagtcgaggatttgctggcctttgccaaccacatatccaacactgccaagcacttctacggccaacgtcctcaggagtctggaattctcctgaacatggttatcacaccccaaaacggcaggtatcagatagactcagatgttctgttgataccttggaagctcacctatagaaatatcggaagcgattttatcccaagaggcgcttttgggaaggtctatctcgcccaggatataaagacaaagaagaggatggcctgcaaactgatccctgtcgaccaatttaagccttctgacgtcgagatccaagcgtgttttcgacatgagaacatcgcggagctgtatggcgctgtgttatggggagagaccgtgcatttgtttatggaggccggagagggtggatccgtgctggagaagctcgagtcctgcggacccatgagagagtttgagatcatctgggtgaccaagcatgtgcttaagggtcttgacttcctgcactcaaaaaaagtcatacaccacgacatcaaaaggaagtatctctggacttacacctttctcgctcagcgggactag

SEQ ID NO: 230993 - DNA, 1404 bp, synthetic construct
  misc_feature 1..1404: note = Description of Artificial Sequence: Synthetic coding sequence
  source 1..1404: mol_type = other DNA
atggaatatatgtctactgggagcgataacaaggaggaaattgacttgctgatcaaacacctaaacgtcagtgatgtgatagacatcatggagaatctgtatgcctcagaagagcctgccgtctatgaacctagtctgatgacaatgtgccaggatagtaaccagaatgatgaacgttccaagtcactcctactaagtggacaggaggtaccatggctcagctccgtgcgttacggtacagttgaagacctgttggcgttcgccaaccacatttccaacacggctaagcatttttatggccaaagaccccaggagtctggaatcctcctgaatatggtgattacacctcagaacggtaggtaccagatcgacagtgacgtcctccttatcccctggaagctcacatatagaaatatcggttccgatttcatcccccgtggtgcctttggaaaggtgtacctagctcaagacattaagaccaaaaaaagaatggcttgcaagttgatcccggttgatcagttcaagcctagcgatgtcgagattcaagcatgtttcagacacgaaaacattgcagaactatacggtgcggtgctctggggagaaaccgtccatctgtttatggaagctggtgaggggggttctgtgctcgaaaaactggagagctgtggccctatgagagaatttgagattatctgggttaccaaacatgtactcaaggggttagattttctccattcaaagaaggttatccatcatgacatcaagccaagcaacatcgtgttcatgagtactaaggcagtgttggtagatttcggtctatcagtccagatgacagaggacgtgtatttccctaaggatctgagagggaccgagatatatatgtctccggaagtcatcctttgccgcggtcactcgaccaaagctgatatatatagcctaggagctaccttgatccatatgcagacaggcactcccccttgggtgaaacgctacccgagatctgcgtatccatcatacttatacataatccataagcaagctccaccactggaggatatagccgacgactgttctcccggtatgagggaactgatagaggcctctcttgagagaaacccaaaccacagacctcgcgcagccgacttacttaagcatgaagcactgaaccctccaagagaagaccagcctaggtgccagagtcttgatagtgcgctgcttgagcggaaacgcctgctatcaagaaaggagttagagttgccggagaatatcgccgactcctcatgcacgggctctaccgaagaatccgagatgctaaaacgacaaagaagcttgtacattgaccttggcgctctagccggttatttcaacctcgtcagggggcctcccaccctggaatacggctag

SEQ ID NO: 230994 - DNA, 3357 bp, synthetic construct
  misc_feature 1..3357: note = Description of Artificial Sequence: Synthetic coding sequence
  source 1..3357: mol_type = other DNA
atggagccttcccgagccctccttggatgcctggcctccgccgctgcggctgccccaccaggtgaagatggggcaggcgcaggggctgaagaggaggaggaagaggaagaggaagcagccgctgccgtcggccctggcgaattggggtgtgatgcacctcttccttattggacagcagtcttcgaatacgaggctgccggagaggacgaactgacattgcggctgggcgacgtggtagaggttttgagcaaggattcccaggtttccggagacgagggctggtggacaggccagctcaaccagcgagtggggatttttccctccaactacgttactcctcgatccgcctttagctcacggtgccagccgggaggggaggatcccagctgttatccacctattcagctgctggagatcgattttgccgaacttacattggaggagattattggaataggaggattcggaaaagtgtatagagccttctggatcggagacgaagtggccgtcaaggcggctcgacacgaccccgacgaggatatttctcaaacaatcgagaatgtaagacaagaagcaaaattgtttgccatgcttaagcatcctaacattatcgccctgcgaggagtttgcctcaaggagcctaatctgtgcctggttatggaatttgctagagggggacctcttaaccgcgtgctgtcaggtaagcgcattcccccagacatccttgtcaactgggcggttcaaattgcacgcggtatgaactacttgcacgatgaagctattgttcctatcattcacagagacttgaagtcatccaatatcctcatccttcagaaagtggagaacggcgacttgtccaataagatacttaagatcacagattttggcctcgctagggaatggcatcgaacgaccaaaatgtccgccgctggtacatatgcctggatggctccagaagtgatcagagccagcatgttcagcaagggcagcgacgtctggtcatacggggtgctgctttgggaactgcttactggtgaagttccctttcgaggcattgacggcctggccgtggcctatggagtggcaatgaacaagctagcacttccaatccccagcacatgtcccgagccgtttgccaaactgatggaagattgctggaacccagatccgcactctaggccatccttcaccaacattctggatcaactgaccacgattgaggaaagcggtttcttcgaaatgcccaaggacagttttcactgccttcaagataactggaagcacgaaattcaggaaatgtttgatcagctgagagccaaggagaaagagcttcgcacctgggaagaggagttaacccgcgctgcccttcagcagaagaaccaggaggaactgctcagacgccgagagcaggaactggccgagagagagatcgacatactggaacgagagttgaatattatcattcatcagctgtgccaggagaaacccagagtgaaaaagcgaaaaggcaaattccgcaaatctcgactcaagctcaaggacggcaaccggatatcactgccctcagacttccagcacaaattcaccgtgcaggcttctcccacaatggataagcgaaagagcttaatcaacagccggtcctccccccctgcctcacccaccattatcccccgactgcgagcgatacagctgacaccaggcgagagcagtaagacctgggggagatcctccgttgttccaaaagaagagggagaagaagaggagaaaagggcacccaagaagaaaggtaggacgtggggtccaggaacgctcggccagaaagaactggcgtcgggagacgagggctctccacagcgcagggagaaggcaaacggcttatctaccccctccgaaagtccgcacttccacctgggcctgaagtcacttgtcgatggatataagcaatggagctccagcgcccctaatttggtgaaggggccacgtagctcaccagccttgcccggattcacctcactgatggaaatggctctcttagcagctagctgggtagttcctatagatatcgaagaagacgaagacagcgaagggcctggcagcggcgagagccgtttgcagcactcccccagccagagttatctctgtatcccttttccgcgaggagaggacggcgatggaccttccagtgacggcattcacgaagaaccaactcctgtgaattcggccacatcaactccacagttgacccccacgaacagcttgaagcgaggaggagcccatcatagacgctgtgaggtcgcattgttaggttgtggcgcagtgttagcagcgacgggcctcggcttcgacctgctggaggccggtaaatgccaactgctgcccttagaggagcctgagcccccagccagggaagagaaaaaaagacgggagggtctgttccagcggtcctccagaccaagaagaagcacaagccccccaagccgtaagctgttcaagaaggaggagccgatgcttctgctcggcgatccttccgctagtctgaccttgctgagtctgagctccatatcagaatgtaatagcaccagatcgctgttgcggtctgattctgatgagattgtcgtatacgagatgcccgtgtctccagtggaggccccaccattgagcccatgcactcataacccactggtgaatgtccgggtcgaacgcttcaaacgggacccaaaccagtccctcacacctacacacgtgaccctaacaactccctctcaacctagcagtcaccgaagaaccccaagcgatggggcactgaagcccgagaccctgctggcctccagaagtcctagctccaacggcttgagcccatcacctggcgcaggcatgcttaaaaccccctcaccaagtcgcgatcctggggagttccccagactcccagatcctaatgtcgtatttccgcctacccctaggcgatggaatacacagcaggattcaactctcgagcgtccaaagacattggaattcctgccccgtccacgtccctccgccaatcgccagcgcctcgatccctggtggtttgtgagcccatctcacgccagatccacttctccagcaaactccagctccaccgaaactccctcaaacctcgacagctgcttcgcttcttcgtccagcacggttgaagagaggcctggactgcctgccctattaccatttcaagcaggaccgctacctcctaccgagcgcaccctactggacctggacgctgagggacagtcccaggattccactgtgcctctgtgccgcgctgaactcaacacacaccgaccagctccctacgagatccaacaagaattttggagctag

SEQ ID NO: 230995 - DNA, 2463 bp, synthetic construct
  misc_feature 1..2463: note = Description of Artificial Sequence: Synthetic coding sequence
  source 1..2463: mol_type = other DNA
ctggtgctgatcctgcagaaggtggagaatggcgacttgtccaataaaattctcaaaatcaccgacttcggactggccagagaatggcacaggacaacaaaaatgtccgctgccggaacgtatgcctggatggcgcctgaggtgattcgcgcatccatgttctccaaaggcagcgatgtgtggagctatggggtgttgctctgggagctcctcacaggcgaagtgccatttcggggtatcgacggcctggccgtcgcctatggcgtggctatgaacaagctggcactgcccataccttctacatgccctgagcctttcgccaagctcatggaggattgttggaacccggatccgcactctcgacctagcttcacaaatatactggaccagctgaccacaatagaggaaagcggattctttgaaatgcctaaggacagttttcattgcctccaggacaattggaaacatgagattcaggaaatgttcgaccaattaagagcaaaagagaaagaactccgaacctgggaggaagagctcacgcgagcagctctgcaacagaaaaaccaggaggagttgctgagaaggcgcgaacaagaacttgctgagagggaaatcgatatactggaaagggagctgaacattattattcatcagttgtgccaggaaaaaccaagagtcaagaagaggaagggtaaatttcgcaaatctcgcctgaagctgaaagacggtaataggatctccctgccttccgacttccaacataaatttactgtccaggcgtcaccgacaatggacaaaaggaagtcccttattaacagtcgcagtagtccccctgcctccccaacaattattccccgacttagggctattcaactaacacctggcgaatccagcaaaacctggggccgaagttccgtagtaccaaaggaggagggggaggaggaggagaaacgagcccctaagaaaaagggcaggacctggggcccagggactctcgggcagaaagagttagcgagcggcgacgaaggcttgaaaagtctggtcgacggctacaaacagtggtcttccagcgcacccaatctcgtcaagggacccaggagttcccctgctcttccgggtttcacctccctgatggagatggcttgttttagctcgactttggtgatttttacggaagacgaggactccgagggcccaggctccggagagtctcgactgcagcactctccctcccagtcatacctctgcatcccctttccaaggggtgaggatggcgacggaccgtccagcgatggtatccacgaggagcccactcctgtgaacagtgccacctccacccctcaactgacccccaccaactccctgaagagagggggagctcatcacaggcgctgtgaggttgctctgctcggttgcggagcagtgttagcggcaaccggcttgggattcgatcttttagaggccggtaagtgtcaacttctaccccttgaggaacctgagcctcctgcccgagaagagaaaaagagaagagaggggctctttcagcgctcgtcacgaccacggcgatctacgagcccaccatcgcgcaagctcttcaagaaggaagaacctatgttgctgctgggtgacccgtccgcgagtctgaccctattgtcactctcgagcatatccgagtgcaacagcaccaggagccttctcaggtccgatagcgatgaaatagttgtgtacgagatgccagtgtcacccgtggaggcgcctcctttatccccctgcacacacaaccccctggtgaacgtgcgcgtggagcggttcaagcgtgaccccaaccaaagcctcacacctactcatgtcaccctgaccacacctagtcagccatcctctcaccgtagaactccaagcgacggcgcactaaaacctgaaacactgctggcgtcccggtcccctagctcgaacggactgagccctagcccgggagctggaatgctgaaaacaccgtctccttctagggacccaggggaattcccaaggctgccagacccgaacgtggtctttcctcccacacccagaaggtggaacacgcagcaggacagtacactggagcggccaaaaacactggagtttctgcccagacccagaccatctgccaaccgacagaggcttgatccttggtggtttgtgagtccttcgcatgcgagatccacctccccagcaaattcatccagtacagagacgccttctaatcttgacagttgcttcgcgtcatcaagctctacagtggaggagagaccaggattacctgcgctgctaccttttcaagctggccctctgccgccaactgagcgcaccctacttgatcttgacgccgagggccagtcccaggatagtaccgtgcccttatgccgagctgagctcaacacccacagaccagctccatatgagatccagcaggaattctggtcatag

SEQ ID NO: 230996 - DNA, 3315 bp, synthetic construct
  misc_feature 1..3315: note = Description of Artificial Sequence: Synthetic coding sequence
  source 1..3315: mol_type = other DNA
atggagccctcaagagcactgctgggatgcctggctagcgctgctgccgctgctcctcctggggaggacggtgcaggggcaggggctgaggaggaggaagaggaagaagaagaagccgctgcagctgtaggacctggtgaattgggatgtgacgctccactgccgtactggaccgcagtgtttgaatacgaggccgcaggagaggacgagctgacactgaggctgggcgatgttgtagaggtgctgtctaaggattcacaagtgtcaggagatgagggctggtggacaggacaactgaaccagcgggttggcatcttcccttcgaattatgtgactcctaggagcgctttttctagtaggtgtcaacctggaggcgaggacccgagctgctatccccctatccagctgctggaaattgattttgcagagttgacgctggaagagataattggaataggtggcttcggtaaagtgtatcgtgccttttggataggggacgaagtggcagttaaggccgctcgccacgatcccgatgaagacatctcgcaaaccatagagaatgtcaggcaagaagccaagttgttcgcgatgctgaagcatcctaacattatagccctacggggagtgtgtttgaaggagcctaacttatgcctggtgatggaatttgcccgaggcggacccctgaatcgcgtactgagtggaaaacgcatcccgcctgacattctcgtaaactgggcagtgcagatcgcacgcggaatgaattaccttcatgacgaggctatcgtgccaatcatccacagagatctgaagtcaagtaatattctcattttgcagaaggtcgagaatggagatttgtccaacaagattcttaagatcactgacttcggactcgccagagaatggcaccgcaccacaaaaatgtcagcggcaggcacctatgcctggatggccccagaggtcattcgtgcgagtatgttttctaaaggctctgacgtttggtcttacggcgtccttctttgggagctgctcacaggcgaggtgccctttcgcggaatcgatggattggcagtggcgtacggggtagccatgaataaactggccctcccaattcccagtacctgccctgagccatttgcaaaactgatggaggactgctggaaccctgacccacacagtaggccttcattcacaaatatattggatcaactcacaactatcgaagaatctggctttttcgagatgcccaaggactccttccactgtctgcaagacaactggaaacatgagattcaggaaatgtttgaccaacttcgagctaaagagaaagagctgcggacatgggaggaagagctgacccgtgccgctctgcagcagaagaaccaggaggaactcttgcgcagacgagagcaggaacttgccgaacgcgagattgatatcctagaaagggagctcaatattatcatccaccaactgtgtcaggagaaacccagagtaaagaagcgaaagggtaagtttaggaaaagtcggctgaaactcaaggatggcaaccgcatatctctcccctctgactttcagcacaagttcacagtccaagcatcaccgactatggataagcggaaatctctcatcaacagtcggagttccccacctgcaagccccaccataatacctcgactgcgggcaatccagctcacacctggggagagcagtaagacatggggacggtcgtcagtggtccccaaggaggaaggagaggaagaggaaaagcgcgcacccaaaaaaaagggtagaacgtggggcccagggacactcgggcaaaaggagctggcgagcggagatgagggctcgcctcagagacgggagaaggccaatggattatctactccctctgagtccccccactttcacctgggcctgaagtctctcgtcgacggatataagcaatggtccagcagcgccccaaacctggtgaaagggcctcggagctctcccgctcttcccggattcacctcacttatggaaatggaggacgaggactcagagggacccggatccggcgagtcccgattgcagcattctccgtcccagagctacctctgtatccccttcccccgtggcgaagatggtgatggcccatcatctgacggaatacatgaggagcctacaccagtaaattccgctacgagcaccccacagttgacgcctacaaatagcctgaagcgcggaggcgcacatcatcggcgatgcgaggtggccctcctgggatgcggagccgttctggccgctacgggcttggggttcgacctgctcgaagccggaaagtgccagctgctcccattggaggaacctgaaccacccgctagagaagagaaaaaacgcagagaaggcctctttcagagaagctcaaggccaaggcgcagtacaagtccacccagtcgtaagctctttaagaaggaggaaccaatgctcctgttaggagatccaagcgcctcgcttaccctgctgtcgctgtcgagcatcagtgaatgtaatagcacaagaagcctactgcgcagcgactcggacgaaatcgtggtgtacgaaatgcccgtctctcccgtggaggctccaccgttgtcaccatgtacgcacaaccccttggtgaacgtcagagtcgagaggttcaagcgggaccctaaccagagcttgaccccgactcacgttacccttaccaccccgtcccagccttcttctcacaggcggacccctagcgacggggctctgaaacccgaaacattgctggcttcacggtcaccctcttcaaatgggttgagtccaagccccggagctggtatgttgaagaccccctcaccttcaagggaccctggcgagttcccacggctcccagaccctaatgtagttttccccccaactccgagacgttggaacactcagcaggattccacactggagagacccaagacacttgaattcctgcccaggccacgcccttcagccaacaggcagcgcctggacccttggtggttcgtaagcccctcacatgctaggtcaacttctcccgcaaattcaagctccacagaaacgccctccaaccttgacagctgcttcgccagttcctccagcactgtcgaggaacgaccaggactccctgccctccttcccttccaggccggtcccttgcctcccacagagcgcaccctgctggatctggacgcagaaggccagtcacaagactctacagtccccttgtgtcgagccgaattaaatacccaccggcctgccccatatgagatccagcaggaattttggtcatag

SEQ ID NO: 230997 - DNA, 1005 bp, synthetic construct
  misc_feature 1..1005: note = Description of Artificial Sequence: Synthetic coding sequence
  source 1..1005: mol_type = other DNA
atggccctgcggtggggcatcgtgtccgtgggactgataagttctgactttaccgctgtactacagaccctccctaggagcgaacatcaggttgtggctgttgctgcccgagacttgtctcgcgcaaaagagttcgcccagaagcacgatatccctaaggcttatggtagctatgaagagctggccaaggatccaagcgtggaagtcgcttacataggcacacaacatccacagcacaaagccgctgtgatgctctgcttggctgccggaaaggccgtactgtgtgagaagcccaccggtgttaatgcagctgaagtgagagagatggtggctgaggctagatcacgcgcactgtttctgatggaggccatttggaccagattttttcctgctagtgaggccctgagatctgttctcgcccagggcaccctgggtgacctgcgggtggcccgagctgagttcggtaagaacctgatccacgtcccgagggccgtcgatcgtgctcaggccggtggagctctccttgatatcggcatttactgtgtgcaattcaccagcatggtcttcggaggccagaagcctgaaaagatctctgtcgtagggagacgccatgagacgggggtcgatgacaccgtcaccgtgcttctccagtacccaggtgaggtgcatgggtcgtttacttgctcaataacagtacagctgtccaacactgccagcgtctcaggaaccaagggcatggtgcagctgctgaacccgtgctggtgtccaactgaactggtcgtcaaaggcgaacataaagagtttcccctgccaccggttcctaaagattgtaattttgacaacggggcaggcatgagttacgaagcaaaacatgtgtgggagtgcctcaggaaagggatgaaggagagtcccgtgatcccactctcagagagtgaactattagccgatatcctggaggaggtgcgcaaagcaattggggtgacctttccccaggacaaaagatag

SEQ ID NO: 230998 - DNA, 2466 bp, synthetic construct
  misc_feature 1..2466: note = Description of Artificial Sequence: Synthetic coding sequence
  source 1..2466: mol_type = other DNA
atggatgtcgtggatcccgatatcttcaatagggatcccagagaccactacgatctgctgcagcgcctagggggtggcacctacggggaagtgtttaaggctagagataaagtcagtggcgatctggtcgccctcaagatggtgaagatggaaccagacgacgacgtgtcaaccctccaaaaggagatcttgatcctgaaaacatgtaggcacgccaacatcgtcgcttatcacggatcctatctgtggctccagaagctctggatctgcatggaattctgtggagccggaagcctgcaggatatttaccaggtcactgggagcctgtctgaacttcagatctcctatgtctgtagagaggttcttcagggcttggcctacctgcattcacagaaaaagatacaccgcgatattaagggagccaacattctgatcaacgacgcgggtgaggtgaggctcgcagatttcggcattagtgcgcagataggcgctactctggctaggcggttaagcttcattggcaccccttactggatggcccctgaggtggctgcagtggcgcttaagggaggctataatgagctctgtgacatttggagcctcggcattacggccattgagttggccgagttacagcctcccctcttcgatgtccaccccctgcgcgttctctttcttatgaccaaatccggctaccagccccctcgactgaaagagaagggcaagtggagcgctgcgttccataacttcatcaaggtgaccttaacaaagagtcctaagaagcgtcccagcgcgacaaagatgctatcacaccagttggtctcacagcctggtcttaatcgtggactgattttagatctattggacaagctgaagaatcctggaaagggacccagcattggagatattgaggatgaggaacccgaacttcctcccgctatccctagacgcatcagaagcactcaccgctcttcttccctgggtatccccgacgcagattgctgcaggcgccatatggaattcaggaagttgaggggaatggaaaccaggccccctgcaaatacagccagacttcagccccctagggacctgaggagcagctcgcctcggaagcaacttagtgaatcatcagacgatgattacgacgacgtagacatccccacacccgcagaagacactcctcctcctcttcccccaaaacctaagttccgcagccccagcgacgaaggaccaggctccatgggcgacgatgggcagctctctcctggggtcttagtgcgctgcgcgagcgggccaccacccaatagccctcgtccgggacccccaccaagtacgagttctccccacctgaccgcccacagtgagccaagtctgtggaaccctccctcgagggaactggataagcccccactgttgccacccaagaaggagaaaatgaagcggaaaggctgcgctcttttggtcaagctctttaacggctgcccactgaggattcactccaccgcagcttggacccatccctctaccaaagaccagcacctacttctgggcgctgaggaggggatcttcatcctgaatcgaaacgatcaggaggcaacccttgaaatgcttttcccttcgagaacaacttgggtgtattccattaataacgtcttaatgagtctgagcggtaagaccccacacttgtatagccactcaatactcgggcttctggaacgtaaagaaacaagggctggtaacccaatcgcacacattagtcctcataggctcctggcgaggaaaaatatggtatctactaaaatacaggataccaaggggtgtcgagcctgttgtgtagctgaaggggctagttccggtggtccattcctttgcggcgcactggaaacgtctgttgttctgttgcagtggtaccagccaatgaacaagtttctcttggtaaggcaggtcctgttcccattgccgacgcccctgtccgtatttgcactgttgacgggccctggaagcgaacttccagctgtatgtatcggcgtgtctcctgggagacctggtaagagcgtcctatttcacactgtgcgttttggggctcttagttgttggctcggggagatgagcaccgagcaccgtggtcccgtccaggtgacccaggtcgaggaggatatggtgatggttctcatggacggcagtgttaagctggttactcctgagggttcccccgtgagaggtctcagaacgccggaaattcctatgaccgaggccgtggaggccgtggctatggtgggcggacagcttcaagctttctggaaacacggcgtccaggtgtgggccctcggctctgaccagctgctccaggagttgcgggacccaaccctgacatttcggctgcttggctctccccgtccagtggtggtggagaccagaccagtggacgacccgacagcaccctctaacctctacattcaagaatag

SEQ ID NO: 230999 - DNA, 720 bp, synthetic construct
  misc_feature 1..720: note = Description of Artificial Sequence: Synthetic coding sequence
  source 1..720: mol_type = other DNA
atggagtttaggaaacttcgaggtatggagacacgccctccagctaacacggcacgccttcagcctccacgtgatttacggtcgtcttcgccacgtaaacagctgtctgagtcctctgacgatgattacgatgatgtggacatcccaacccccgcagaggatacaccccctcctctgccaccgaagcctaaattccggtctcccagtgacgagggacctgggtcgatgggcgacgacggtcaactttcccccggagtgctagtgcggtgcgcttccgggccacccccaaactctcccagaccagggcctccaccctccacgagttcccctcatcttaccgcacactccgagccatccctctggaacccgccatcccgagagctggataagccacccctgttacctcccaagaaagaaaaaatgaagaggaaaggatgtgcccttctggtgaagctgttcaacggctgccccctccgtatccactccaccgctgcatggacacatccctccaccaaagatcagcatcttctccttggggctgaggaggggatatttatcctcaaccggaacgaccaggaggccacgttggagatggagcgccctcccacttgcatcctgatcgcatctctggcttgttggaatggtaaacgacccgaacaagagacccccagtttaacactggcccctactgcgtactggcagggtacttccagccagtag

SEQ ID NO: 231000 - DNA, 2502 bp, synthetic construct
  misc_feature 1..2502: note = Description of Artificial Sequence: Synthetic coding sequence
  source 1..2502: mol_type = other DNA
atggatgtagtcgacccggatatcttcaaccgggaccctagggaccattatgatttgttacagaggttaggaggtggaacatacggagaggtattcaaggcaagagataaagtgtcaggtgatctggttgccctgaagatggttaagatggaacctgatgacgacgtgtctacattacagaaggaaatccttattctgaagacttgcagacacgccaatatagtggcataccacgggagctacctctggctgcagaaactatggatctgtatggagttctgcggggcaggatctcttcaggacatttatcaggtgacaggttccctgtctgagttacaaattagctatgtgtgccgcgaagtgctacaaggactggcttacctacactcccagaagaagatacatagagatattaaaggggcaaatatcctaatcaatgacgctggcgaggtgaggctggccgattttggaatatctgcccaaattggagccacactcgctagacgcctgtcattcattggcacaccttattggatggccccagaagtggccgctgtcgccctcaaggggggatacaatgagctttgcgacatctggtctcttggcattaccgctatcgaactcgccgagctgcagccgccattatttgacgtccaccctttacgagtactttttctaatgactaagtccgggtaccagcccccaagattaaaagagaaaggcaaatggtcagccgcatttcacaatttcattaaagtgaccttgacgaagtctccaaaaaaacggccttccgctaccaaaatgttgtcccatcagctggtctcacagccaggccttaaccggggtcttattctggatctgcttgataaactcaagaaccccggtaagggcccatctatcggggacatcgaggacgaagaacctgaactgcctcccgctattcctaggcggattaggagcacccacagaagctcctccttaggcatacccgatgctgattgttgccggcgtcatatggaattccggaagctgcgagggatggaaacccgtcctcctgcgaatacagcccgactccagcctcctagggaccttaggtctagctcccctcggaagcaattgagcgaatcatctgatgatgattatgatgacgtcgatatccctacccctgctgaagatacacccccaccactgccccctaagcctaagttccggtccccctctgatgaaggacccggtagcatgggcgacgacggacagctgtcgccaggggtgctggtaagatgcgcttccgggcctccacctaactccccgagacctggccctccccctagcacctctagtccccacctgactgctcatagcgagcctagcctctggaacccaccttcgcgcgagcttgataagccaccactgctgcctcccaagaaagagaaaatgaaaagaaagggctgtgcccttctggttaaactgttcaatggttgtcccctgagaatccattccaccgcggcttggacacatccttctactaaggaccagcatcttctgcttggggctgaggaggggatattcatcctcaacagaaacgatcaagaagctacactggagatgctgtttccctctcgaactacatgggtgtatagcataaataatgtcctgatgtcgctctccggcaagacgccccacctgtatagtcacagcattcttggtttgctggagcgcaaagagacgagagccggaaacccaatcgctcacatctccccacacaggctgctcgcaaggaaaaacatggtttctactaaaatccaggacaccaaaggctgcagagcatgctgcgtggcagagggggcttcaagcggcggacccttcttgtgcggcgctttagagactagcgtcgtgttgcttcagtggtatcaacccatgaataaattcctccttgtaagacaagtgctgtttccactgcctactcctctctccgtttttgccctactgaccggtcccggatcggagctaccggctgtgtgcataggagtttctcccggtcgccctgggaagtcggtcctcttccacacggtccggtttggtgctctgtcatgctggctcggcgagatgtctactgagcatagggggcctgttcaggtgacccaggtggaagaggatatggtgatggtgctgatggacggttcggtgaaactggtgacaccagagggaagtcctgtccgtggtcttagaacccccgagatcccaatgacagaggccgtggaagcggtggccatggtcggtgggcagctacaggcattctggaagcacggagtgcaggtgtgggccctgggcagcgaccagcttttacaggagttgcgcgatccaacattgacttttcggctactgggatcaccgaggctggagtgcagcggcaccatatctccccactgtaacttacttcttcctggatcgtccaactcgcccgcatcagctagtcgcgtggctggtattaccggcctgtag

SEQ ID NO: 231001 - DNA, 2463 bp, synthetic construct
  misc_feature 1..2463: note = Description of Artificial Sequence: Synthetic coding sequence
  source 1..2463: mol_type = other DNA
atggcattgctccgagacgtgtcattgcaggaccctagagaccgctttgagctgctgcagagggttggggcaggaacttatggcgacgtctataaagctagagacacagtgacatccgagttggccgctgtgaaaatagtgaaactcgaccccggtgatgacatctcttcattacagcaggaaattaccatattaagagagtgtagacaccccaacgtcgtcgcatacatcggttcttaccttcggaatgatcgcctgtggatctgcatggagttttgcggcggtggaagcttacaggagatctaccacgccactggacctctggaggagcggcagattgcttatgtctgtcgagaagctctcaagggcctgcatcatctccactcacaagggaagatccatcgggacatcaagggcgctaacctgttgctgaccctacagggtgacgtcaagctggccgattttggcgtctcaggcgagttaacagcctccgttgcgaaaaggaggtctttcatcggaactccttattggatggcaccggaggttgccgcagtggaacggaaaggcggatataacgagctgtgtgatgtgtgggccctgggtatcaccgccatcgagctcggcgagttacagcctccactcttccacctgcaccctatgcgcgcactgatgctgatgtccaaatccagctttcagccccctaagctgcgggataagaccaggtggactcagaattttcatcatttcctgaagctggccttgactaagaatcctaagaaacgacccactgccgagaagctattgcagcacccctttactacccagcagctgccgagagctctcctgacacagctgttggacaaggcttccgatccccacctgggaacccccagtccagaagactgcgagctggagacatatgatatgtttccggacactattcacagccggggtcagcatggacccgctgaaagaacaccctcggagattcagttccaccaggtgaaatttggcgctccccgtagaaaagagactgaccccctaaacgaaccttgggaggaagagtggacactactaggaaaagaagaacttagcgggagcctgcttcagagcgtgcaggaagctctcgaggagcgaagcctcacaattaggagcgcctcagagttccaggaacttgattccccggatgatacgatgggtactatcaaacgcgcaccgtttcttggacccctcccaaccgacccacccgcagaagagcccctgtcctcaccgccaggtacactaccccctcctcccagtggacccaactcctcaccacttctcccgacagcttgggctactatgaagcaaagggaggatcccgaacgatcatcatgtcacggtctcccaccgacacctaaagtccacatgggggcatgtttctccaaagtgttcaatggttgccccctgagaattcatgcagccgtgacctggatccaccctgtcacccgggaccagtttttagtggtcggcgctgaggagggcatctacacattaaatctacacgagttacacgaagacaccctggaaaagctcatatcccaccggtgcagctggctgtattgtgtcaataacgtcctacttagtctatctgggaaatctacgcacatttgggcccacgatctgcccggactgtttgaacaaagaaggttgcagcagcaggtcccactctcaatcccaacaaacagactaacccagcgaattattcctcggagattcgcactgagtactaagatccctgacactaaaggatgtctgcagtgtagagttgtgcgaaatccttacacaggtgccacctttctcctcgctgcccttccaacatctctcctgctcctacaatggtatgagcctctgcagaaatttttgctgctgaagaattttagctctcccctgcctagcccggcaggaatgctcgagcccctggtgctggacggcaaagaactgccacaggtctgtgtcggtgcagagggacctgaagggccagggtgcagggtactgttccacgtacttccactagaggcgggactgacccccgacattctgattccaccagaaggcattccgggaagtgctcagcaagtgatccaagtggaccgcgatacgatcctggtcagcttcgagcgctgtgtgcgcattgtgaatatgcagggagagcccactgccactctcgcgcctgagcttacattcgactttcccattgagactgtagtatgtcttcaggactcagtgctggcattttggtctcatggtatgcagggacgcagtctggacactaatgaggtgacacaggaaattactgatgaaacgaggatctttagggtgctgggcgcacatagggatattatcttggagtccatcccaaccgacaaccccgaagcacactcaaatctgtacattctgacaggacaccagtcgacttattag

SEQ ID NO: 231002 - DNA, 2541 bp, synthetic construct
  misc_feature 1..2541: note = Description of Artificial Sequence: Synthetic coding sequence
  source 1..2541: mol_type = other DNA
atggaggcacccctccgtcccgcagccgatatattgagaagaaatccgcaacaggattatgagcttgtgcaaagggtgggcagtggcacctatggagacgtatataaagcacgcaatgtccataccggagagctggctgcagtgaagattattaagcttgagcccggtgatgatttctctctgattcagcaggagattttcatggtgaaggaatgtaaacattgtaatatcgtggcatactttggatcctacttgtctcgggagaaattgtggatctgcatggagtactgcggcggaggctctttgcaggatatttaccacgtcacaggcccactaagcgagctgcagatcgcttacgtgtgtagagaaacgctgcaggggttagcctatctgcatactaagggcaaaatgcacagagacataaagggagccaatatcctgttgaccgatcatggggacgttaaactggccgattttggtgtggccgctaaaatcacggctactatagccaagcgcaagagtttcatcgggactccctactggatggcccctgaagtcgcagctgttgaaaagaatggcggatataaccagttatgtgatatttgggccgtcggtattacagccatagagttgggagagctgcaaccccctatgtttgacttacaccccatgagggctctgtttctgatgtctaagagcaacttccagccgccaaaactgaaggacaagacaaaatggtcaagcaccttccacaactttgtgaagatagctctaaccaagaaccctaaaaagcgcccaaccgctgaacgccttctcactcacacatttgtcgcccagccaggcctcagtcgggcattagctgtggaactgctcgacaaggtcaacaatccagacaaccatgcccattacaccgaagctgacgacgacgactttgaaccacacgccattattcggcacaccatacggagtactaaccgcaacgcgagggctgagcgcacagcatctgaaatcaattttgacaagctccagtttgaaccacccctgaggaaggaaaccgaggctcgcgacgaaatgggtctgtcgtccgaccctaacttcatgttgcagtggaacccattcgttgacggtgcaaacaccggaaagtctacgtccaagagggccatacccccacccctccctcccaaaccccgtatcagcagttacccagaggataattttccggacgaggagaaggcttctacaatcaaacactgtcccgactccgaatcaagagcccctcagattctgcgcaggcagtcaagtccttcatgcgggccagtcgcagaaacctcctcaatcggtaacggggacggtatttctaaacttatgtcagagaatactgagggtagcgcacaggctcctcagctcccccgtaaaaaggacaagagagacttccccaaaccggctatcaacggcctaccacctacccccaaagtcctcatgggggcatgtttttcgaaagttttcgacggttgtccgctcaaaattaattgtgcaacaagctggattcatccagacacgaaagaccagtacatcatcttcgggacggaggatgggatctacaccctgaacctgaacgaattgcacgaagccactatggagcagctctttccgcgaaagtgcacctggctgtacgtaatcaacaataccctgatgtctctgtctgtgggaaaaacgtttcagctgtactcacacaacctgatcgcgctattcgagcacgccaagaagcccggacttgctgctcacattcaaactcatcgcttcccggaccggattctgccgagaaagtttgcgctcacaaccaagattcccgatacaaagggctgccataagtgctgcattgttagaaacccctatactgggcataagtacctgtgcggggcattacagagtgggattgtactcctccagtggtatgagcctatgcagaaattcatgcttatcaaacattttgacttccccctgcctagcccgctgaacgtgttcgaaatgctcgttattcccgagcaagaatacccaatggtgtgcgtcgctatctccaagggtaccgagagcaatcaggtagttcagtttgagacaattaacctgaatagtgcctcaagttggttcacggagattggcgctggctcgcaacagttggacagcattcatgtaactcagcttgagcgcgacactgttctggtgtgtttagacaaatttgttaaaatcgtcaatcttcagggcaagcttaaaagcagcaagaaactcgcttcagagctctctttcgattttaggatcgagtccgtagtgtgcctgcaggactcagtgctggctttctggaagcacgggatgcaggggaagagtttcaagagcgacgaggttactcaggaaatatcagatgagactagggtcttccggttgctgggctccgatcgggtggttgtgctggaatccagaccaaccgagaatccaactgcacactcaaatctctatatcctcgcgggtcatgaaaatagctactag

SEQ ID NO: 231003 - DNA, 699 bp, synthetic construct
  misc_feature 1..699: note = Description of Artificial Sequence: Synthetic coding sequence
  source 1..699: mol_type = other DNA
atggcaactgcagagagccgggcactgcagttcgccgagggggcagcgtttcctgcttaccgagctccacacgctggaggggctctactgcctcccccttcaccagccgcagccttgcttcctgctccccctgcgggtcccggtcctgccacctttgctggctttctggggcgtgatcccggacctgctccccctcccccagcatccttaggttcgccggctccccctaagggggcagctgcacccagcgcctcccagagaaggaagaggacaagtttttccgccgaacaactccagctgctggaactagtcttcagacgcactcgctaccctgacatacacctccgcgagaggctggctgcacttactttattgcccgagagcaggattcaggtctggtttcagaatcggagagcgaagtcacgcaggcagagcggaaagagctttcagcccttggccagaccagagattatcttgaatcactgcgcccctggaaccgagacaaaatgtcttaagccccagcttcctctggaggtcgacgtcaattgcttgcctgagcctaacggtgtcggtggtggcatctcggattcatcatcacaggggcagaatttcgagacatgttctccactaagtgaagacatcggatctaaattagatagttgggaggaacatatattctcagctttcggtaacttttag

SEQ ID NO: 231004 - DNA, 723 bp, synthetic construct
  misc_feature 1..723: note = Description of Artificial Sequence: Synthetic coding sequence
  source 1..723: mol_type = other DNA
atggctaccgctgaatccagagccctccaatttgcagagggcgctgcttttcctgcataccgggcaccgcacgccggaggggcattattaccccctccgtccccagcggctgcattacttccagctccccctgccggacccggacccgctacatttgctggctttctgggcagggaccccggtcccgctccccctcctcccgcttccctgggctcccccgcaccgccaaagggcgcagctgccccaagcgctagtcagcgcaggaagagaactagtttctcagctgagcagcttcagttgttggaactggtcttccgcagaacccggtaccccgatattcacttaagagaacgattggcggctctgacactgttacctgagtctaggatccagctgctcttttcacctctgtttcaagtttggttccagaatcgcagagctaaatcccgccgacagtctgggaagagtttccagccattagcaagaccagaaatcattctaaaccattgtgcccctgggactgagacaaagtgtctgaagccacagctgcctcttgaagttgatgtaaattgtctgcccgagcccaacggcgtgggtggcggtattagtgactcctcgagtcaaggacaaaatttcgaaacttgctcccctctttctgaagatataggaagcaaactggattcttgggaggagcatattttctcagcattcggaaatttctag

SEQ ID NO: 231005 - DNA, 882 bp, synthetic construct
  misc_feature 1..882: note = Description of Artificial Sequence: Synthetic coding sequence
  source 1..882: mol_type = other DNA
atggccacctttagcgggcctgcaggccctattctgtcgctgaatccgcaggaggatgtggaattccaaaaggaggttgcccaggtgcgcaagcgcattacccaacggaagaaacaggaacagctcaccccgggtgtggtctatgtgagacatttgcccaatcttttggatgaaacacagatattcagttactttagccagttcggtaccgtgaccagatttagactgagcagaagcaagcgcactggcaactcaaaagggtatgcctttgtggaatttgagagcgaggacgtagccaaaatcgtcgccgagaccatgaacaactacctttttggggagcgtcttctcgaatgtcatttcatgcctccggagaaggtgcacaaggaactctttaaagattggaatatacccttcaaacagccttcatacccgagcgtgaagcggtacaacagaaatcgcaccctgacacagaagcttcgcatggaagaaaggtttaagaagaaagagcgattgttgcgtaagaagctcgccaagaaaggtatcgattacgactttccatcactgattctccagaagactgaatcgataagtaaaaccaatcgacagacttcaaccaaagggcaggtattgcgaaaaaaaaagaaaaaggtgtcagggactttggacacacctgagaaaaccgtggactcgcagggtccaacccccgtgtgcacgcccacctttctggaacgacgcaaatcccaggtggctgagctaaacgacgacgataaggatgacgaaatcgtgttcaaacagcctatctcatgtgtaaaagaagaaatccaagagacccagactcctactcatagtcgaaagaaaagaagacgcagcagcaaccagtag

SEQ ID NO: 231006 - DNA, 1257 bp, synthetic construct
  misc_feature 1..1257: note = Description of Artificial Sequence: Synthetic coding sequence
  source 1..1257: mol_type = other DNA
atggcaccacgcggtcggaggcgcccaaggccacacagaagcgagggggcacgcaggagcaagaacaccctggagcgtacccatagtatgaaagataaggccggacaaaaatgcaaacctatcgacgtgtttgacttccccgacaatagtgatgtatctagtatcgggagactgggagaaaatgagaaagatgaggaaacttatgagacctttgacccccctcttcactcaactgccatttacgcagatgaagaggagttttctaaacattgtggcctcagcctttccagcaccccccctgggaaggaggcgaagcgaagcagcgacaccagtggcaacgaagcctctgagatcgagtctgtgaaaatctccgccaagaaacccggtcggaagctgagaccaatcagcgacgactctgagtccatagaagagagtgacacaagaaggaaagttaagtcggccgaaaaaatctccactcaacgacacgaggttattcgaactacggccagttccgagctgtctgaaaagcctgctgagtctgtgacaagtaaaaagaccgggcctctgtcagcccagccatctgtcgaaaaagaaaacctggccatagagtcacaatcaaaaacgcaaaaaaagggaaagatcagtcacgacaaaaggaaaaaatcaagatccaaggcaatcggctctgacaccagcgacattgtgcatatctggtgccctgaaggcatgaaaacttccgatatcaaagaactgaacattgttttgccggagttcgaaaagactcacttggagcaccagcaaagaatcgaatccaaagtctgcaaggctgccatcgcgacattttatgtgaacgtcaaagagcagtttattaagatgctaaaagagagccagatgctgaccaatctcaagcggaagaatgcaaagatgatatccgatatcgaaaagaagaggcagcgcatgattgaagtccaggatgaactccttagactcgagccccagctgaaacagctgcaaactaagtatgatgaacttaaagaacgcaagtctagtctccggaacgccgcttatttcttaagcaacctgaagcaattatatcaggattatagcgatgtgcaggcgcaggaacccaacgtcaaagagacatatgacagttcctctctaccggctcttctgttcaaagccagaacactgctcggagcagaatcacacctgcgaaacattaatcaccaactggaaaagctccttgatcaaggctag

SEQ ID NO: 231007 - DNA, 963 bp, synthetic construct
  misc_feature 1..963: note = Description of Artificial Sequence: Synthetic coding sequence
  source 1..963: mol_type = other DNA
atggctccaaggggcagacgccgtcctcgaccccataggtccgaaggtgctaggcgttccaagaatacactcgagagaactcattccatgaaagataaagctggacagaaatgcaagcctatcgacgttttcgactttccagataatagtgacgtttcttccatcggcaggctgggggagaacgagaaggatgaggaaacttatgaaactttcgacccacctttgcattccacagccatctacgccgacgaagaggagttctccaaacactgcggcttatcactgagctccacgccccctggcaaagaagcaaagagaagtagtgacacatcaggaaatgaagccagcgagattgagtcagtgaagattagtgctaaaaagcctggtagaaagcttcgacccatcagcgacgattcagagtccatcgaagagtcagatacgcggagaaaggtaaaatctgcagagaagatatcgactcaaaggcacgaagtgattcggacaacagcaagctccgaactgagtgagaagcctgctgagagcgttacatccaaaaaaacaggaccgcttagcgcacaaccatctgtagaaaaggaaaacttggcaatcgagtcacaatcaaagacacagaaaaaaggtaagattagtcatgataaacgtaaaaaaagcaggagcaaagccatagggtctgatacctcagacatcgtgcatatttggtgtcctgaggggatgaaaacctcagacataaaggaactgaacatcgtgctgccagagtttgagaaaacgcacctggagcaccagcagaggatcgaaagtaaggtgtgtaaagcagctatagcgacattctatgtcaacgtaaaggaacagttcattaagatgttgaaggagagtcagatgctcaccaatctgaagcgcaaaaatgccaaagtgagagcgacagccgagaccacaacgaacaagatctag

SEQ ID NO: 231008 - DNA, 963 bp, synthetic construct
  misc_feature 1..963: note = Description of Artificial Sequence: Synthetic coding sequence
  source 1..963: mol_type = other DNA
atggcacctcgaggaagacgacgacctagacctcaccgctccgagtcagctcgtaggagcaagaacacactggagcgcacacacagtatgaaggacaaagctgggcagaaatgtaaaccaatcgatgtgtttgacttccctgacaattcggacgtcagctctatcggcaggctcggcgagaacgagaaagacgaagagacctacgagacattcgaccccccactgcacagcacagctatttatgctgacgaagaggagttctctaagcattgtggccttagtctcagttccacgccgccaggcaaggaggctaaacgcagttctgatacttcaggcaatgaagcctctgagattgagagcgttaagatttctgctaagaaaccgggtaggaagttgcgaccaatttcagacgattccgaaagcatagaggagtctgacacccgaaggaaagtgaagagcgcggaaaagatctctacacagcggcacgaggtgataagaactaccgcctcctccgagctctctgagaaacccgcagaatccgtaacgtccaaaaaaacaggcccattgtcagcccagccttccgtcgagaaagaaaacttggccatcgagagccagagcaagactcagaaaaaggggaaaatctcacacgacaaaagaaagaagagtcggtctaaggcaattggctccgatactagcgatatagtacacatatggtgccccgaggggatgaaaacttccgacatcaaggagctgaacattgtgttgcccgaattcgagaaaactcatctggagcatcaacagaggatcgagtctaaggtgtgcaaggcagccattgccaccttttatgtgaacgttaaggagcaattcattaagatgctgaaggaaagccaaatgcttaccaacttgaaacggaagaacgctaaagtgcgcgctactgccgagaccacaaccaataagatctag

SEQ ID NO: 231009 - DNA, 1014 bp, synthetic construct
  misc_feature 1..1014: note = Description of Artificial Sequence: Synthetic coding sequence
  source 1..1014: mol_type = other DNA
atggcacctcgaggcaggaggcgccctagacctcaccgcagcgagggggctagacgctccaagaatacactcgagaggacccattcaatgaaggacaaggccggacagaagtgcaagccaatcgacgtcttcgacttcccagacaactccgacgttagtagcatcgggcgactgggggagaatgagaaggatgaggagacttatgaaactttcgatccccctcttcactccaccgccatttatgccgacgaggaagaattctctaagcactgcggcctctctctgtctagtacaccacctggcaaagaggctaagaggtcaagcgacacttcgggcaatgaagcctccgagattgagagtgttaagatctccgccaagaaacccggacggaagctacgaccaatttccgacgattccgagagcatagaggaatctgacacaagaaggaaggtgaaaagcgccgaaaagatttctactcaacggcacgaggtgattaggaccacggccagtagtgagctgtccgagaaacctgcagaatctgtcacttctaagaaaactgggccactctctgcccagccctctgtagaaaaagaaaacctggcgattgaaagccaatcaaagacgcagaaaaaaggaaaaatttcacatgacaagagaaagaagagcagatcgaaagctattggctctgacaccagcgacatcgtccacatttggtgcccagaaggcatgaaaacatccgacatcaaggagctaaatattgtcctccctgagttcgagaaaacacacctagagcaccagcaacgaattgagtctaaggtgtgtaaagctgcaatcgcaaccttttacgtgaacgttaaagagcagttcataaaaatgctgaaagaatctcaaatgctcacaaatctaaagcgcaaaaatgcaaaaatgatcagcgacatcgaaaagaagcgccagcggatgatcgaggtgcaggacgaattactcaggctctggaccggggcagggctctggtag

SEQ ID NO: 231010 - DNA, 2760 bp, synthetic construct
  misc_feature 1..2760: note = Description of Artificial Sequence: Synthetic coding sequence
  source 1..2760: mol_type = other DNA
atggcagctgatgtattcatgtgtagtccccgtcgtccgagatcaaggggtcgacaggtccttctgaaaccccaggtatcagaagacgacgacgattccgacaccgatgaaccaagccccccacccgcatccggcgctgccactcctgctagagctcatgcatccgcagcccctccaccgcctcgcgctggtcctggacgcgaagagcctccccgaaggcagcagatcatccatagcggacactttatggtgtcaagtccccacagagagcatccacccaaaaagggctacgattttgacaccgtgaataagcagacctgccagacctacagctttggtaaaacctcgagttgccatctgagcattgacgccagtttgaccaaacttttcgagtgtatgacgttggcgtactctggtaagctggtgtctcccaagtggaagaacttcaaaggcttgaagttgcaatggcgggacaaaatacggctgaacaatgcgatttggcgcgcttggtatatgcagtatctggaaaaacgcaaaaatcccgtttgccacttcgtgactcccttagacgggtccgtcgatgtcgatgagcatcgacgtcccgaggctatcacaaccgaaggaaagtactggaaatctcggattgaaatcgtaatcagggaatatcacaagtggcgcacatactttaaaaagagactacagcagcacaaggacgaagaccttagcagcctggtccaggacgacgatatgctctactggcacaaacacggagacggttggaagacaccggtgcctatggaggaagatccactcctggacacagacatgctcatgtcggaatttagtgataccttgttcagtacactttccagccaccagccggtggcatggcctaacccacgtgaaattgcacacctgggaaacgctgatatgattcagccaggactgatcccccttcagcccaacctggacttcatggacacctttgagccttttcaggatcttttcagttcaagccgctccatcttcggatccatgttgcctgctagtgctagtgctccggtacctgaccccaacaatccgcctgcacaggagtccattcttccaacaaccgcacttcctacagtgagtctgcctgatagcctgattgcgcctccaacagctcccagcctggcacacatggacgagcagggctgtgaacatacaagtcggacagaagacccctttatacagccaactgatttcggcccaagtgaacccccattaagcgttccccagcccttcttgcctgtgttcactatgccactgctcagtccaagcccagccccaccaccgatttctcctgtgttgcccctggtgccccctccggcaactgccctgaaccctccagcacctcccaccttccaccaaccccagaaatttgctggagtgaataaagcgccaagtgtgatcacacataccgcttctgccaccctcacccatgacgcaccagccaccacatttagtcagtcacagggcctcgttatcacaacccaccacccagctcctagcgctgccccttgtgggctggccctcagtccagtcacaaggcccccacagcctcgcctgacgtttgtgcatccaaagccagtgtccttgactggcggacgtcctaagcagccgcacaaaatcgtgcccgcacccaagccagaaccagtcagcctggtgctgaagaatgctagaattgcaccagccgctttcagtggccaaccgcaggctgtgatcatgacctctgggcctctgaaacgggaaggaatgctcgcatctacggtgagccagtcaaacgtggtgatcgctcccgctgctattgcccgagcccctggcgtgccagaatttcactcaagtatactcgtcacagatctcggtcatgggacctccagtcctcctgcccctgtatcaaggctcttcccctctactgctcaggacccactggggaaaggcgaacaggtgccccttcatgggggatcacctcaagtaactgtgactggcccaagtcgagactgcccaaattctggccaggcaagtccatgcgccagcgaacagagccccagcccccagtcaccgcaaaataactgtagtggcaaatctgaccccaagaatgttgccgctctgaaaaataggcaaatgaagcacatcagtgcggagcagaaacgacgctttaacatcaagatgtgtttcgacatgctgaattccttgatatccaacaactcaaagctgactagccacgcaatcacccttcagaagaccgtggagtacattaccaaactgcagcaggagaggggacagatgcaggaagaggctcgacgtttgcgggaggaaatcgaggagctcaatgcaactattatctcatgtcagcagcttcttcctgccaccggtgtgccagttaccagaaggcagttcgatcacatgaaggacatgtttgacgagtacgtgaaaaccaggacattgcaaaattggaagttttggatcttcagcatcattattaagcccttgttcgagtcatttaagggtatggtatcaacgagtagtttagaggagctacatcgcactgctctctcctggctggatcagcattgtagcctccctatacttcgtcccatggtgttgtccactctgcggcagctgtccacaagtacaagtattctaaccgacccggcacagctgcccgaacaagcgagcaaggcggtgacacgtatcggcaaaaggttgggcgagagttag

SEQ ID NO: 231011 - DNA, 657 bp, synthetic construct
  misc_feature 1..657: note = Description of Artificial Sequence: Synthetic coding sequence
  source 1..657: mol_type = other DNA
atggacgaacagggatgcgaacacaccagccggactgaggaccccttcatccaacctactgattttggcccatctgagccccctttgagtgtgcccccacccccaatctcacccgtgctgcctctggtgccaccccctgcaaccgctctcaatcctcccgcaccccctacctttcaccagcctcagaagtttgccggagtgaataaggccccttcggtgatcacccacacagccagtgcaaccctcacccacgacgccccagctacaacattttcccaaagccagggattagtgattaccacacatcatccagctccgtccgccgcaccctgcggcctggcccttagtcccgtcaccagacctcctcagccgcgactaacctttgtccatcctaagcctgtgtcacttacgggcggtcggcctaaacagccacacaaaattgtccctgccccaaagccagaaccagttagccttgtgctcaaaaatgccagaatcgccccaggtgagcccggaggagagactcagtgcggcgcaccgccagaccctgaaggatgctttcccatccctaaggcttttaaactggttaccacaaccaccacactcgtctgtacctgcatgcggacccatatccatctaaacgaaacgaaagtcagctag

SEQ ID NO: 231012 - DNA, 1581 bp, synthetic construct
  misc_feature 1..1581: note = Description of Artificial Sequence: Synthetic coding sequence
  source 1..1581: mol_type = other DNA
atggacgagcagggatgtgagcacactagccgaaccgaagacccctttatccaacctacagactttgggccaagcgaaccccctctctctgtgccacagccattcctgcccgtatttacaatgcctttgctcagcccaagtcccgcaccgcctccgataagtcccgttctgcccctagtgccgcctcccgcaacggctctcaatcctcctgcccctcctactttccaccagcctcagaagtttgccggagtgaataaagcaccttctgtgataacacataccgcaagcgctacccttacccacgacgccccagccaccacctttagtcagagccagggcttggtcattacaactcaccaccctgcccctagcgccgcaccgtgtgggctggctctgagccccgtgaccagacctccacagccccgactcacattcgtccaccctaagccagtcagccttaccggaggtagaccaaagcaaccacacaagattgtcccagctcctaagcctgagcccgtttccctagttctgaaaaacgccaggatcgcacctgccgctttttccggccagcctcaggcagtgatcatgacctctggacctctgaaacgggaagggatgttggcttcaacggtatcgcagtctaatgtcgttatcgcacccgcagcaattgctagggctcccggagtgccagagtttcatagttcaattctcgtgaccgacttggggcacggaacgtctagcccgccagccccagtgtctagactgttccccagtaccgctcaggacccactcggaaagggcgagcaagtgcccctgcacggcggatcaccgcaggttactgtgacgggcccttctcgcgactgtccgaacagtggccaagcctctccctgcgcgtccgagcagtctccatcaccccaatccccgcagaataattgttccggcaagtccgatcctaagaacgttgctgctctaaagaaccggcagatgaagcatatctcagctgaacagaagcgcagattcaacatcaagatgtgctttgacatgctcaacagcctgatctccaataactccaagctgacctcacatgctatcaccctccagaagacggtggaatacatcaccaagctacaacaggaacgcggacagatgcaagaagaggcccgacgcctgagagaggagatcgaagagctaaacgctacgattataagctgtcagcagctccttcccgctactggcgttcctgtgacacgaagacaattcgatcacatgaaggacatgtttgacgaatacgtgaagacgaggaccctgcagaattggaagttctggatattttcaataattattaagcccttgttcgaaagcttcaaaggcatggttagcaccagttccctggaagaattgcatcgcactgctttatcatggctggatcagcattgcagtctccccattctgaggcctatggtcctctccactctgcggcagctttcaacgtctacctcgattctcactgatccagctcaattgccagagcaggccagcaaggccgttacgagaatcggtaagaggctcggggagagttag

SEQ ID NO: 231013 - DNA, 2559 bp, synthetic construct
  misc_feature 1..2559: note = Description of Artificial Sequence: Synthetic coding sequence
  source 1..2559: mol_type = other DNA
atggcaggggctttagctggactggcagcaggcctccaggtgccacgcgttgcgccttcacccgattccgacagtgacactgactctgaagacccgagccttcgcagatctgccggtggcctgctgagatcgcaggttattcatagtggccacttcatggtcagctccccacacagcgacagccttccacgccgaagagaccaggaaggcagtgtagggccatctgacttcgggccacggagtatcgacccaaccctgacccgactctttgagtgcctgagtctcgcttacagcggtaagttggtcagtcccaagtggaagaactttaagggactgaagctgctatgtcgcgataagatacgtctgaacaatgccatctggcgagcctggtatatccagtacgtgaaacgacgtaaaagccccgtctgtgggtttgtgacacccctacaggggcctgaagcagacgcacacagaaagccagaagcagtggtgctggaaggaaattactggaaacgcaggattgaagtcgttatgagggagtaccacaagtggagaatttactataaaaagagattacgaaagcctagtcgtgaggacgacctcctggcacctaagcaggccgagggccgatggccgcctccagagcagtggtgtaagcaacttttctcgtccgtcgtgcccgttctgttgggagatcctgaggaagaacctgggggacgacagctgctggatttgaactgttttttgagcgatatctcagacacgctgttcaccatgacacagagcgggccaagcccgctgcagctgcctcctgaagatgcgtatgtcggcaatgccgacatgatccagccagacctgactcccctccaaccctcattggatgacttcatggatatatcggattttttcaccaactcacgcttgcctcagcctcccatgccttccaatttccccgaaccaccttcttttagtccagtcgtagactcgctctttagctcaggtacgctgggtcctgaagttcccccagccagttctgccatgactcacctgagtggtcattcacgccttcaggcccgaaatagctgcccgggtccacttgactcctcagcatttcttagctccgattttctcctgccggaggacccaaagcccagactcccacctccgcctgttcctccacccctgttacactatcccccacccgcaaaagtgcccggacttgagccttgtccaccccctccttttccacccatggcgcctcctactgctctcttacaggaagagcccttattttccccgcgattccctttccccaccgtgcctcctgctcccggagtttcacccctgcccgcacctgcagccttcccccctaccccccagtctgtaccaagccccgcaccaacccccttccctatcgaactactgcccctaggatacagtgagccggcttttggaccatgtttttccatgcccagggggaaaccgcctgctcctagtcctcgcggacagaaggcctcacctcctacccttgctcctgccactgctagccctccgacaacggcaggttccaacaacccgtgtctgacacaactgctgacagcagccaagcctgagcaagcccttgagcccccactcgtgtccagtacactgctgcggtcgccgggaagcccacaagaaaccgtgccagaattcccatgcaccttcctgccgcctacccccgcacctaccccaccccgaccacctcccggacccgctaccctggctccatcaagacccctactggtgccaaaggctgagcggctaagtcccccagcacctagtggctcggagcgaaggctcagcggggacctgtctagcatgcccggtcccggaacacttagcgtgcgagttagcccccctcagcctatactgtctcgaggtaggcctgattcaaataagaccgagaatcgtcgaatcacccatataagtgcagagcagaaacggcgttttaatatcaagttggggtttgacaccctgcatggcctcgtgtccactctaagtgcgcagccatcgctgaaagtgagcaaggcaacgacacttcagaagactgcagaatacatcctgatgttgcaacaggagagagccggactgcaagaagaagcacagcaactcagagacgaaattgaggagttaaacgccgcaatcaatctctgtcaacagcagctccccgctaccggagtcccaatcacacaccagcgattcgaccaaatgagggatatgtttgacgattacgttcgaacacgcactctgcataactggaagttttgggtgttctctatcctgatacggcctctgtttgaatcgttcaatggcatggtttcaacagctagcgtgcacacattgagacagacttctctcgcatggctggaccaatattgctccctgcctgctcttaggcctactgttctgaattccctgcgacagttggggacgtcaacctccattctgactgatcccggaagaataccagaacaagccactagggccgtgaccgaaggaacccttggtaaaccgctgtag

SEQ ID NO: 231014 - DNA, 2496 bp, synthetic construct
  misc_feature 1..2496: note = Description of Artificial Sequence: Synthetic coding sequence
  source 1..2496: mol_type = other DNA
atggcgggtgcactggctgggctcgcggcaggtctgcaggtaccgagggtagctccttcaccagatagcgattccgacaccgattccgaagacccctccctaagacgtagtgccggtggccttcttagaagtcaggtcatccacagcggccactttatggtctctagcccccatagtgacagcttgccgagaaggcgggatcaggaaggaagcgtcggaccatcagatttcgggccaagaagtatcgacccaaccctcacccgtctgtttgaatgcttgtctttggcttatagcggtaaattggtcagcccaaaatggaaaaacttcaaggggctgaagctcctgtgtcgcgataaaatccgcttaaataatgcaatctggcgagcctggtatattcagtatgtgaagaggagaaaatcacctgtgtgcgggttcgttacaccgctccaaggtccagaggcagacgcccaccgaaagcccgaggctgttgtcctcgaaggaaattactggaaaaggcgtatcgaagtcgtgatgcgggagtatcacaagtggcgtatttactataagaaacgcctacggaagccgtctcgcgaggacgacctgttggccccaaaacaggccgaagggaggtggccccctccagagcagtggtgcaaacaactgttctcatccgtggtccccgtcctgctcggagaccccgaggaggagccgggaggccgtcagcttttagatctgaattgtttcctctctgacataagtgacacactgtttacgatgacacagtccgggccttcacctttgcagctacctcctgaagacgcctatgtcggcaatgctgatatgatccagccagatttgactcctctccagccatccctggatgacttcatggacatcagcgatttcttcactaattctagactcccgcagcctccaatgcctagcaatttccccgaacctccaagttttagccccgtcgtagatagtctctttagtagcggcacccttgggccagaggtacctcccgcttctagtgccatgactcacctgtctggacactcccgcctgcaagctcgcaatagctgtcctggccctttggattcaagcgccttcttgagcagcgactttctccttccagaggacccaaaacccaggttgcctccccctcccgttcctccaccattattgcactatcccccacccgcaaaagtccctggcttagagccctgtccaccccctccctttcctcctatggcccctcctactgcactcctgcaagaagagcccctattttcacccaggttcccatttcccacggtccctccagcccctggcgtctcccctttgccagctccagcagcgttcccacccactccccagtcggtgccctcacccgctcccacacctttccccattgaactcctgcctctgggctacagcgaaccggcttttggtccctgtttttctatgcccaggggaaaacccccagcccctagcccaaggggtcaaaaagcgtctccccctactctggccccagccacagcaagtcccccaactacggccggtagtaacaacccctgtctcacacaactgcttacagccgcaaagcccgagcaggcactggagcccccattagtgtcctccactctgttgcggtccccaggatcaccacaggaaacagtgccagaattcccgtgcaccttcttaccccctacccccgcaccgacaccaccacggcctcccccaggacctgccacccttgctccgtccagaccactactggttcccaaggctgagaggctctctccacctgcacctagtggcagtgagcgtagactgtccggagacctctcatccatgcctggacccggaacactgagtgtgcgggtctctccaccccaaccgatcctctctcggggacggcctgacagcaataaaaacaggaggattactcatatctctgccgagcagaaaaggcgcttcaatattaaactgggatttgatacattgcatggcctggtgtcgactttgtcagctcaaccttcgctaaaagagcgggctgggctgcaagaggaggcccaacagttgcgtgacgagatcgaggagctcaatgccgcaatcaatctgtgtcagcagcagctgcccgcaaccggcgtccccatcactcaccagcggtttgatcagatgagggacatgttcgacgattacgtaaggactcgcacgctgcacaattggaaattctgggttttcagcatactgattcgacccctgttcgagtccttcaacggtatggtcagcaccgcctcggtccacaccttgcgacaaactagcctggcctggctggatcagtactgcagcttaccggctctacgtccaaccgtgctgaacagccttcgccagctggggacgtcaacctcaatccttaccgaccctgggaggatcccagaacaggccacccgggcagtgacagagggaacgctgggaaagccattatag

SEQ ID NO: 231015 - DNA, 2280 bp, synthetic construct
  misc_feature 1..2280: note = Description of Artificial Sequence: Synthetic coding sequence
  source 1..2280: mol_type = other DNA
atggctggggcactggccggactggccgcaggactgcaggtgccaagggtggctccttcgcccgacagtgatagcgataccgattccgaggatccaagtctcagaagatcagctgggggactcctgcggagtcaagtcatccacagtggccattttatggtgtccagccctcatagcgactccctccccaggcggagagatcaggaaggctccgtgggacctagcgatttcgggccacgcagcatagacccaacactcactcggctgtttgagtgcctctctctggcctattcagggaagctcgttagtcctaaatggaagaactttaagggtctgaaactattgtgcagagataaaatcaggctcaacaacgcaatctggcgcgcttggtacatccagtacgttaagagacggaagagcccggtctgtggctttgttacgcctctgcagggacctgaggctgatgctcataggaagccagaagcagttgtcttagagggtaattattggaagaggagaattgaactccctcccgaagacgcgtacgtgggcaacgctgacatgattcaacctgatctaacacctctacagccttctctagacgatttcatggatatttctgatttctttacaaactctcggttaccccaaccaccaatgcccagcaacttccccgagccaccaagctttagccccgttgtggacagcctcttttcatcaggaaccttaggacccgaggtcccccctgcctccagcgccatgacacacctttcaggacattctcggctgcaggccaggaatagttgcccagggccactggactcgtccgcttttctgtcatccgactttctcttgccagaggatcccaagcctaggctgccgccaccacccgtaccgccaccattgctacactacccccctccagccaaagtgcctggtttggaaccatgtccacctcccccttttcccccaatggcgccaccgactgctctgctccaagaagagccgcttttttcaccacggtttccatttccgaccgttccaccggctcctggcgtcagcccacttccggcacccgctgcctttccaccaactcctcagtctgtgcccagtccggctcctactccattccccattgagttactgccgcttggatattcggagcctgccttcgggccatgtttttctatgcctcgcggaaagccacccgctccaagtccccgtggacagaaagcctcccctcccactttggctcccgcaactgcttcccccccaactaccgctggttcaaacaatccctgtctgactcagttactcacagcagctaagcccgagcaggctctggagcctcccttagtctcttcaacactgctgcggagcccgggaagtccccaggagaccgtacctgaattcccctgtacttttctgcctcccacccccgcacctacgccccctaggcccccaccaggccctgccaccctcgcaccttccagacccctgctcgtgcccaaggccgagcggctctctcccccagctcctagtgggtccgaaagacgcctttcaggagacctgtcatctatgcccggtcccggaaccctgtccgtccgagtctcgcctcctcagcctatccttagtaggggacgcccagactcgaacaagacagaaaataggagaatcacccacataagcgcagaacagaaacgacggtttaatatcaagcttgggtttgacacgctgcatggattagtgtcaacactaagtgctcaaccatcactgaaggtgtctaaggcaactacactgcagaagaccgctgagtatatcctgatgttgcagcaggagagagcaggcttgcaggaagaggctcagcagttacgggatgagatcgaggaactaaacgccgctattaatctctgtcagcagcaacttcctgccactggcgttccaatcacgcaccagcggttcgatcagatgagagacatgttcgatgattacgtgaggactcgcactctccataactggaaattttgggtcttttcaatcctcattaggccactgtttgagtcctttaatggcatggtgtccacagcctctgttcacaccctgaggcaaaccagtcttgcctggctcgaccagtactgctcgctcccagcacttcgcccaactgtcttgaactccctccggcagctcggaacaagcactagcattctcaccgacccaggaagaatacctgagcaggcaacccgggctgtgaccgaaggcacgctgggaaaaccactttag

SEQ ID NO: 231016 - DNA, 2553 bp, synthetic construct
  misc_feature 1..2553: note = Description of Artificial Sequence: Synthetic coding sequence
  source 1..2553: mol_type = other DNA
atggccggagccctggcagggctcgcggcaggactccaggtgccccgagtggctccctctcccgattcggactcagatactgacagtgaggatccatctctacgacggagcgcagggggtctcctaagaagtcaagtgatacattcgggccattttatggtctcctctccacactctgactctcttccacgtcgtagagatcaggaggggagtgtcggaccatctgacttcgggcctcggtctatcgaccctaccctgacgaggctgtttgaatgtctgtcgctggcatacagtggtaagctcgtgagcccaaagtggaaaaatttcaaggggctgaaacttctttgcagggataagatcagacttaataatgccatctggcgcgcttggtacatacagtacgtcaagcggaggaagagccccgtttgtgggttcgttacacctcttcaggggccagaggccgatgcacacagaaagcccgaagctgtggtcctggagggaaactactggaagcgacgtattgaagttgtgatgcgcgagtatcataaatggcgcatctactataaaaagcgcctgagaaagccttcccgcgaggatgatctgctggccccaaagcaggcggaaggacggtggccccctcctgagcagtggtgtaagcagctgttctcctccgttgtaccagtgctgctgggcgaccccgaggaagaaccgggaggacggcagctgctcgaccttaactgtttcctgtccgatatctcagatacactgtttaccatgacccagagcgggccttcgccattgcagctgccacccgaagacgcatacgtcggcaatgctgacatgatccagcccgacctgactcccctacagcctagtctagacgattttatggacatcagtgacttcttcacaaactccaggttaccgcagcctcctatgccgtcaaacttcccagagcccccatccttctctcctgtcgtggactccctgttttcatcggggaccctcggccctgaagtgcctccggctagctctgctatgacccatctaagcggacacagtaggttacaggccagaaattcttgccctggccctctggactcttccgcctttctgtctagcgattttctgttgcctgaagatcctaagcccagacttcctcccccacctgtaccgcctccgctgctccactatccgcctccagctaaggtcccaggactggaaccctgccctccccctccattcccccctatggcacccccaacagctctcctgcaggaggagccactgttttctccgcgattcccctttcccactgtgccgccagctcccggagtctcccctttgcccgctcctgctgcgtttccccctacaccccaatcggtaccttcacctgcacctacaccattccctatagagcttctgccccttgggtacagcgagcccgcttttgggccttgcttctccatgccgagggggaaacctccagccccttcccccaggggacagaaggcaagtccgccaacactcgcccctgcaacggctagcccacccaccacagccggatcgaacaatccttgtttaacacagctgctgacagccgcaaagcctgaacaagcactagagccacctttggtctcttccactctgctacggtcacctggaagcccacaagagacggttcccgagttcccctgtacgttccttccaccaaccccagctcccactccaccacggcctccacctgggcctgccacattggcgccatcacgaccactgctcgtgccaaaggccgagcggttatctcctcccgctccctctggctccgaaagaagactcagtggggatctatcttcgatgccaggccctggcacactcagcgttagagtgtcacctcctcagccaatcttgagcagaggtagacccgacagcaacaagaatagacggattacacatatttccgcagagcagaaaaggcggttcaacatcaaactaggatttgatactctgcacggacttgtgtccacactgtctgcccagcccagtctgaaggtctccaaggcgactacgctccagaagaccgccgagtacatactgatgctgcaacaggaaagagccggacttcaggaagaggcacagcagctcagggacgagatcgaggagctgaacgctgcaatcaatctctgtcaacagcagttgcccgcaaccggcgtccccatcacccatcaacggtttgatcaaatgagagatatgttcgacgattacgttcgcacccggacactgcataattggaaattttgggtgttctctattctgattagacctttgtttgagtcatttaacggcatggtctctacagccagcgtgcacactcttagacagactagtctggcttggctggaccagtactgtagtttacccgctctgcgacctacagtgctcaattctctacggcaattggggacctctacttccattttgacagacccgggtcggattcccgagcaggctacccgggcagtgaccgaaggcacgttgggcaaacccctgtag

SEQ ID NO: 231017 - DNA, 2502 bp, synthetic construct
  misc_feature 1..2502: note = Description of Artificial Sequence: Synthetic coding sequence
  source 1..2502: mol_type = other DNA
atggctggtgccctggccggactggccgcaggacttcaggtgcctcgcgtcgctccctcccctgattcagactctgacaccgacagtgaggacccctccctgcggagaagtgccggaggacttttacgtagccaggtgatacattcaggacacttcatggttagcagcccccacagcgactccctgcctaggaggagggatcaggagggtagtgttggaccatcagatttcggtccacggagcatagaccctaccctaaccagactattcgaatgtttgtcccttgcatattctgggaaactggtctctccaaaatggaaaaattttaaggggttaaagctactgtgccgcgacaagatccgactgaataacgctatctggagggcatggtatatccagtatgtgaagaggcgtaagtcacccgtctgcggttttgtgacccctctgcagggacccgaggccgacgcacacagaaaaccagaagcagtcgtcctcgaaggaaattattggaagagacggattgaggtggtgatgagagaataccacaagtggagaatttattataagaagaggttacgcaagccgtcacgagaagatgacttgttagctcctaagcaggctgaaggtcgatggcctcctcctgaacagtggtgtaaacagctgttcagttctgtggtccctgtactgcttggagatcccgaggaggagccagggggaaggcagctgctggacctcaattgtttcctctcagatattagtgacactcttttcacaatgacacaaagcggtcccagccccctgcaactgcctcctgaagatgcctacgttggaaatgcagatatgatccagccagatctgacacccttgcaaccaagtttagacgactttatggacatttccgacttcttcactaattcccgacttccacagcctcctatgccatcgaattttcctgagccccctagtttttctcccgtggttgatagtctgttcagcagtgggacacttggaccagaggtgccacccgcaagctcagctatgacacatctctcaggtcactcgagactgcaggccagaaattcttgccctggaccgctggacagctctgcattcctctcttcagactttttactgcccgaagatcctaagccgaggctgcctcctccacctgtgcctccccctctgctgcactatcctccgcctgccaaggtgcctggccttgagccttgccctccgccaccttttccgccaatggccccaccgacggctcttctgcaggaagagcccctgttcagtccaaggttcccatttccaacggtgcccccagcacctggagtgagcccgcttccggctcccgctgctttcccccctaccccacagtcagtcccatcacctgccccaaccccttttcccatcgaattgctcccactcgggtactccgaacctgcattcggaccctgttttagcatgccacgcggtaagccaccagccccatccccaaggggacagaaggcgtcgccccctaccctggcacctgcgaccgccagccctccgacaactgccggtagcaataatccttgccttacccagctgcttactgcagcaaagcctgaacaggcgctcgaacctccactggttagttccacactgctccggtcaccgggaagtccccaggagaccgttcccgaatttccctgtacctttctcccccctactccggcacccacaccacccagaccaccaccgggacctgccaccctcgcgccatccagaccactgttggtgcctaaggccgaacggctgagcccccctgccccatcaggatctgagcgacgacttagcggagatctgagctcgatgcccggacccggaactctttccgtccgggtgtccccgccacagcccatcctgagccgtggacggccagattcaaacaaaaccgagaataggcgcattactcatatcagcgcagaacagaaacgccgtttcaacattaagctcgggttcgataccctccatgggttggtttctacactttcagcccagccatccctgaaagagcgcgcaggcctacaggaagaggcccaacagttgcgtgatgagatcgaggagctgaacgccgcaatcaatctctgtcagcagcagctccccgcaacgggggtgcctattacgcaccaaaggttcgatcagatgcgagacatgttcgacgactatgtcaggacaaggacccttcacaactggaagttttgggtttttagcattctcattagacctctctttgagtctttcaacggaatggtgtctactgcctctgtccacacacttcgacagacctcgcttgcctggctggatcagtattgttcactgcccgcactgaggcccaccgtcctgaactcactcagacagctcggcacctccactagcatcctgacggacccaggacgcatcccagaacaggcaactagggccgtgactgaaggcactttgggcaagcctctgtag

SEQ ID NO: 231018 - DNA, 1059 bp, synthetic construct
  misc_feature 1..1059: note = Description of Artificial Sequence: Synthetic coding sequence
  source 1..1059: mol_type = other DNA
atgaacaccatcgtctttaataagctcagcggggcagttctgttcgaggacggtggcgcatccgagcgagagcgtggaggaaggccctattctggcgtgttggacagtccgcacgctagacctgaggtggggataccagacggcccacctctgaaggacaatctggggctcaggcatcggagaacaggagcccgacaaaacggcggaaaagtgcggcacaagcgacaggccctgcaggatatggcgaggccattaaagcagtggctgtacaagcatcgggacaatccctatcccaccaaaaccgagaagatcttactggccctcggttcacagatgacattggtccaggtgagtaattggttcgccaatgcgagaagacgactcaaaaacacggtgcgtcagccggatctttcatgggccctcagaatcaagctatacaataagtatgtacagggcaacgcagagaggctgtctgtgagctcagatgattcttgctctgaggacggcgagaaccctccaaggactcacatgaatgagggcggatacaacacacccgttcatcatccggtgatcaagtcagaaaactcagtaattaaggccggtgtgagacctgagtctagagcttccgaggactatgttgcccctccgaagtataaatccagcctgctaaaccggtatttgaacgactcgctgcggcacgtgatggcaaccaataccactatgatgggcaaaacacgacagcgcaatcattcggggtcctttagcagcaacgaatttgaggaggagttggtatccccctcttcgtccgaaacggagggaaacttcgtgtaccgcactgacaccctggaaaatggaagcaataagggcgagtccgccgctaacaggaaaggcccaagtaaggacgatacctactggaaagaaatcaatgcagctatggcactgacaaacctggcccagggtaaagacaaactgcagggcacaactagctgtattattcagaaaagcagtcacattgccgaggtgaaaactgtgaaggtgcctctggtgcagcagttctag

SEQ ID NO: 231019 - DNA, 1059 bp, synthetic construct
  misc_feature 1..1059: note = Description of Artificial Sequence: Synthetic coding sequence
  source 1..1059: mol_type = other DNA
atgaataccattgtcttcaataaactaagtggggcagtattattcgaagacggtggcgcttctgagcgcgaaagaggcggacgaccttactccggggttcttgattcccctcatgctcgccctgaagtggggatccccgacggccctcccttaaaagataacttgggccttcgccaccgtagaaccggtgccagacagaacggcggtaaagtgagacacaagcgccaggccctccaagacatggctcgccctttgaagcagtggctttacaaacatcgtgataacccctaccctacaaagacagagaagattcttttggccctcgggtcgcagatgactctcgtccaagtttcgaactggtttgccaacgccaggcggcgattgaagaacaccgttaggcagcctgacctgtcctgggctcttcggattaagctctataataaatacgttcaggggaatgccgaaaggctcagcgtgtctagcgatgattcctgcagcgaggacggtgaaaatccaccgagaacacacatgaacgaggggggttacaataccccagtgcaccaccccgtgataaaaagtgaaaacagcgtcattaaggctggcgtaagaccagaatctcgggctagcgaggattacgttgctccacccaagtataagagtagccttttaaaccgatatttgaatgactctctcaggcacgtcatggctaccaacaccactatgatgggcaagactagacaacggaatcattccggatctttctcttccaatgaatttgaggaagaacttgtaagcccgtccagcagtgaaactgaagggaacttcgtgtacagaaccgatacgctggagaatggaagtaataagggagaaagcgccgcaaatcggaagggtccctccaaggatgatacttactggaaagaaatcaatgccgctatggcacttaccaaccttgcacaggggaaggacaagttgcaaggtactacaagctgcatcatccagaaatcctcccacattgcggaagtgaagacagtcaaagtgcccctcgtccaacagttttag

SEQ ID NO: 231020 - DNA, 177 bp, synthetic construct
  misc_feature 1..177: note = Description of Artificial Sequence: Synthetic coding sequence
  source 1..177: mol_type = other DNA
atgaatactatagtgttcaacaaactatccggagccgtcctgtttgaggacggaggcgcatcagaaagggagcggggaggcaggccatattctggcgtgctggactctccccacgctcggcctgaagtgggcattccagatgggccacctcttaaagacaaccttgggctgcgctag

SEQ ID NO: 231021 - DNA, 288 bp, synthetic construct
  misc_feature 1..288: note = Description of Artificial Sequence: Synthetic coding sequence
  source 1..288: mol_type = other DNA
atgaacttcgatttcccattcaaaaaaggaagtggaatcccgctgctcactaccaatctctccccacagtgcctgtccctacttcatgctatggtcgcttatgacccggatgaacggatagccgctcatcaggccctccaacacccttacttccaggagcagaggactcagaatggatcagaggacgaggcaagtgctgtcctgctgcccattcagaccagaagcagtctcaatccactgctgtcgacctgtatgttgccgggaagatcagtgacacttcttgtatag

SEQ ID NO: 231022 - DNA, 1260 bp, synthetic construct
  misc_feature 1..1260: note = Description of Artificial Sequence: Synthetic coding sequence
  source 1..1260: mol_type = other DNA
atgaaaaattacaaagctattggcaagatcggagagggcacttttagcgaagttatgaaaatgcagtcacttcgggacggtaactactacgcttgcaaacaaatgaagcagcgctttgagtccatagaacaggtgaacaacctgcgcgagatccaagccctccggcgtctcaaccctcaccccaacatcctgatgctgcatgaggtcgtgtttgatcggaaaagcgggtctcttgctttaatctgcgaactgatggatatgaatatctacgaactgatacggggtagaaggtatccactgtccgaaaaaaaaataatgcattacatgtatcagctgtgcaagagcctcgaccacattcataggaacgggatctttcacagggatgtcaagcctgaaaacattctgatcaaacaagacgtactgaagctgggcgatttcggcagctgccgctcagtgtattcaaaacagccttacactgaatacattagcactaggtggtatcgcgctcccgagtgcttactgaccgatggcttttatacgtataaaatggatttgtggtccgcaggatgtgtgttttatgagattgcatctctacagccactcttccctggcgttaatgagctcgatcagatctcaaagattcacgatgtcataggcacacccgctcagaaaatcctgacgaagttcaaacagtctagggccatgaacttcgattttcccttcaaaaaggggtctggcatcccactgctgacaacaaacctgagccctcagtgcctgagtcttttgcatgctatggttgcctatgatccggatgaaagaatcgctgcccaccaggccctgcagcatccgtatttccaggaacagcgaaaaaccgagaagagggcgttgggttcccaccgaaaggccggatttcccgaacacccggtagccccagagcccctttccaattcctgccagataagcaaagaagggaggaagcaaaaacagtccttgaaacaggaggaggaccggcctaagagacggggtcctgcatacgtgatggagcttcccaagctgaagctttcgggagtagtaagattgtcaagctattcttcccctaccctgcaatcagtgttaggctccggcacgaacggcagagtcccagtgttaagacctctgaagtgcatcccagctagcaagaagactgatccccagaaagacttgaagcctgcgccacaacagtgcagactaccaactatcgtgcgaaagggaggacgatag

SEQ ID NO: 231023 - DNA, 2667 bp, synthetic construct
  misc_feature 1..2667: note = Description of Artificial Sequence: Synthetic coding sequence
  source 1..2667: mol_type = other DNA
atggcgggagctgcagccgaatctggtcgagagctctggacttttgccggtagtcgtgacccgtcggcaccacggctggcttacggatacggaccaggctccctcagagaactgcgggctcgggagttcagcagattagctgggacagtctacctggaccatgccggagcaactctgttctcccagtcccagctcgaaagctttacgtccgatctgatggagaacacatacgggaaccctcattcccagaacatttcttctaagctgacgcacgacacagtagaacaagtccgttacagaatcctggcacacttccacaccactgctgaggattacacagttatctttacagcgggatcaacagccgctctaaagctggttgctgaggcctttccctgggtcagccagggccctgaaagcagcgggagccgcttttgttatctgaccgattctcatacctcagtcgttggcatgcgtaatgtgacaatggccatcaatgtcatttccacccctgtgaggcctgaagatctctggtctgccgaggagcgaagcgcttcagcctccaatccggattgccaactgccccatctcttttgctatcccgctcagagcaacttcagtggtgtccgctatcctctcagttggatcgaggaggttaagagtgggcgtctgcaccctgtcagcacgcccggaaagtggttcgtactgttagacgctgctagttatgtgagcaccagccccttggacctttcagcccatcaggctgactttgtccccatctccttctacaagatcttcggtttccccaccggactcggggcactgctggtgcacaatagagcagctcccctgctacgaaagacatattttggcggaggaacggcttccgcatatctcgccggagaagatttctatatcccaagacagtcggtagctcagcgcttcgaggacgggacaatcagtttccttgacgtcattgctcttaagcacgggttcgacaccctggaaaggcttactgggggaatggagaatattaaacagcacactttcaccttagcgcagtatacttatgtggcactttcatcattacagtaccctaacggtgcacctgttgttcgtatctactccgactcagaattttcatcaccagaagtgcagggaccgatcattaactttaatgtccttgatgataagggtaacatcatcggttacagccaggtggataagatggcttccttatacaatatccacctgagaacgggatgcttttgtaatactggggcttgtcaacgacacctcgggatctccaatgaaatggtgcgcaaacattttcaagccggacacgtatgtggcgacaacatggacctaattgacggacagccgactggctcagtgcgcatatcattcggctacatgagcacactcgacgacgtgcaggcctttctacgctttatcattgatacgcgtctacattcatcaggagattggcccgtcccacaagctcatgcggatacgggtgaaacaggagctccttctgctgattcccaagccgacgtcatccctgccgtaatggggagaagaagcctctcaccacaggaagatgccctcaccggcagcagagtctggaacaatagcagcacggtcaacgcagtcccagtggcccctcctgtgtgcgacgtcgcgagaacgcagcccactccgtccgaaaaggcagccggagtgttagagggcgctcttggcccacatgttgtgacaaatctctacctgtatcctattaaatcttgcgcagcttttgaggtaacacggtggcccgtggggaaccagggccttctctacgatcggtcatggatggtggtgaaccataacggggtgtgtctgtcccagaagcaggaaccacgactgtgtcttatccagcctttcattgatttgcgacaacgaattatggtcattaaagctaagggtatggaaccaattgaggtgcccctggaggaaaactcagagagaacccaaatccgccagtcacgtgtgtgtgcagatcgcgtgagcacgtatgattgcggtgaaaagatctcttcatggctctccactttcttcggaagaccctgccatctgattaagcagtccagtaatagccaaagaaacgccaaaaagaagcacggcaaagaccagttacctgggacaatggccacgttgtccctggtcaatgaagcccaataccttctcatcaacacatcatccatccttgagttacataggcagctgaacacatcagacgaaaacggtaaagaagaactgttttcactgaaagacctctctcttagattccgcgctaatatcataatcaatggcaagagggccttcgaagaagagaagtgggacgagataagcattggaagtctgagatttcaggtgctcggcccttgccacagatgtcaaatgatttgtattgaccagcagaccggacagagaaatcagcacgtttttcagaaactgagcgagtcccgggagacaaaggtgaactttggcatgtacttgatgcacgcctcccttgacctgagttctccatgcttccttagcgtgggatctcaggttttaccagtcctcaaagaaaacgtcgaaggacacgatctgccggcatccgaaaaacatcaggacgtcacatcttag

SEQ ID NO: 231024 - DNA, 1863 bp, synthetic construct
  misc_feature 1..1863: note = Description of Artificial Sequence: Synthetic coding sequence
  source 1..1863: mol_type = other DNA
atggcagctcgacctttgtcccgcatgctgagaaggcttctgcgtagtagtgcacgcagctgctcctcgggagcccctgtgacacagccctgtcccggtgagagcgctcgcgcagccagcgaggaggtttccagacggaggcagtttctgagagagcatgctgccccattctccgcattcctgactgattccttcgggagacaacactcttatctgaggatcagcctgaccgaaaaatgcaacctgaggtgccagtattgcatgcctgaggaaggcgttcctttgacccccaaagcaaacctgcttacaacggaagagatcctgaccttggccaggctgttcgtgaaagaaggtatagataagatccgattgacaggaggagagccattaatccgccctgacgtggttgacatcgttgcacagctgcagcgactcgaaggactgaggacaattggggtgacaactaacgggattaacttagctaggctcttgcctcagttgcaaaaagccggactcagcgctatcaatatcagcctggatacactagtgcccgcaaaatttgaatttattgttcggaggaagggattccacaaagtgatggaagggattcacaaggccatagagcttgggtacaaccccgtaaaggttaattgcgtagtcatgcggggtttaaatgaggacgagctcctagattttgccgcactgaccgagggactccctctggatgtcaggtttatcgagtatatgcctttcgatggtaataaatggaatttcaagaagatggttagttacaaggagatgcttgacaccgttagacaacagtggcctgagctggaaaaagttcctgaagaggagtccagcacggcgaaggcattcaagatccctggatttcagggacagatctccttcataacctccatgtccgagcacttctgcggaacctgcaaccggctgcgaataactgctgatggcaatctcaaagtgtgcctcttcggaaacagcgaggttagtttgcgcgatcacctgcgcgctggagcctccgaacaggagctactaagaatcattggggctgccgttggcaggaagaagcgccagcacgctgagctcttccttatgttccccaattccccacccgcaaatccaagcattttttcctgggacccgttgcatgtccagggcctccgcccacgcatgtctttctccagtcaggttgctacactgtggaaaggctgcagggttccacagacaccacctctggcacagcagcgtttaggatctggaagctttcagcgccactacacttcccgggctgattcagatgcgaattctaagtgcctgtctccaggttcttgggcctccgctgccccttccggaccccagctcacatccgagcagctcactcatgtagacagcgaaggtagggcagctatggtggatgtggggcgtaaaccggacaccgaacgcgtagctgtcgcatcagccgtggtattactcggcccagtagcgtttaaactcgtacagcagaatcaactgaagaagggcgatgccctagttgtggctcagctggcaggagtacaggccgctaaagtgactagccagctgattcccctttgccatcacgtggcattgagccacattcaagtccaactggaattggattccacaagacatgctgtcaagatccaagccagttgccgcgctcggggtcctacgggcgtggagatggaggccctgacttctgccgcagtggctgctcttaccctatacgatatgtgtaaagccgtcagtagggatattgttctggaggagatcaagctgatctccaagacaggcggtcagaggggcgacttccaccgggcttag

SEQ ID NO: 231025 - DNA, 1911 bp, synthetic construct
  misc_feature 1..1911: note = Description of Artificial Sequence: Synthetic coding sequence
  source 1..1911: mol_type = other DNA
atggctgccagacctctgagcagaatgctgcgcagactcctgagaagctctgccagatcttgttcctccggggcaccagtcacacaaccatgccctggggagtctgccagagcggctagcgaagaggtcagccgccgaagacagtttctgcgagagcatgccgcaccattttctgcgttcctgaccgacagctttgggcgacagcatagctacctgagaatttctctcacagaaaagtgtaacttgaggtgtcagtattgcatgccagaggagggcgttccattaaccccaaaagccaacttgctaactaccgaggagattcttacgctcgctcgcctgtttgtcaaggaagggattgacaaaattaggctcacgggaggggagcctctgatcaggcctgacgttgtggatatcgttgcacaactccaaagactggagggacttaggactattggagttactaccaatggcattaatctggctagattactgcctcagctacagaaagccggtttgtccgcgatcaacatctctttggataccctggtgcctgcaaaatttgagttcattgtacgcaggaaggggttccacaaggttatggaaggaatccacaaggctatagaattaggatataatccagttaaagtcaactgtgtcgttatgcgcggtctgaatgaggatgagctgttggattttgccgctcttactgaaggattgcccctagatgtcaggtttatagagtatatgccttttgatggaaacaaatggaattttaaaaagatggtgtcttataaagagatgttggacaccgtgcgccaacagtggcccgagctggagaaagtgcctgaggaagaatcgagcactgcgaaagcattcaaaatcccaggctttcagggtcagatatcatttattacatcaatgtccgaacacttctgcggtacctgcaatcgtctgcgcattacggccgatgggaatctcaaagtctgcctgtttggcaacagcgaagttagcctgcgggaccacctccgcgcaggggcatcagagcaggaactgctgcgaatcatcggcgctgcggtgggtcgcaaaaaaaggcaacatgcgggaatgttcagcattagccagatgaagaaccgcccaatgatcctcatcgagcttttcctgatgttcccgaattcacctcctgccaatccaagcatcttcagctgggatccgctccacgtgcagggccttcgccctagaatgagtttctcgtcccaagtggccacactgtggaagggctgtagagtgccacaaacccctccccttgcccagcagagattaggctctggttccttccagcggcattatacttcccgtgcagactcagatgctaactctaagtgcctttcccctgggagttgggcctctgccgcaccatccggccctcagctgaccagtgaacaacttactcatgttgacagtgagggtcgtgctgcgatggtagacgtgggcagaaaaccggatacagagagggttgctgtggcctcagctgtcgtcctgctgggcccagtggcattcaaattggtccagcaaaaccagctgaagaagggggatgcgctcgtggtggctcaactagcaggcgttcaagccgctaaagtgacgagccagctgatacccctttgccaccacgtggccctcagtcacatacaggtacaactcgagcttgattcaaccaggcacgccgtcaaaatacaggcctcctgtcgagctcgcggtcctacgggtgtcgaaatggaggccctaactagcgcagcggtggctgcactgactctgtatgacatgtgcaaagccgtgagtagagatatagtcttggaggaaatcaaactcatctctaagacaggtggacagcgcggagatttccaccgagcgtag

SEQ ID NO: 231026 - DNA, 456 bp, synthetic construct
  misc_feature 1..456: note = Description of Artificial Sequence: Synthetic coding sequence
  source 1..456: mol_type = other DNA
atgcctttcgatggtaataagtggaattttaagaagatggtgagctacaaagaaatgctggacactgttcgacagcaatggccagagcttgaaaaagtgcctgaggaggagtccagcaccgcaaaggcgttcaagatacccggattccagggccagatatccttcatcacctccattctgacagtagctcgatcctgttggccactctttctgtggcccccttcatccgagaccggatgtgcgcacatgggacattcacctaaggactcgtgccagaccacacagcccaccccaggccctgttcatgggtgctctactcacccaagcctgttttggtccatttccggcaaggagaagttaatgattgactgcttgcacccacactctgctcagataaagctcaggtgtcaactatgcaggtgcaagaatgaagatactgtgtgggtgggccattag

SEQ ID NO: 231027 - DNA, 1071 bp, synthetic construct
  misc_feature 1..1071: note = Description of Artificial Sequence: Synthetic coding sequence
  source 1..1071: mol_type = other DNA
atgtggaaatcctggaaattgagaacggatgtcagggaggtgtccaggcggaggcaattcctgcgcgaacatgcagcacccttttcagctttcctgactgattctttcggacgtcagcacagctatcttcggatctcccttaccgagaagtgtaatctgcggtgccagtactgtatgccggaggaaggcgttcccttgacacctaaagcaaacctccttactaccgaagaaatattgacactagcccgactgtttgtgaaagaaggaattgacaagatcagacttaccggcggtgaaccattgattcgccctgatgtcgtggatattgtggctcaactgcagcggctggagggccttcgaaccatcggcgtcaccactaacggaattaatcttgctcgtctgctgcctcaactgcagaaggccggactgagcgccattaatatttcactggatacgctggtccctgccaaattcgaattcattgtgagacgtaagggttttcacaaggtcatggagggtatacacaaggctattgaactggggtacaaccctgtgaaggttaattgcgtcgtgatgcgcggtcttaatgaagacgaactgctcgattttgcagcactgaccgaaggactgccacttgatgtcagatttattgaatatatgccgttcgatggaaataagtggaattttaagaagatggtgagttataaagaaatgctcgacacagtccgtcagcagtggcccgaattagagaaggtgcctgaagaggagagttccaccgcaaaggctttcaagatacccggttttcaaggacagatctctttcatcaccagtatgagtgaacacttctgtggcacctgcaatagactccgtatcacagcagacggaaacctgaaggtatgcctgttcggcaacagcgaagtgtctctgcgcgatcacctgagggccggagcttccgaacaggagttgttacggattattggtgcagctgtaggcagaaagaagagacagcatgccggaatgttctctatcagtcagatgaagaaccgcccaatgatactgattggcggatag

SEQ ID NO: 231028 - DNA, 1158 bp, synthetic construct
  misc_feature 1..1158: note = Description of Artificial Sequence: Synthetic coding sequence
  source 1..1158: mol_type = other DNA
atgtggaaatcgtggaaactgagaactgacgtcagagtacgtgagggggcaggagggagcccatgcgcctcctcacagcctgggagtaggggaccctgcttcctgccaggcctgtccagccaggaagtgtctcgcaggaggcagttcctacgtgagcacgcggctcccttttccgccttcctgacagactcttttggtcgtcagcactcctaccttagaatctccctgacagagaagtgcaacttacgctgtcagtattgtatgccagaggagggagtgcctttgactcctaaggcaaaccttctcacgacagaggagatcctgaccctcgctcggctgtttgtgaaggagggtatagacaaaatacgccttacaggaggagaacctctgatccgcccagacgtggtagatatcgttgcccagttgcagcgcctggagggcttgcgtaccattggggtgacaaccaacgggatcaatcttgccaggcttttgccacagctgcaaaaggccggactcagcgccattaacataagcttggacacgttggtgcccgcaaagtttgaattcattgtgaggcggaaggggttccataaggtgatggaaggtatccacaaagctattgaactaggatataatcctgtgaaagtgaactgcgtcgtcatgcgcggactcaatgaagacgaacttcttgatttcgccgctttaacagaggggttgccccttgatgtgagattcattgaatacatgccgttcgacggtaataaatggaacttcaagaagatggtatcttacaaggagatgttggatactgtgcggcagcagtggccggagctggaaaaagtgcccgaggaggaaagtagcaccgccaaggcctttaaaatcccgggttttcagggacagatttcgtttattacctctatgtccgagcacttctgtggcacatgcaatcgactaagaattaccgccgatggaaatcttaaagtgtgcctctttggaaactctgaggtgagcctacgggatcacctcagggcaggggcaagcgaacaagaacttctgaggatcatcggggctgcagtcgggaggaaaaaaagacaacatgccggtatgttctcaatcagccagatgaaaaaccgcccaatgattctgattggcggatag

SEQ ID NO: 231029 - DNA, 1158 bp, synthetic construct
  misc_feature 1..1158: note = Description of Artificial Sequence: Synthetic coding sequence
  source 1..1158: mol_type = other DNA
atggcagcacgccctctctccagaatgctccggagactcctgaggagcagtgcccgatcctgctcttcaggggcaccagttactcagccttgtccgggagagtccgccagggccgcaagcgaagaagtcagccgtaggcgacagttccttagggaacatgcagcacccttttcagctttcctcaccgacagcttcggcaggcaacacagttacctgcgcatctccttgaccgagaagtgtaatttacggtgccagtactgcatgccggaggagggcgtgccacttacacccaaagcaaatttgcttactaccgaagagatcctgaccctcgccaggctgtttgtgaaggaaggaatagacaagattagactcaccggaggggagccgctaataaggcctgatgtcgtcgatatcgtggcccagctgcaaagactcgaaggcctgcgaactattggagttaccactaatggcatcaatctggcccgactgttgccccaactgcaaaaggccggattgagcgccatcaacatcagcttagacacactggttccggctaaatttgaattcatcgttcgacggaaaggatttcataaagttatggaaggcatacacaaagcgatcgaactggggtataacccagtaaaagtgaactgtgtggtgatgagaggcttaaacgaggatgaattacttgactttgccgctctcaccgaggggttacccctggacgtacgctttatcgagtacatgccgtttgatgggaacaagtggaattttaagaagatggttagctataaggagatgttagacacagttcgccaacagtggccagagcttgagaaggtgccggaagaggaaagtagcaccgcaaaagcctttaaaattcctggattccaggggcagatctcattcattacctcgatgtccgagcacttctgcggcacctgtaaccgtctcaggataactgctgacggcaatctgaaagtctgtctgttcggaaattcggaggtctctctaagagatcacctcagagcgggagcgtcagagcaggaactgctccgtataataggcgcagctgtggggcgtaagaagcggcagcatgccggtatgttctctattagccagatgaaaaataggcctatgatactgataggaggctag

SEQ ID NO: 231030 - DNA, 1602 bp, synthetic construct
  misc_feature 1..1602: note = Description of Artificial Sequence: Synthetic coding sequence
  source 1..1602: mol_type = other DNA
atgccagaggagggcgttccactgacacctaaagcaaatctcctgactaccgaggaaattctgactctcgcacggctctttgtgaaggagggaatagataaaatcagactcaccgggggagagcccttgattaggcccgatgtagtggatattgtggcccaactccagagactagagggcctcagaaccataggggtgacgaccaacgggatcaatctagcacggttgctgccacagttgcagaaagccggactctccgccattaacatcagtctcgacaccctggtgccagcgaagtttgagttcatcgtccgcaggaagggtttccacaaggttatggagggtatccacaaagcaatagagctcggatataatccagtaaaagtcaattgcgtggtgatgagaggcttaaatgaagacgagctgcttgacttcgcagcactgacagagggtcttcccctggatgtcaggtttattgagtacatgccctttgatggtaacaagtggaactttaagaagatggttagctacaaagaaatgctggacactgtgaggcagcagtggcctgaactggaaaaggttcctgaagaggagtcctccaccgccaaggcctttaagattccagggtttcagggccagatctctttcatcacatcaatgtcggagcatttttgcggcacctgcaacagattgagaatcacggccgacgggaacctaaaggtgtgcttgtttggaaattcggaagtgagcctcagggatcatctgagggctggagcttccgaacaagagctgctcagaataatcggagccgcagtaggcaggaagaagcgccagcacgccgaactgttcctcatgttcccaaacagtcctcccgcaaacccctcaattttttcttgggaccctcttcatgtccagggcctccgcccacgcatgtctttctcaagccaagtcgccaccctatggaaaggctgtcgagtgccccagacacccccactggcccagcaacggttaggaagcggatcattccaacggcattacaccagcagagccgactccgatgccaattctaaatgtctgagccccggatcctgggcctctgcagcaccttccggtccacagctgactagcgagcagcttacacatgtggatagcgagggaagagcagctatggtggatgtggggagaaaacccgacacagagcgcgtagcagtggcctctgccgtggtcctcctgggtccggtagcttttaagctcgttcagcagaaccagctgaagaagggtgacgctctggtggtggctcagctggcaggtgtgcaggctgccaaggtcacctctcagctcataccgttgtgtcatcatgtggccctttcacatatccaggtgcagctggaacttgattcgactcgccacgccgtgaagattcaagccagttgccgcgcacgcggacccactggcgtcgaaatggaggcactgaccagcgcagccgtcgcagcgctaactctctatgacatgtgcaaagcggtgagcagagatatcgtgctagaggagataaagcttatttcaaaaactggcggacagagaggggacttccatcgagcttag

SEQ ID NO: 231031 - DNA, 1911 bp, synthetic construct
  misc_feature 1..1911: note = Description of Artificial Sequence: Synthetic coding sequence
  source 1..1911: mol_type = other DNA
atgtggaagtcttggaaactgcgtacggatgttagagtcagagaaggggcagggggtagtccttgtgcatctagccaacccggtagtcgcggaccttgtttcctcccaggactgagctcccaagaggtgtcgcgacgtagacaatttctccgcgaacacgccgcacccttctccgcttttctgactgattcgtttgggagacaacactcttaccttcggatttcattaacagaaaagtgcaacttgcgctgtcagtactgtatgccagaagagggggtgcctcttaccccaaaagctaacctcctcacgacagaggaaattctgacactggccagactcttcgtgaaagagggcatagacaaaattcggctaaccgggggagaaccattgattagaccagatgtggttgatattgttgctcagctgcagcgtttggaaggtctgcgcacgatcggggtcacaactaatggtattaacttagcgaggctgctaccgcagctccaaaaggccggactgtcggcgataaacatcagtctggacactctggtgcctgctaagttcgaatttatcgtccggcgaaaaggcttccataaggtcatggaagggatacacaaggcgattgagctgggctacaacccagtcaaagtgaactgcgtagtcatgcgagggctgaatgaggatgaactcctcgatttcgcagccctgaccgaaggcctacccctggacgtccgatttatcgagtacatgccattcgatggcaacaaatggaactttaagaagatggtatcttacaaagaaatgctcgacacagtccggcagcagtggcccgagctggagaaagtgcccgaagaggaaagctcaacagccaaggcgttcaaaatccccggttttcagggccagatatcattcattacttctatgtcagagcacttctgcggcacctgtaaccgactccggatcactgcggatgggaatctaaaggtttgcctctttggtaatagtgaggtgagcctgcgagatcacctgcgcgctggagcctccgagcaggaacttctccgcatcatcggagccgcagttggtcggaaaaaaaggcagcatgctggaatgttttctatctcccaaatgaagaaccggccaatgattctgatagaactgttcctcatgtttcctaactcccctcctgccaacccctcgatctttagctgggatccgcttcacgtgcagggtctccgaccccgaatgtcattttcttcacaggtcgccacactgtggaagggctgccgcgtgccgcagaccccgccactggcccagcagagactgggtagtggatcattccagcggcactataccagtagggctgactctgacgctaacagtaaatgcctgtcccccggatcgtgggctagtgccgcaccgtcaggtcctcagctcacctcagagcagctgacacatgtcgatagtgaaggccgagcggcaatggttgacgtcggcagaaaacccgacactgagagggtagcagttgcctcggccgtggtactgctggggcctgtggcgtttaaactcgtgcaacagaaccaactgaagaagggtgatgcattggtcgttgctcagctcgctggcgtccaagctgcaaaggtgaccagccagctgattccactctgccatcacgtcgccctgtcccacatacaggtccagcttgagttggacagcacccgccacgccgtgaaaatccaggcttcctgtagagctcggggtccaaccggtgtggagatggaggcactcacctcagccgctgtcgccgcactcaccctctatgatatgtgtaaggctgtgagtcgtgatatcgtcctcgaggaaataaaactcatctctaagacgggagggcagcgaggggattttcatagagcgtag

SEQ ID NO: 231032 - DNA, 1071 bp, synthetic construct
  misc_feature 1..1071: note = Description of Artificial Sequence: Synthetic coding sequence
  source 1..1071: mol_type = other DNA
atgtggaagtcgtggaagttgcgtaccgacgttagggaggtcagccggagaagacaatttctgagagagcacgccgctccgttctccgccttcctgaccgacagctttggccgacagcacagttacctccgcatttctttaacagaaaaatgcaatttgagatgtcaatattgcatgcccgaagagggcgtgcctctcacacccaaggccaatttactgacaacagaggagatcttaacccttgccaggctcttcgtgaaggaaggaatcgacaaaatcaggttaacagggggagaaccgcttatccgacccgatgtcgtggatatagtcgctcagctccagcgccttgaggggttaagaactataggagtcacaactaacggaattaacctggctagactgctccctcagctacagaaggccggactcagcgccataaacatttccctggacactctcgtcccggcaaagttcgaattcatcgtgaggaggaaagggttccataaagttatggagggtatacataaggcaattgagcttggctataatcccgttaaagtgaattgtgtcgttatgaggggcctgaacgaagacgagttacttgacttcgccgcactgacagaaggactgccgctggacgtgaggtttattgagtacatgccgttcgatggtaacaagtggaatttcaaaaagatggtctcgtataaggagatgctcgacacggtaagacaacagtggcctgagctcgaaaaagtccccgaagaggagtcatcaaccgctaaggccttcaagattcctgggttccagggacaaatctcttttattacctctatgagcgagcatttctgtgggacgtgcaatagactgaggattaccgctgatggtaacttgaaggtgtgcttgttcggtaattctgaagtgtcccttcgcgatcacctgcgggcaggggctagcgaacaggagctcttgcgaatcataggagcggctgtgggacgaaagaaacgccagcacgccggaatgttttcaatctcgcagatgaagaacagaccaatgatcctcattggaggttag

SEQ ID NO: 231033 - DNA, 267 bp, synthetic construct
  misc_feature 1..267: note = Description of Artificial Sequence: Synthetic coding sequence
  source 1..267: mol_type = other DNA
atggtgcccctgtgtcaggtggaagtactatattttgccaagagtgctgagatcaccggagtgaggtcagaaactattagcgtgccccaggagatcaaggcgctgcaactctggaaggagattgagacacggcatcccggtttggctgacgtcaggaaccagatcatatttgccgtgagacaggagtatgtggaactgggtgaccaactgctcgtgttgcagccaggtgacgagatcgcggtgataccccctataagcggcggatag

SEQ ID NO: 231034 - DNA, 567 bp, synthetic construct
  misc_feature 1..567: note = Description of Artificial Sequence: Synthetic coding sequence
  source 1..567: mol_type = other DNA
atgtcttcactggaaatatcttcctcctgttttagcctcgagaccaaactgcccctgagcccacctctagtcgaagactcggctttcgaaccgtctaggaaggatatggatgaggtcgaagagaagtctaaagacgtaattaacttcacagcagagaagttatccgttgacgaggtctcccaattggtgatcagcccactgtgtggtgcgattagtctgttcgtgggtaccactagaaataattttgaggggaaaaaagtgatttcgttggaatatgaggcgtacctgccaatggcagagaacgaggtcagaaagatttgctctgacatacgccagaagtggccagtcaaacacattgccgtgttccatagactgggcctggtgcctgttagtgaggcgtcaatcatcatagcagtgtcctcagcacatcgggctgccagcctcgaggccgtatcatatgctatcgatactctaaaggccaaagttcctatttggaagaaggaaatttatgaggaatcatcaacctggaaaggaaacaaggagtgtttttgggcatccaattcttag

SEQ ID NO: 231035 - DNA, 267 bp, synthetic construct
  misc_feature 1..267: note = Description of Artificial Sequence: Synthetic coding sequence
  source 1..267: mol_type = other DNA
atggtccctctgtgtcaagtggaagtactgtatttcgccaagtccgccgagataaccggcgtgagatcagaaacaatttctgtgcctcaggagatcaaggccctccagttgtggaaagaaattgagactcggcatccgggtctggctgatgtgcgcaatcagattatttttgcagtccgccaagaatatgttgaattgggcgaccagctcctcgtattgcagcctggagacgaaattgccgtgataccaccgatttcgggcggttag

SEQ ID NO: 231036 - DNA, 267 bp, synthetic construct
  misc_feature 1..267: note = Description of Artificial Sequence: Synthetic coding sequence
  source 1..267: mol_type = other DNA
atggtgcccctttgtcaggtggaggttctgtatttcgccaagagcgccgaaatcacgggagttcgctccgaaactatatccgttccacaggagatcaaagcactccagctgtggaaggagatagaaaccaggcaccctgggctggctgacgtgcgcaatcagattatctttgcagtgcgacaagagtacgttgaactcggggatcagttgctcgtgctgcaacccggagacgagattgccgtcatacctccaatttctgggggatag

SEQ ID NO: 231037 - DNA, 267 bp, synthetic construct
  misc_feature 1..267: note = Description of Artificial Sequence: Synthetic coding sequence
  source 1..267: mol_type = other DNA
atggtgcccttgtgtcaggtggaggtgctctattttgctaagagtgcagagattacgggggttagaagcgaaacaattagtgtgcctcaggaaataaaagcactacagttatggaaggagatcgaaacgcggcatccgggactggcagacgtcaggaatcagatcatttttgcagtaagacaggaatacgttgagctgggggatcagctactggtgttgcagcctggagacgagattgcagttatccctccgatctccggcggatag

SEQ ID NO: 231038 - DNA, 462 bp, synthetic construct
  misc_feature 1..462: note = Description of Artificial Sequence: Synthetic coding sequence
  source 1..462: mol_type = other DNA
atgagttcattagagattagctctagctgcttttcactagagacaaagcttcccctgtcgccccctcttgtggaagacagtgcatttgagcccagccgcaaagatatggacgaggtggaggagaagtctaaggatgttatcaacttcaccgccgaaaagctctctgtggatgaggtgtcacagctggtgataagccctctctgtggcgcaatatcgctgttcgttggaacaacaaggaacaattttgaaggcaaaaaagtgatatccctggagtacgaggcatacctcccaatggctgaaaacgaggtgcgtaagatctgcagtgatataagacaaaagtggcccgtaaagcacatcgcggtgttccataggctcgggctggtcccggtgtccgaagcctcaattataatcgcagtgtctagtgcccacagggccgctagcctggaagccgtgagctattag

SEQ ID NO: 231039 - DNA, 1644 bp, synthetic construct
  misc_feature 1..1644: note = Description of Artificial Sequence: Synthetic coding sequence
  source 1..1644: mol_type = other DNA
atggaggttggtggggacactgccgctcccgctccgggaggcgctgaggacttggaggacactcaatttccgagcgaggaagccagagaagggggaggggtgcacgctgtgcccccagacccagaggatgaaggcctggaggaaacaggctctaaggacaaagatcaacccccttcccccagcccccctccccagtctgaggctctgagttccaccagtcggctctggtcaccggcagccccagaaaatagcccaacttgctcccctgaatcatcttctggaggacagggcggtgatccttcagatgaagaatggcggagccagcgcaaacatgtgtttgtcctcagcgaggctggaaaaccaatttattcccgatatggatcggtggaggccctcagcgccacaatgggcgttatgacagccctcgtatcttttgtccaatctgccggagacgcaatacgagccatttatgccgaagatcataagctcgtcttcctccaacaagggccactgctcctggtggctatgagtcgcacttctcagtctgctgcccaactcaggggcgaactgctggccgtacacgcccagatcgtcagcacactcacaagggcctcagttgccaggatctttgctcacaaacagaattatgacctgagacgcttactggcgggtagcgagcgtaccctcgaccggttactcgactccatggaacaggaccccggagcactgctcttaggcgcagtgcgctgtgtccctctggccaggcctctacgagatgctctgggcgctctgctgaggcggtgtacggccccaggactcgctctaagtgtcctagccgtgggtgggaggctgattaccgctgcccaggagcggaatgtgctggctgaatgccgcctggatcctgcagatctccagttactccttgactgggtaggtgccccagctttcgccgctggcgaagcatgggcccctgtttgcctgcctcgtttcaatcctgacggatttttttacgcttatgtggcaagactcgatgctatgcctgtgtgtctgttactgcttgggactcagcgggaagcattccatgctatggcagcgtgtcgacgacttgtggaagacggaatgcacgcactaggagcaatgagggcactgggcgaagccgcatccttttcaaacgccagcagcgcaagcgctccagcttacagtgtgcaggctgtcggcgctcccggtctgcgccatttcctttataagcccctggatatccccgatcaccatcggcaactccctcagttcacttctcccgaactggaggccccttacagtagagaagaagaaagacagcggctgagtgacctgtatcacagactacatgcgagactccactccactagccgcccactgcgcctcatttatcatgtagctgagaaagaaacgttactggcttgggtaacctctaagttcgagctgtatacgtgtctaagcccgctggtgaccaaggcaggggcaatccttgtggtcacaaagcttctgcggtgggtgaagaaagaggaggaccggcttttcattagataccctcctaaatacagcacgcctcctgctacaagcacggatcaggccgcacacaacggattgttcacagggttatag

SEQ ID NO: 231040 - DNA, 438 bp, synthetic construct
  misc_feature 1..438: note = Description of Artificial Sequence: Synthetic coding sequence
  source 1..438: mol_type = other DNA
atggaggtcggaggcgacacagccgctccggctcccggaggagcagaagatcttgaagatacccagtttccatcagaggaagcccgagaaggaggtggagtgcatgccgttcctccagacccggaggatgagggactggaggaaactggctcaaaggacaaagaccagcctccttctccttctccgccaccgcaatctgaagctttgagctctacaagtcggctttggtcaccagcggcaccagagaactcccctacgtgctctccagagtcatcttccggaggccagggaggcgatccctctgacgaggagtggcgttctcagagaaacggctgtcggacatgcaccactgcctgcatgctagtgagcacagctccgccagatccatgcgcgtcttttacaacctggttgagacgtagacactattggcccggatag

SEQ ID NO: 231041 - DNA, 1317 bp, synthetic construct
  misc_feature 1..1317: note = Description of Artificial Sequence: Synthetic coding sequence
  source 1..1317: mol_type = other DNA
atggaggttggcggtgacaccgcagctcctgcacctgggggagccgaggaccttgaagatactcaatttccgagtgaggaggcgagagagggcggtggggttcacgccgtgcctcccgaccccgaggatgagggcctggaggagaccgaggatcataagctggtgttcctccaacagggcccacttctgctggtagcaatgagtcgcacctctcagtccgcagctcagctgcgaggagaacttctcgctgtgcacgcccagattgtgtctactttaactagggcttctgtggcaaggatctttgcccacaagcagaactatgatttgagaagattattagctggctccgaacggacgttagatagactgctggacagcatggaacaagaccctggcgcattattgttgggggcagtgcggtgcgtgccccttgccaggcccttaagggacgcactgggggcactactgcggaggtgtactgcgccaggcctggccctgtccgtactcgctgtcggcggtcggctgataacagccgcacaggaaagaaacgtgctggctgaatgtcgactagatcctgctgacctgcagctgctactggattgggtgggtgctccagccttcgccgctggagaggcatgggctcctgtttgtctccccaggtttaacccagacggcttcttttatgcttacgtggcgaggctcgacgctatgcctgtctgccttctacttctcgggacacagagggaggcctttcacgctatggctgcatgccggagactcgtcgaagacgggatgcatgctctgggcgcaatgagagccctgggagaagccgcttccttctcaaacgcctcctctgcctctgcccctgcctattccgtgcaagctgtgggcgcaccgggactcaggcattttctctacaaacctctcgatatcccagatcaccaccgccagctgccacagtttacgtcacccgagctagaggccccatacagtagagaagaggagaggcagagactgtcagatctataccaccggcttcacgcgaggttacactccacctcgagaccacttcgcttaatttatcatgtggcggaaaaagagactctgctggcctgggtgacctccaagttcgagctgtacacctgcctctcccctctggttaccaaggccggtgctattttggtcgttaccaagctattacgttgggtcaagaaggaagaggaccgcctatttatccgctacccaccaaaatactcaaccccccctgccacctccacggaccaagcagcccacaacggtttgtttaccggcctttag

SEQ ID NO: 231042 - DNA, 1206 bp, synthetic construct
  misc_feature 1..1206: note = Description of Artificial Sequence: Synthetic coding sequence
  source 1..1206: mol_type = other DNA
atggtatccggccagctccgattcggcgttaaaaccgaggatcacaagctggtgtttctccagcaggggcctttactcttggtggctatgagtcggacaagccagagtgcagcccagctgaggggagaactcctggcagtccacgcacagatagtgtccaccttaacccgcgcttctgtcgcgaggatcttcgctcacaagcaaaattacgacctacgcagactgctggccggatccgagcgcaccctggataggctgctggatagcatggaacaagacccaggggcacttcttctaggggctgttcggtgtgtgcctctggcacgaccattaagggacgcgttgggcgctcttctgcggaggtgtaccgcccctggattggctctgtccgtgctggccgtcggcggaagactgattacagcggcacaggagcggaatgtcctggctgagtgccgcctggacccggctgacctgcagctgctgctggattgggtcggggcacccgcatttgcagccggtgaagcctgggcccctgtctgcctgccccgtttcaaccccgatggctttttctacgcatacgttgcccgactggacgcaatgcctgtttgtcttcttttgctgggcacccagagggaagcatttcacgccatggccgcatgcaggcgcctggttgaggatggaatgcatgccctaggggctatgcgggctctgggtgaggccgcatccttttcgaatgcctcgtctgcaagcgcaccagcttactctgtccaggctgtaggcgcaccaggcttaaggcactttctgtacaaacccttggacatccccgaccaccatcggcagttaccccagtttacctcccctgaactcgaagcaccttattcccgggaggaggagaggcagcggctttctgatctgtatcacaggctccacgcccgtctgcactccacgtcccggccattgcgactgatttaccatgtcgctgaaaaggagacactgcttgcatgggtgactagcaaattcgagttatatacttgtctctcaccgctggtcacaaaagccggagcaatattggtcgtcacgaagctcctgcgttgggtgaaaaaagaggaggatcgcctctttatcaggtacccaccaaagtacagcactccaccagctaccagcactgaccaggccgctcataacggactcttcaccgggctgtag

SEQ ID NO: 231043 - DNA, 1584 bp, synthetic construct
  misc_feature 1..1584: note = Description of Artificial Sequence: Synthetic coding sequence
  source 1..1584: mol_type = other DNA
atggaaaatcaagaaaaggcctctatcgccggacacatgtttgacgtggtagttatagggggaggcattagcggcctttctgcagccaaactcctgaccgagtatggcgtgagcgttctagtgctcgaagctcgagatagggttggcggaaggacgtatacaatcagaaacgagcatgtcgactatgtcgacgttggcggagcctatgtgggcccaacacaaaatcgcatactgcgtctgtccaaagaactcggaattgagacgtacaaagttaatgtttccgagaggctggtgcagtatgtgaaaggcaaaacctacccatttcgaggcgctttccctcctgtatggaacccaattgcctaccttgactataataacctttggcggactatcgataatatgggcaaggagattcctaccgacgccccttgggaggctcagcacgccgacaagtgggataagatgactatgaaggagctgatcgataaaatctgttggacgaaaactgctaggaggttcgcctacctctttgtgaacatcaacgtcacaagcgaaccccacgaagtctccgctttgtggtttctatggtatgttaagcaatgtggcggtacgaccaggatcttcagcgttaccaatgggggacaagagcggaaatttgtcgggggttctggacaagtctcggagcggatcatggatcttttgggggaccaggtgaaactgaaccacccggtgacccatgttgatcaatctagtgacaacattattattgaaacactgaatcacgaacattacgagtgcaagtacgtgatcaacgcgatcccccctacactcactgctaagattcattttagacccgagttgcctgcagagcggaaccagctcatccagcggctgccgatgggcgcagtaattaaatgtatgatgtactacaaagaggcattctggaagaaaaaagattactgcggatgcatgattattgaggatgaggatgctccgatatccattactctggacgacacgaagcccgatggcagtttgcccgcaatcatgggttttatcctggcacgtaaggccgaccggctggcaaaattgcataaggagattcgtaagaagaagatttgtgaactgtacgccaaggtactggggtcacaggaggctttgcatccagttcattatgaggaaaaaaactggtgcgaagagcagtactcaggaggctgttacaccgcgtatttccccccaggtatcatgacacaatacggcagggtgattcgccagccggttgggaggatcttcttcgccggaactgaaacagccaccaaatggagcggatatatggaaggagccgtagaagccggagagcgtgccgctcgggaagtacttaacgggctgggcaaggtgacagaaaaggatatctgggtgcaggagccagaatccaaggatgtccctgcagttgaaattacccacactttttgggagcggaacttgccaagtgtgtccgggctcttgaagatcataggctttagtacaagcgtaaccgccttgggcttcgtcctatacaaatacaagctgctgcctaggagctag

SEQ ID NO: 231044 - DNA, 1185 bp, synthetic construct
  misc_feature 1..1185: note = Description of Artificial Sequence: Synthetic coding sequence
  source 1..1185: mol_type = other DNA
atgggtaaggaaatccccactgacgcaccttgggaagcccagcacgcagataagtgggataagatgacaatgaaggaacttattgacaagatctgttggactaaaactgctcgaaggtttgcctacctgttcgtgaatatcaacgtaaccagtgaaccacacgaagttagcgccctgtggttcttgtggtatgtgaaacagtgcggaggtacaactagaatttttagcgtgaccaatggtggacaggaacgtaagtttgtcggaggatcagggcaagtgtctgaaagaataatggatctgcttggggatcaggttaagctgaaccacccggtcacacacgtggaccaatctagtgacaacatcatcatcgagactctgaatcatgagcactacgagtgtaagtatgtcattaacgcgattcctcccacgctgaccgctaaaatacattttaggcctgagctgccggcagagagaaaccaattaattcagcgactgccaatgggggcagtaattaagtgcatgatgtactataaggaggcattctggaaaaagaaagattattgcggatgcatgataattgaagacgaggacgctcccattagcataactttggatgatacaaaacctgacggtagtctccccgcaataatggggttcattctggcccgaaaagctgacaggctggccaagttacataaagagatccgtaaaaaaaagatctgcgagctgtatgcaaaggttctcggctcgcaagaagccttacacccagtgcattacgaagagaagaattggtgcgaagagcaatacagtgggggatgttataccgcctacttccccccaggaatcatgacccaatacggacgagtgattcgccagcccgtcggcaggatattcttcgcgggaaccgaaactgccaccaagtggtctggttacatggagggagcagtggaggctggcgagcgcgcagcccgtgaggtgctgaacggactgggcaaggtaactgaaaaggacatctgggtccaagaacctgaaagcaaagacgtccctgcagttgagattacccatactttttgggagagaaacttgccatcagtctccggtcttctcaaaatcattgggtttagcaccagcgtgacagccttaggctttgtactgtacaaatacaagctgctgccacgaagctag

SEQ ID NO: 231045 - DNA, 1563 bp, synthetic construct
  misc_feature 1..1563: note = Description of Artificial Sequence: Synthetic coding sequence
  source 1..1563: mol_type = other DNA
atgagcaacaagtgtgatgtggttgtcgtgggcggtggcattagcggtatggctgcagccaagctccttcatgattccggacttaatgttgtggtcctggaagccagagatagggtgggcggaagaacctatacactcaggaaccagaaggtcaaatacgtggacctgggcggtagctacgttggtcctacacagaaccgaatcctgcggctggcaaaagagctgggcctggagacatataaagtgaatgaagtcgaacggctgattcaccacgtcaagggaaagtcatacccgtttaggggaccgttcccaccagtgtggaatccaatcacatacctggaccacaataatttttggaggacgatggatgacatggggagagaaatcccctctgacgcaccatggaaagcaccactggccgaagagtgggacaacatgactatgaaagaattactggataaactgtgctggactgagagtgcaaagcagctggccacactgtttgttaacttgtgcgtcaccgctgagacacacgaagtatcagccctatggtttctgtggtacgtcaaacagtgtggcggaacaacaagaataatcagtaccacgaacgggggtcaagaaaggaaatttgtgggtggatccggacaggtcagcgagcgtattatggatctcctgggtgacagggttaagctggaacgcccagtcatttacatcgatcagacccgggagaatgtgctggtggaaactctcaaccacgagatgtacgaagctaagtacgtcataagtgcaataccccctacgttgggaatgaaaatccattttaacccacctctgcctatgatgagaaaccagatgatcacacgcgtgcctttaggaagcgtgatcaagtgtattgtttactataaggagccgttttggcgaaagaaagattactgcggaactatgattatcgacggcgaagaagcaccagtggcatatacactggacgatacaaaaccagaggggaactacgccgctattatgggttttattcttgctcataaggctaggaaactggctagacttactaaggaggagcgtctgaagaagctctgcgagctctacgccaaagtcctggggtccctagaggccctggaaccagttcattacgaagagaagaactggtgcgaggagcaatactccgggggttgttacaccacttattttcctccgggaatcttgacacagtatgggagagttctacgccagccggttgaccgcatatattttgccggaaccgaaacagctacccattggtcaggatacatggaaggcgcagttgaggcaggcgaacgtgccgctcgggaaatactgcacgccatgggtaaaatacccgaggacgaaatctggcagtccgaaccggagtcagtggacgtcccagcgcaacccattactaccacctttttggaacgtcatttaccatccgtgccaggtcttttacgactgattggcttgactactatcttttccgctacagccctcgggtttctggctcacaagcggggactgctggtcagggtgtag

SEQ ID NO: 231046 - DNA, 1515 bp, synthetic construct
  misc_feature 1..1515: note = Description of Artificial Sequence: Synthetic coding sequence
  source 1..1515: mol_type = other DNA
atggccgcagccaagctgttgcatgactctggcctgaacgtcgtggtccttgaggctcgggatagagtgggaggtcgcacgtatacattgagaaatcagaaagtcaagtatgtagacctgggcggatcatacgtgggcccaacacagaaccggatcctgcggttggccaaggaactgggtttagagacctataaagtcaacgaagtggaaagattgatccatcacgtcaaaggcaagagctacccatttaggggcccatttcccccagtgtggaaccctatcacatacctcgaccataataacttttggcggaccatggatgacatgggccgagaaataccttcagatgctccttggaaagctccacttgcagaggaatgggataacatgactatgaaagagctgcttgataagctgtgttggaccgaaagtgcaaaacagctggccaccctcttcgtgaatctctgtgtgacggctgagacccatgaagtcagtgccctttggtttttatggtacgttaagcagtgcggcggaacaaccagaatcatctccaccactaatggcggacaggaaaggaaatttgttggcggttctggccaagtctctgaaaggattatggatcttctgggggatcgtgtgaaactcgaacggcctgtcatctatattgatcagacccgggagaacgtcctcgtggagacactgaaccacgagatgtacgaagctaagtacgtcatttctgcaatccccccaactttagggatgaagattcattttaacccccctttgccaatgatgaggaaccagatgatcactcgagtcccgctggggtcagtgataaagtgcattgtctattacaaagaacccttttggcgcaagaaggattactgcggtactatgattattgatggagaagaggcgcctgtggcctatactttagacgacacaaagcccgaagggaattacgctgccatcatgggttttatactcgcacacaaggccaggaaactggcaaggctgactaaagaggaaaggctgaagaaactgtgcgagctttatgctaaggtgctgggaagtctagaagcactcgaacctgtccattacgaagagaaaaattggtgcgaggaacaatatagcggtggatgctataccacgtatttccctccaggaatcctaacccagtacgggagggtcctgagacagccggtggaccgaatttattttgctggcactgagaccgcaacccactggagtgggtatatggaaggggcagtggaggccggagagagggctgcgagggaaattttgcacgccatggggaagatccctgaggatgaaatatggcagagcgagcccgaatctgtggacgttccggcacaaccaattaccacaactttcctggagcggcacctgccctctgtccctggactgctgcgcttaatcgggttgaccaccattttctccgccacggcgcttgggttcctcgcgcataagcggggactgctcgtccgtgtgtag

SEQ ID NO: 231047 - DNA, 1236 bp, synthetic construct
  misc_feature 1..1236: note = Description of Artificial Sequence: Synthetic coding sequence
  source 1..1236: mol_type = other DNA
atggcggctgctaagctgctgcacgatagcggactaaacgtagttgtgctcgaggcgagggacagagtcggtgggcgtacctacacactgaggaaccagaaggtcaagtacgtggatcttggtggaagttacgtgggcccaacccaaaataggatcctgagactggccaaggagctgggattggagacctacaaggtcaacgaggttgaacggctgatccaccacgtgaaaggcaagtcttaccccttcaggggaccattccctccagtctggaatcccattacctatctggatcataacaacttctggagaactatggacgacatgggaagggaaataccttccgatgccccttggaaagcccctctcgccgaagaatgggataatatgaccatgaaggagcttctggataagctctgttggacagagtcagccaaacagctcgccactttgtttgtgaatctttgcgtcaccgcagaaacccacgaggtgagcgctttgtggtttctttggtacgtaaagcagtgcggcggaactacgcgtatcataagtaccaccaatggcggtcaggaacggaagtttgtgggcggatccggacaggtgtccgaaaggattatggacttactcggtgaccgggtcaagctggagcgacctgtaatttacattgatcagacccgcgagaacgttctggtggagaccctgaaccacgagatgtacgaggctaagtatgtgatctcggcaattccaccaaccctggggatgaagatccacttcaaccctcccctgcctatgatgcgcaatcagatgatcactagagttcctcttggctcagttatcaaatgtattgtgtactataaggaacccttctggaggaaaaaagattattgtgggactatgattatagacggcgaggaggcccctgtcgcctacacgctggatgatacaaagcccgaggggaactatgccgctattatgggatttattctggctcataaggctcggaagctggcacgcctcacaaaagaagaaagactcaaaaagctttgcgaactgtatgccaaggtgctaggtagcctcgaggccctggaaggctctacccccgcttctggccaggacctgctatgccgacacagagattgccacaccttagaacggctacatggcggagggtgtaggggccgaggcgaatccagccccagggaccctgcctgccatggcgaagattcaagaggttag

SEQ ID NO: 231048 - DNA, 741 bp, synthetic construct
  misc_feature 1..741: note = Description of Artificial Sequence: Synthetic coding sequence
  source 1..741: mol_type = other DNA
atgttcgcgcctagactgctggactttcaaaagaccaaatatgcaaggtttatgaaccatagggtgcccgcacacaaacgttaccagccaaccgagtacgagcacgctgccaattgtgcgacgcatgctttctggatcattccttcgatcctgggtagttccaacctctacttcctgagtgacgacgattgggagacgatttccgcgtggatctacgggctgggactgtgcggcctctttgttgtatccacagtgtttcacacgatctcctggaaaaagagccacctgcggatggtggagcattgccttcatatgttcgatcgcatggtgatctatttctttatagctgcctcttacgccccatggttgaatctcagagaactcggcccatgggcaagccacatgagatggctggtgtggatcatggccagcgttggtacaatttatgtgttcttcttccacgaacgctacaagctggttgaattgctttgttatgtcgtgatggggttctttccggctctggtgatcctgtctatgccgaacaccgaagggatttgggagctcgtaacagggggagtgttctactgcttggggatggtattcttcaagtcggatggtcgaattccatttgcacacgctatatggcatttattcgtggcgttcggcgctggcacccactattacgcaatctggaggtatttgtatctgccctccacacttcagactaaggtatccaagtag

SEQ ID NO: 231049 - DNA, 813 bp, synthetic construct
  misc_feature 1..813: note = Description of Artificial Sequence: Synthetic coding sequence
  source 1..813: mol_type = other DNA
atgtttgcccctcgcttgctggatttccagaagactaaatatgcccgattcatgaaccatagagtgccagcccacaagcggtaccagccaacagaatatgaacacgccgctaactgcgcaacacacgccttctggataattccatccatcctggggtcttcaaacctgtattttctctcggatgatgactgggagactatctccgcctggatctatggactgggcctgtgcggcttgttcgtggtcagcacagtttttcacacaatttcttggaaaaagagtcacctccggatggttgagcactgtttgcacatgtttgaccgaatggtcatctacttcttcatagctgctagttatgccccatggcttaacttgagggaactgggtccttgggcgtcacatatgcggtggttggtgtggatcatggcctccgtcgggacaatttacgtgttcttttttcacgagcgcacaggctcctgtgtgcaatttttgcggggagaagcatgtcccaaggccggtacagcctgcttgccagcccgttacaagctggtggaacttctgtgctatgtggtgatgggtttttttcccgctctggtgatcttgtctatgcccaacacagaggggatttgggagctggtgactggcggagtgttttattgcctgggcatggtgttcttcaaatccgatgggagaatccctttcgcccacgctatttggcacctgtttgtcgcctttggagcgggaacacattattatgccatttggaggtatctgtatctgccaagtaccctccagaccaaagtgtcaaaatag

SEQ ID NO: 231050 - DNA, 582 bp, synthetic construct
  misc_feature 1..582: note = Description of Artificial Sequence: Synthetic coding sequence
  source 1..582: mol_type = other DNA
atgttcgctcccaggctccttgattttcagaaaactaaatatgcaagatttatgaaccaccgagtgcccgcacacaaacgctaccagcccaccgaatacgagcatgctgctaattgcgccactcacgccttttggattataccaagtatcctgggttcatctaacctctacttcttaagtgacgatgactgggagactatcagcgcttggatttacggcctgggactctgcggtctgtttgtggttagtacagtgttccacacaatatcatggaaaaagtcccatctgcggatggttgaacactgtttgcacatgttcgatcgaatggttatttacttttttatagcagcatcatacgccccttggctgaaccttcgcgagctggggccttgggcatcgcacatgagatggcttgtgtggataatggcctccgtgggcacaatctacgtcttctttttccatgagcgatataagctcgtggaactgctgtgttatgtcgttatggggttcttccctgcgctggtgatactgtccatggccggaaagctgaggcctggaatgacatgcctgaagcggcagtag

SEQ ID NO: 231051 - DNA, 942 bp, synthetic construct
  misc_feature 1..942: note = Description of Artificial Sequence: Synthetic coding sequence
  source 1..942: mol_type = other DNA
atggagactggccctgaagatccttcgtcaatgcccgaagagagctcacccaggaggacaccccaatccatcccttatcaggacttaccacacctggttaacgcggatgggcagtatcttttctgccgctactggaagccaaccggcacacctaaagccttgattttcgtgagccatggagccggagagcactctgggagatatgaggagttggctaggatgctcatgggactggatcttttggtgttcgcccacgaccacgtcgggcacgggcagtccgaaggggaacggatggtcgtgtccgattttcacgtattcgttcgagacgtgctgcagcacgttgattcaatgcagaaggactatcccggattgcccgttttcttactgggtcactctatgggcggagcaatagccatcctgacagccgctgagagacctggacatttcgctggaatggttttgatctccccactggttttagccaatccagaatcagcaactacttttaaggttctcgcagcgaaggtccttaacctggtcctgcccaacctttctctgggccctattgatagctccgtcctcagtcgaaacaagacagaagtggatatctataacagtgatccgttaatctgtcgagcagggctgaaggtgtgctttggaatccaactactcaatgcggtcagtcgggttgaaagggccctccctaagctgactgtacccttcctcctgctccaggggagcgccgatcggctgtgcgactctaaaggcgcttacctcctcatggaacttgccaagagtcaggacaaaactctcaagatctacgagggcgcataccacgtgttgcacaaggagttgccagaagtgaccaactctgtgtttcatgagataaacatgtgggtttctcagcgcactgccaccgccggtacggcttcccccccttag

SEQ ID NO: 231052 - DNA, 912 bp, synthetic construct
  misc_feature 1..912: note = Description of Artificial Sequence: Synthetic coding sequence
  source 1..912: mol_type = other DNA
atgcccgaggagtcttcgccaaggagaaccccacagtcgatcccatatcaggatctgccacacctggtaaacgccgatgggcaatacctgttttgtaggtactggaaaccaacagggacgcccaaggctctgattttcgtgagccatggcgctggtgagcactctgggcgatatgaggagttagcaagaatgctcatgggcctcgatctcctggtctttgcccacgaccatgtgggacacggacagtccgaaggcgaaagaatggtcgtaagtgatttccacgtgtttgtgagagatgtcttgcaacacgtcgatagtatgcagaaggattatccgggtttgcccgtatttctgcttgggcattccatgggaggagcgatcgccattctaaccgctgctgagcgtccagggcactttgcaggcatggtgctgatttcaccactggtgttggccaacccagaaagcgccactaccttcaaagtactggccgctaaggtactaaacctggtccttcctaacctgtctctgggtccaatagattcttccgtgttgagcagaaataagaccgaagtcgacatctacaattctgatccgttgatctgtcgggctggattaaaggtatgcttcggaattcagcttttaaatgccgtgtctagagtcgaacgagctctgcctaagctgaccgtgccgtttctgctgttacaggggagtgccgaccggttgtgtgattctaaaggcgcttacctcttaatggagttggctaagtctcaggataagactctcaagatctacgaaggagcctatcacgtcctccataaggagctgcccgaagtcacaaattctgtgtttcatgaaataaacatgtgggtttcccagcggactgccacagccggaacagcttctccaccatag

SEQ ID NO: 231053 - DNA, 912 bp, synthetic construct
  misc_feature 1..912: note = Description of Artificial Sequence: Synthetic coding sequence
  source 1..912: mol_type = other DNA
atgcccgaggagagctccccgaggcgaacacctcagtctattccttatcaggatttaccacatctagtgaacgctgacggtcagtacctcttttgcaggtattggaagccaacaggaaccccaaaggcgttgatattcgtctcacatggcgcaggtgagcactctggcagatacgaggaattagccaggatgttaatgggccttgacttgctggtattcgctcacgatcatgtggggcacggacaatcagaaggcgagcgtatggtggtatcagatttccacgttttcgtgcgggacgttctacagcacgtggacagtatgcagaaggactatcccggactgcccgtctttcttctcggacattccatgggaggtgctatcgctattttaacggctgcggaacgacctggtcactttgccggaatggttttgatctctccgttggttctcgccaatcccgaatctgccacaactttcaaggtactggccgctaaggtgctgaatctcgtgttgccaaacttatctttaggacccatcgattcatctgtgctgtctagaaataagactgaagtggacatctataattccgatcctctcatctgcagagctggactcaaggtctgtttcggaattcagctcttgaacgccgtcagcagagtggagagggccctccccaagttaacggtgccgttcctcctgctacagggttccgcagacaggctgtgcgactcgaaaggcgcttacctgctcatggagctggccaaaagtcaggataagactttgaagatctacgaaggagcataccacgtgttacacaaggagctgcctgaagtcaccaacagcgtgttccacgaaataaatatgtgggtgtctcagagaactgctaccgccggaaccgcgtctcctccttag

SEQ ID NO: 231054 - DNA, 852 bp, synthetic construct
  misc_feature 1..852: note = Description of Artificial Sequence: Synthetic coding sequence
  source 1..852: mol_type = other DNA
atggagacaggacctgaggaccctagctctatgccagaggagtcctctcccaggaggaccccccagtctatcccatatcaagacctccctcacctggtaaatgccgacggacaatacctgttttgtcgctattggaaacccaccggcactcccaaggcactcatatttgtgtctcatggcgctggggagcactctggtcggtacgaagagttggccagaatgctgatgggactggacctcctggtgtttgctcacgaccatgtcggccatggtcagagcgagggagaacggatggtggtttctgatttccacgtgttcgtgcgagacgttcttcagcacgtcgattccatgcaaaaggattaccctggtttgccagtattcctactaggacactccatggggggagccatcgctatcttaacagcagctgagcgccctggtcatttcgccggtatggtcctaatctctcctctcgttttggcaaatcccgagtccgccacaacctttaaggtggacatatacaactccgatcctctcatttgccgcgctggcctgaaagtgtgcttcggcatccagctcttgaatgctgtcagccgagtcgaacgggcattacccaagctaaccgtgcccttcctgctgctccaagggagtgccgacagactttgtgattctaagggggcatatcttctgatggagctggccaaatctcaggacaagacactgaaaatctacgaaggtgcctaccacgttctccacaaggagctgccggaagtcactaatagtgtctttcacgaaatcaatatgtgggtctctcagaggactgctactgccggaaccgcctccccaccttag

SEQ ID NO: 231055 - DNA, 234 bp, synthetic construct
  misc_feature 1..234: note = Description of Artificial Sequence: Synthetic coding sequence
  source 1..234: mol_type = other DNA
atgcctgaagagtcatcacctaggaggaccccacaaagtattccttaccaggatctccctcacttagtcaacgccgacggtcagtatctcttctgccgatactggaagcccaccggcacaccaaaagcactgatcttcgtgagtcacggcgctggcgagcacagcggcaggtacgaggagctggccagaatgctcatgggacttgatttgcttgttttcgcgcatgaccattag

SEQ ID NO: 231056 - DNA, 942 bp, synthetic construct
  misc_feature 1..942: note = Description of Artificial Sequence: Synthetic coding sequence
  source 1..942: mol_type = other DNA
atgaagaccagacccgaagacccaagtagcatgcctgaggagagtagccccagacgtaccccgcagtccatcccctaccaggatttgccccacttggtgaatgccgatggacaatatctgttctgtcgttactggaaaccaacgggaactccaaaggctctcatattcgtgtctcatggtgctggggaacattcgggacggtatgaagagctggctagaatgctgatgggcctggatctgttagtgttcgcccacgaccacgtgggtcacggacaatccgagggcgaaagaatggttgtatccgactttcatgtgttcgtgcgcgatgttcttcaacacgtggacagtatgcagaaggactaccccggactccctgtcttcctgctggggcacagtatgggcggagcaatcgccatcctgacagccgcagaacggcctggccatttcgctggcatggtgttaatctctcccttggtgctggccaatcccgaatctgccacaactttcaaagttttggcagccaaagtgcttaacctggtgctgcctaacctgtcactgggcccaatcgactccagcgtactgtctcggaataaaacagaggttgatatttacaactctgaccccctgatctgtcgggcaggtctgaaggtgtgcttcgggatacagttgctgaacgccgtaagtcgggttgaacgggcattacctaagctgaccgtgccgtttctgctcctgcaggggtccgccgatcggctttgtgactccaaaggcgcttatcttctgatggaacttgccaaatcgcaagacaagaccctcaaaatttacgaaggtgcgtaccacgttttgcataaggaactgcctgaggtcacgaactccgttttccatgaaattaatatgtgggtatcacaaaggaccgcgacagccggaactgcatcgccaccatag

SEQ ID NO: 231057 - DNA, 1842 bp, synthetic construct
  misc_feature 1..1842: note = Description of Artificial Sequence: Synthetic coding sequence
  source 1..1842: mol_type = other DNA
atgtgctgctggcctctcctactgctctggggactgctgcctggtaccgctgctggcggtagtggcagaacatatccacaccgcacgcttcttgactcagagggcaagtactggctgggctggtcccaaagggggtcccagatcgcattcaggctgcaggtgagaaccgccggatatgtgggcttcggattctctccaacaggggctatggcatctgctgacatcgtagtgggtggagtggcacacgggagaccttatcttcaggattacttcactaatgcaaatcgtgaacttaagaaggacgcgcagcaggactaccatttggaatacgctatggagaatagtacgcacaccataattgagttcacccgcgagctgcatacttgcgacattaacgataagtccattacagattcgactgttagagtgatttgggcctatcatcacgaagatgctggtgaggcagggcctaaataccatgattcaaatcgaggtactaaatctctgagattactgaacccagaaaaaacctctgtgcttagcaccgctctgccgtatttcgatctcgtgaaccaagacgtacccattcctaacaaagatacaacctattggtgtcagatgttcaagattcccgtgttccaggagaaacaccatgttattaaggtcgagcccgtcatccaaaggggccatgaatcactggtgcatcacatcctgttgtaccagtgctccaacaacttcaacgactctgttctggagtctggtcacgaatgttatcatccgaacatgcctgacgcattcctcacatgcgagaccgtgatttttgcctgggcgatcggcggagagggtttcagctacccaccccacgtgggtttgagcctagggacaccactggacccccattatgtcttactggaagtccattacgataacccaacctacgaggagggcctaatagacaactcaggcctccgcctgttctacactatggatattcgcaaatacgacgcaggcgtcattgaggccggtttgtgggttagcctgttccatacaattcctcccggtatgccagagtttcagagcgagggtcactgcactttggaatgcctggaggaggctctggaagctgaaaaacctagtggaattcacgtgttcgccgttctgctgcacgcacacctggccggtaggggcatcaggctcaggcattttagaaaaggaaaagagatgaaacttctggcatatgacgatgattttgacttcaattttcaggaatttcagtatttgaaggaggaacagacaatccttcccggtgataatctgataacagaatgcaggtacaatactaaggatcgagccgagatgacatgggggggtctgtcaacccgctctgaaatgtgcctaagttacctcctctattacccaagaattaatctgacccgatgtgcatccatccctgatatcatggagcagttacagttcataggggtcaaggagatataccgacccgtgaccacttggccattcatcattaaaagcccaaaacagtataaaaacctcagttttatggatgccatgaacaaatttaaatggacaaaaaaggagggcctgtcctttaacaaactcgtactatccctgccagtgaacgtgagatgctctaagaccgacaacgctgaatggagcatccaggggatgaccgctttgcctcccgacatcgaacggccatataaagcagagcccctggtttgtggcacctcctcctctagctctctgcaccgtgattttagcattaacctcctggtttgcctgcttctgctttcgtgtacactgagtacaaaatccctgtag

SEQ ID NO: 231058 - DNA, 1023 bp, synthetic construct
  misc_feature 1..1023: note = Description of Artificial Sequence: Synthetic coding sequence
  source 1..1023: mol_type = other DNA
atgagcgaactagagcagctgcgccaagaagccgaacagctccgcaaccaaatccaggacgccaggaaggcctgtaatgacgctaccttggtgcagatcaccagcaacatggattcggtcggaagaatccagatgaggactagacggactctgagagggcacctagccaagatttatgcgatgcactggggctatgactccaggcttcttgtgagcgccagccaggacggaaagttaatcatttgggactcatacacaacaaacaagatgcacgccatcccccttagaagctcctgggtcatgacgtgtgcttacgccccttctggaaactacgttgcatgcggtgggctagacaatatatgcagtatttataatctgaaaacacgcgagggcaacgtgcgcgtttctcgcgagctcccaggacacacggggtacctgtcatgctgccgctttctggacgactcacagattgtaacttcaagtggcgacacgacatgtgccctctgggacatagaaacagcacagcaaaccactacatttacagggcactctggagatgtaatgagtctgtccctgtcgccagacatgcgtaccttcgtgtcaggtgcctgcgacgcctctagcaagctatgggacatcagagatggcatgtgtcgtcaaagcttcactggtcatgtaagtgacatcaacgccgtatccttttttccgaatggctatgctttcgccactggttctgacgacgccacctgccggctgtttgatctcagagccgatcaggagctcctgctttatagccacgacaatataatttgtggaataacttcagttgcatttagtaagtcagggcgacttcttttggccggttatgatgactttaactgcaatgtgtgggatactctcaaaggcgatcgggcaggagtgctggccggacatgacaatcgggtctcatgtcttggagtgacggatgatggaatggctgtggcaacaggctcatgggactcatttcttcgcatctggaattag

SEQ ID NO: 231059 - DNA, 1089 bp, synthetic construct
  misc_feature 1..1089: note = Description of Artificial Sequence: Synthetic coding sequence
  source 1..1089: mol_type = other DNA
atggccccaaagcaagaccctaaacccaagttccaggagggagagcgagtgctgtgttttcatgggcctctgctgtacgaggccaagtgcgtcaaggtggcaatcaaagacaagcaggtgaagtacttcattcactactctggctggaataagaagagtgccgttcgacccagacgtagcgagaagtctctgaagacccacgaggacattgtggccctgttccctgtacccgagggcgcaccaagcgtccatcatccactcctgacaagctcatgggatgagtgggtaccagagagtcgggtgctgaagtatgtggacacaaacctgcaaaagcagcgcgaactgcagaaagcgaatcaagagcagtacgcggaggggaaaatgagaggggctgcccctggtaagaaaacctcgggtctccaacagaagaacgttgaggtaaaaacaaaaaagaacaaacaaaaaacgcccggaaatggggatggcggatcgacttccgagacaccgcagcctccaaggaagaagcgtgcccgagtcgatcctaccgtcgaaaacgaggaaacgttcatgaaccgagtggaggtcaaagtaaagattccggaggaattaaagccatggctggtggacgactgggacttaatcacccgccagaaacagctgttctatttacccgcaaagaagaacgttgactcaattctggaggactacgctaactacaaaaagagcagggggaacaccgacaataaagagtatgccgtgaacgaagttgttgcgggaatcaaggaatattttaacgtcatgctcggcacacagctgttgtacaaattcgagcggcctcaatatgctgagatcctggccgatcacccagatgcaccaatgtcccaagtatacggcgcaccacatctgctgagactatttgtacgcattggcgcaatgctagcatacacgcctttggacgaaaaatctctggctctgctgctgaactacttacacgactttctgaagtatctggcgaagaactccgccaccttgttttcagctagtgactatgaagtagcccctcctgagtaccatagaaaagcggtctag

SEQ ID NO: 231060 - DNA, 1047 bp, synthetic construct
  misc_feature 1..1047: note = Description of Artificial Sequence: Synthetic coding sequence
  source 1..1047: mol_type = other DNA
atgatccctttcccccacccccaggtgacagacgctctgggcaggtacagcaattacattttgtccagtaccgtcgagtccccctccttgaggagtatgaacttcgaaaagcagggagagagggtcctgtgctttcatggacctttgctgtacgaggccaagtgtgtgaaagtggctattaaggacaaacaggtgaagtacttcatacactattcagggtggaacaagaactgggatgaatgggtgccagaatcccgagtgttgaagtacgttgacactaatcttcagaagcagcgggagctgcaaaaggccaaccaggagcagtacgcggagggaaagatgcgcggagcagccccagggaagaagacaagcggcttacagcagaaaaatgttgaggtgaagaccaaaaaaaataaacagaagaccccagggaatggagacggcggtagtacctccgagactccacagcctccaagaaaaaagagggccagagtggacccaactgtggagaacgaagaaactttcatgaatcgtgtggaagtcaaagttaagatccccgaagagctcaaaccatggctggtcgacgactgggatttaataactcgccagaagcagcttttttacttgccagccaaaaagaatgtcgactcaatcctcgaggattatgcaaactacaagaaatctagaggcaatactgataacaaagagtatgccgtgaacgaggtcgtggccggaataaaggagtacttcaatgttatgttaggcacgcaacttctatacaagttcgagcgtccccagtacgcagagatcctcgcagaccacccggacgccccaatgtctcaggtctatggagctccacacctcttacgattattcgtgcgcatcggtgctatgctcgcatataccccattggacgaaaaatctctggccctcctcttaaactacctgcatgattttctgaagtacctggcgaagaacagtgcgactctttttagcgcgtcggattacgaagtcgctccaccagaatatcatcggaaggcggtgtag

SEQ ID NO: 231061 - DNA, 972 bp, synthetic construct
  misc_feature 1..972: note = Description of Artificial Sequence: Synthetic coding sequence
  source 1..972: mol_type = other DNA
atggcccctaagcaggacccgaaacccaaatttcaggagggggagagggttctgtgttttcatggcccattactctatgaagcgaaatgcgtcaaggtggcaatcaaagataaacaggtgaagtattttatccattattccggctggaacaagaattgggatgagtgggtgcctgaatcacgggttttgaaatatgtggacacgaacctgcaaaaacaaagggaactgcagaaagcaaatcaagagcagtacgcagagggcaaaatgcgaggagcagcccctggaaagaaaacatccggcctacagcagaagaatgtggaggtcaaaactaaaaaaaacaagcaaaagacacccggtaatggcgacggaggaagcacaagcgagactcctcagccgccaagaaagaaacgagcacgcgtggaccctactgtggaaaatgaagaaaccttcatgaacagagtggaggtgaaagtgaaaatccctgaagaattgaaaccttggctcgtggatgactgggaccttatcacccggcagaagcagctgttctacttgccagctaaaaaaaacgtggacagcattttagaggactatgcaaactataagaaaagccgcggaaataccgataataaggagtacgccgtgaacgaggttgtggcgggaatcaaggagtacttcaatgtgatgttgggcacccagctgctttacaaattcgagcgcccacaatatgccgaaattctggccgatcaccctgacgcccctatgtcacaggtgtatggagccccacacctgttgcggctctttgtgcggataggggcaatgctggcatacacgccgctggatgaaaagagtcttgctcttctattaaattaccttcatgatttcctgaagtacctcgccaaaaatagcgccacccttttctccgcaagcgattatgaagtcgccccacccgagtatcacaggaaggctgtctag

SEQ ID NO: 231062 - DNA, 708 bp, synthetic construct
  misc_feature 1..708: note = Description of Artificial Sequence: Synthetic coding sequence
  source 1..708: mol_type = other DNA
atgcggggagccgctcccggaaaaaaaacgagcggactgcagcagaagaatgtcgaagttaagaccaagaaaaataagcagaagacgccgggaaacggtgatggtggtagtacgtccgaaacccctcagcctccgaggaagaagcgcgcacgcgtggatccaactgtggaaaatgaggagacattcatgaatcgggtagaagtcaaggtgaagattcctgaagaattaaaaccctggttagtcgacgactgggatctgattactcggcagaagcagttgttttacctgccagctaaaaaaaatgtggattctatactagaagactacgcaaattacaaaaaaagccggggaaacactgacaacaaggaatacgccgtgaacgaagtggttgcaggaattaaagaatacttcaatgtgatgctgggaacacagttgctgtacaaattcgagagaccacagtatgccgagatattggccgatcaccctgatgcacccatgagccaggtatacggagcccctcatcttctccgcctgtttgtgcgaataggagctatgctcgcgtacacccctttggacgaaaaatctttggctctccttctgaattatttgcatgactttcttaaatacttggcaaaaaattcagctaccctcttttcagcatctgattatgaagtcgcaccacctgagtatcacaggaaggctgtgtag

SEQ ID NO: 231063 - DNA, 708 bp, synthetic construct
  misc_feature 1..708: note = Description of Artificial Sequence: Synthetic coding sequence
  source 1..708: mol_type = other DNA
atgcgtggggcagcaccaggaaaaaaaaccagcgggttacaacagaagaatgtggaggtaaagacaaagaagaataaacagaaaaccccaggcaacggggacgggggatcgacatcagagaccccacagcccccacgcaaaaagcgagccagagtggatcccactgtggagaatgaggagacatttatgaaccgggtagaggtcaaggtaaagattcccgaagaattaaaaccttggctggtagacgattgggacttgataacccggcagaaacaacttttctacctgcctgccaagaagaacgtggattcaatacttgaagattacgccaactataagaaatccaggggcaacacagacaataaagaatatgccgtgaacgaagtggtcgccggtatcaaagaatatttcaatgtaatgctgggtacccagttactgtataaattcgaacggcctcagtacgctgagattttggccgaccaccctgatgccccaatgtcccaggtatatggagccccacacttgctgaggctgttcgtgaggatcggcgctatgctggcctataccccgttggatgagaaaagtttggctcttctacttaactatctacacgactttctgaagtatctcgcaaaaaattcagccacactcttttcagcatcagactatgaggtcgcccctcctgagtatcatcgcaaagccgtgtag

SEQ ID NO: 231064 - DNA, 345 bp, synthetic construct
  misc_feature 1..345: note = Description of Artificial Sequence: Synthetic coding sequence
  source 1..345: mol_type = other DNA
atggtctctcggaaggctgttgccgctctactggtagtgcacgtcgccgctatgctggcctcccagaccgaagcatttgtgccaatcttcacatatggtgagctgcagagaatgcaagaaaaggagagaaataaggggcagaagaaatctctgtctgtttggcagaggagtggtgaggaaggcccagtcgaccctgctgagcctatacgtgaggaagaaaacgagatgatcaagctcacggcacccttagagattggcatgagaatgaattcacggcaacttgagaaataccccgctacgttggaagggctattgtccgaaatgctgccacagcatgccaaatag

SEQ ID NO: 231065 - DNA, 348 bp, synthetic construct
  misc_feature 1..348: note = Description of Artificial Sequence: Synthetic coding sequence
  source 1..348: mol_type = other DNA
atggtgtcccgcaaggcggtggcagccctgttagtggtgcatgtcgcagcgatgcttgcatctcagaccgaggcctttgtgccaattttcacctatggtgaactgcagagaatgcaagagaaagagagaaataagggtcagaagaagtccctcagcgtgtggcagcgctccggagaggagggtcccgtagaccccgcagaaccaattagagaggaagagaacgagatgattaagctgactgcccctctggaaatcggcatgagaatgaactcccgccaactcgagaagtaccccgcaacactcgaagggcttctatctgaaatgctgccacaacacgccgctaagtag

SEQ ID NO: 231066 - DNA, 327 bp, synthetic construct
  misc_feature 1..327: note = Description of Artificial Sequence: Synthetic coding sequence
  source 1..327: mol_type = other DNA
atggtgtcacgcaaagcagtggcagccttactggtcgtacatgtggccgctatgcttgccagccagacagaagcttttgtccccatattcacctacggcgagcttcaacgcatgcaagagaaagagagaaacaaggggcaaaaaaagagcttaagcgtctggcaacgaagcggtgaagaaggaccagtagaccctgcagaacctatccgcgaggaggagaacgagatgatcaagctgaccgcccctttagagattgggatgcgtatgaactcgcggcagttggagaaataccctgccacattggaagggctcctgaccgcaaagtag

SEQ ID NO: 231067 - DNA, 1011 bp, synthetic construct
  misc_feature 1..1011: note = Description of Artificial Sequence: Synthetic coding sequence
  source 1..1011: mol_type = other DNA
atggccagacgcagatcccaacgggtgtgtgcctccggcccaagcatgttgaacagcgccagaggtgccccagagcttctgcggggtacagcgaccaacgctgaggtctccgccgctgccgctggggctacggggtcagaggagctcccacctggggatagagggtgccgtaacggaggcggacgcggacccgctgcgactaccagttccacgggcgtggccgtcggtgcagaacacggcgaagactccttgtccaggaagccggatcctgaaccagggaggatggatcaccatcagcctggcacgggcagatatcaagtgctcctgaatgaggaagacaattccgagtccagcgccatcgaacagcctcccaccagtaatcctgctccacagattgtccaagccgcttcatccgcacccgcactggagaccgatagcagcccaccaccctatagttccatcacggttgaggtgcctaccactagtgacactgaagtctacggagaattttatccggtaccacccccttacagcgtggctacaagcctccctacttatgacgaggcagaaaaagccaaagctgctgccatggctgctgcagcagcggagacctctcaacgaatccaggaggaggaatgcccaccaagagatgattttagcgatgctgatcagctccgagttgggaatgatgggatttttatgctcgcatttttcatggcattcatttttaattggcttggcttttgtctgagtttttgtatcacgaacacaatcgccggtagatacggtgccatttgcggctttggattgtccctcattaagtggattctgatcgtgagattctcggattacttcaccggatatttcaacgggcagtactggctctggtggatttttctggtcttgggacttctgctgttctttcggggattcgtgaactacctcaaagtgagaaacatgtcagaaagtatggcagctgcgcataggacacgctacttctttctgttgtag

SEQ ID NO: 231068 - DNA, 1161 bp, synthetic construct
  misc_feature 1..1161: note = Description of Artificial Sequence: Synthetic coding sequence
  source 1..1161: mol_type = other DNA
atgggctcaccatggaacggctcagacggccctgagggagcacgtgagccgccttggcccgcacttcctccctgtgatgaacgcaggtgctccccttttccacttggggctctggttcctgtgacagcagtttgtctttgcctgtttgttgttggggtatcaggtaacgtggtcaccgtgatgctaattggtcggtatcgtgatatgcgcaccaccacaaacctgtacctggggagcatggctgtgtctgatctattgatacttctcgggctgccctttgatctctaccggctatggagaagcagaccatgggtcttcggacctctgctgtgtaggctctctctctacgtaggagagggttgtacatatgctacactcctccacatgaccgctctcagcgtcgaacggtatttggcgatctgtaggcctctgagagctagagtactggtcactagaagaagggtgagagctctgatagcagtgttgtgggccgtagctcttttatcagcaggtccctttctgtttctcgtcggcgtcgaacaggatccgggaatctcagttgtacccggactgaacggcactgcgcgtatagccagctcccctttggcatcctcaccaccgctgtggctttctcgagcccctccaccaagccccccatccggacccgagaccgcagaggcagccgctctcttttcaagagagtgcaggcctagcccagcccagctgggtgcgcttcgagtgatgctgtgggtgacaaccgcttatttttttctcccattcctgtgcctgtcgattctatatggcctgataggcagagaactgtggtcttccaggcgtcctttacggggaccagcagcgtcaggcagggagcgtgggcatagacaaacggtgcgggtgctgcggaaatggagccggagagggtcgaaagacgcatgtttgcagtcagcacccccagggaccgcacagactcttggcccactaccgttgctggcccagctgtgggcacccctgcccgctcccttccctatatcaattcccgcaagcactagacgcggtggtggctctggcatctacaatctcctggtggcactccccaggtggcagaaccatctgcacaaacatggtcggtttgcggacgatgtactgctctctgtcctttag

SEQ ID NO: 231069 - DNA, 1206 bp, synthetic construct
  misc_feature 1..1206: note = Description of Artificial Sequence: Synthetic coding sequence
  source 1..1206: mol_type = other DNA
atggagaagtccaagaatttcagaattgacgccctcctggccgtcgacccacctcgggcagcatctgcacagtcagcccctttggctctggttacctctctggcagccgcagccagtggaacaggcggagggggtggcggaggtggtgcatcaggaggtaccagcggaagctgttctcccgctagcagtgaacctcctgctgcccctgccgaccgactgcgtgccgaatcacccagcccacccaggctgctggcggctcattgtgctcttctgccaaagcccggttttcttggagcgggaggcggaggcggtggaacaggcggaggacacgggggaccacatcatcacgcacatcccggtgccgcagccgctgcagctgccgcagcggcagccgcagccgctggtgggctggctctggggctgcaccctggcggagctcagggaggcgcaggtcttcctgcccaggcagcactctacggacatccagtctatggctattctgccgcagcagctgctgcagccctcgccggtcagcaccccgctctgagttactcttaccctcaggttcagggcgcacatccggcacacccagcggatcccatcaagctgggggcaggtacctttcagctggatcagtggttacgcgcttcaaccgcgggaatgatcctgcccaagatgccagatttcaactcccaggcacaatctaacctactgggtaaatgcagacgcccacgaacagcattcacctctcagcagcttctggaactcgagcaccagttcaaattaaataagtacctgagcaggcccaagagatttgaggtggctacctccctcatgctaacagaaacccaggtcaaaatctggttccagaacaggaggatgaagtggaaacgctccaaaaaggcaaaagagcaggcagctcaggaggccgaaaaacagaaaggcggtggcggtggagccggaaagggaggcgcagaggagccaggtgccgaagagctgctgggcccaccagctcccggagataagggttccgggcgaaggctacgagacctgagggattcagaccccgaggaagacgaggacgaggacgatgaagatcactttccatattccaacggtgccagcgtccacgccgcaagctcagactgttcatccgaagacgactcccctccaccaagacccagccaccagcccgcaccccaatag

SEQ ID NO: 231070 - DNA, 696 bp, synthetic construct
  misc_feature 1..696: note = Description of Artificial Sequence: Synthetic coding sequence
  source 1..696: mol_type = other DNA
gcagcagccgctttggcgggtcaacacccggctctgtcatattcatacccacaggtgcagggtgctcaccctgctcatcccgcagaccccatcaaacttggtgctggaacctttcaactggatcagtggctgagagcctctactgcaggaatgatacttccaaagatgccagattttaattctcaggcacagtcaaatttgttgggaaaatgtaggcgtcccagaaccgcttttacatcccaacaactgcttgaactcgagcatcagtttaagctgaataagtacctgtcaaggccgaaacgctttgaggtcgcgaccagtctgatgctcacagaaacgcaagtaaaaatatggtttcaaaaccgtcggatgaaatggaagcggagtaagaaggccaaggagcaggccgctcaggaggcggaaaagcagaagggcggaggtggcggtgctggcaagggcggtgcggaggagcccggagcagaagagttgcttggcccaccagcccctggcgataagggcagtgggagaagactcagagatctgagggacagcgatcctgaagaggacgaagatgaggacgacgaagatcactttccgtattctaacggggcatctgtgcatgcggcaagctccgactgcagttcagaagacgatagtcccccacctcgtccaagccaccagcctgctccccagtag

SEQ ID NO: 231071 - DNA, 570 bp, synthetic construct
  misc_feature 1..570: note = Description of Artificial Sequence: Synthetic coding sequence
  source 1..570: mol_type = other DNA
atgggcggtttgagtactgttggcgcttgtcctggcattcttggcgcacagcaggcccaagcccagtctaacctcctggggaagtgcaggagacccaggacagcctttacctcccagcagctgctagaactggagcatcagtttaagcttaataagtacctcagccggccaaagcgtttcgaagttgcgacttccttgatgctgaccgaaacccaggtgaaaatctggttccagaatcggagaatgaagtggaagcggtccaaaaaagccaaagagcaggctgcccaggaggcagagaagcaaaagggagggggagggggtgccggtaagggcggagccgaggaacccggagccgaagagctcctaggcccacccgctcccggagataaggggtctggacgcaggcttcgtgacttgagggatagtgacccggaggaagatgaagatgaggacgacgaagaccactttccctacagcaacggtgcaagcgtgcacgcagcctcaagcgattgtagctctgaggacgactcccctcctcccaggcccagtcaccagcctgcaccgcagtag

SEQ ID NO: 231072 - DNA, 1692 bp, synthetic construct
  misc_feature 1..1692: note = Description of Artificial Sequence: Synthetic coding sequence
  source 1..1692: mol_type = other DNA
atgccatccaagttttcatgcaggcagctaagagaagctgggcaatgttttgagtcttttctggtcgtgagggggctcgacatggagacagaccgggagcggctgaggaccatatataatcgtgactttaagattagtttcggaaccccagctcctggatttagcagcatgctctatggtatgaagattgcgaatctggcctacgttactaagacccgggtgagatttttcagactggatagatgggcagacgtgcggtttcctgagaaacgaagaatgaagctaggctccgatatatctaagcatcacaagagccttttggccaagattttttatgacagagcggaatacctgcatggcaaacacggggtggatgttgaggtgcaggggcctcacgaggcacgagacggccagcttttgatccgcttagatctgaaccgcaaggaggtgctaacgcttcgactgagaaatggagggacccagtcagtcactctgactcacttgttcccactgtgccggaccccgcagttcgcattttacaacgaagaccaagagctgccctgtccacttggtccaggggagtgttatgaacttcacgtgcattgtaagacgtccttcgtgggctacttccccgcaaccgtcctgtgggagctcctggggcctggagagtctggcagtgagggtgctgggactttttacatagctcgtttccttgccgctgtggcacactctcctctcgcggcacaactgaagcctatgacgcctttcaagaggacgagaattacaggtaatcccgtcgtgaccaaccggatcgaggaaggtgagagacccgaccgtgccaagggctacgaccttgagctgtctatggctctcggaacatactacccaccccctcggctgcgacagctgttaccaatgcttctgcagggtacatcaatatttacagctcccaaggagattgccgagatcaaggcacagctcgagactgctctaaagtggcggaattacgaagttaaacttaggctcctgttgcacttagaggaactgcagatggagcatgatattaggcactatgaccttgagagtgtgccgatgacatgggatccagttgaccagaatcccagattgcttaccctggaggtaccgggagttaccgaaagtcggccttcagtgttgagaggagaccacctttttgccctgcttagtagtgaaacacaccaggaggatcccattacttacaaaggctttgttcataaggttgagcttgaccgagtcaaactgagcttctccatgagcctgctgtcacggtttgtagacggccttacattcaaagttaacttcacattcaatcggcaaccactgagagtacagcaccgtgccctggaattgaccggcaggtggctgctatggcccatgctgtttcctgttgcccctagggacgtgccactgctaccgtcagatgtgaaactgaaactttacgaccgcagcttggaatccaaccccgaacagctgcaggccatgcgacatattgtaaccgggacaacaaggccggctctgaccgcgtgtcttaccctgaaccaaaacccggctgagcttcctttgcagggcaccggcaggttaggcgagggggtatacaatccttcgcactccactcccagcccagcgggagaaaatgacaccagttcctgttag

SEQ ID NO: 231073 - DNA, 3012 bp, synthetic construct
  misc_feature 1..3012: note = Description of Artificial Sequence: Synthetic coding sequence
  source 1..3012: mol_type = other DNA
atgcccagcaaattctcttgcaggcaattgcgagaggcgggacagtgctttgagagcttcctcgtggtgagaggattggatatggagaccgacagagagcgcctgagaactatctacaatagagattttaagattagctttggtactccagctcccggtttttcgtcaatgctgtatggaatgaaaatcgctaatttagcttacgtcacgaaaaccagagtccgcttctttaggctcgatagatgggccgatgttaggttcccagaaaaaagacgaatgaaactgggctctgacatcagcaaacaccacaagtccctactggccaaaattttttatgacagggcggagtacttacacggtaaacatggtgtagatgtagaggtgcagggccctcatgaggctagagacggtcagttattaattaggctggacctcaatcgtaaggaggtattaacactgcgcttaagaaatggtggaacgcagtctgtgacattgactcacctcttccccttatgcagaaccccacagttcgctttctacaatgaagaccaagagttgccatgccctttggggcctggcgaatgctatgagctccacgtgcattgcaagacttcgtttgtagggtattttccagcaacggtgttgtgggagttgttgggacccggtgaatctggaagcgaaggagccggaaccttctacatcgccagattcctggcggcagtggcccactctccattggccgctcagctcaagcctatgacacccttcaagcgtacaagaattacgggcaaccctgtggtgactaatcgaatagaggaaggggaaaggcctgatagagcaaaaggttacgatcttgagctctcaatggctctgggaacatattacccacccccacgcctgcggcagttgctccctatgttactccaagggacgtcaattttcaccgctcccaaggagattgccgagatcaaagcccagctggaaaccgcactaaagtggcgcaactacgaagtgaagctgaggttattgctacacctggaggaactgcagatggagcatgacatcagacattatgacctggaatctgtgcctatgacctgggaccccgttgaccagaatcctagactgctgactctggaagtacccggagttactgagtctcgtccatccgtcctgaggggggatcacctcttcgccctgctttcttctgaaacccatcaggaggaccctatcacatataaaggcttcgtgcacaaggtggagctagaccgagtgaagctatccttttccatgagcttgctcagtaggttcgtggacggtctgacctttaaagttaactttactttcaatcgccagcccttacgtgtgcagcacagagcactggaacttacgggacgctggttactgtggcctatgctcttccccgtggcacccagggacgttccccttctcccgagcgatgtcaagctgaaactttacgaccgatcactcgaatctaaccccgaacagctgcaggccatgaggcacattgtcaccggtactacacgccctgcgccatacataatttttggccctccgggaaccggtaagactgtcactctagtagaagccatcaaacaggtcgtgaaacacttacccaaggcacacattctggcctgcgccccaagcaatagtggggctgatttactgtgtcagagactgcgggtgcatctcccttcttccatataccgccttcttgcaccatcccgggatatccgaatggttcccgaggacataaaaccctgctgtaattgggacgccaagaaaggggagtacgtttttccagccaagaaaaagctgcaagagtatagggtgttgatcaccaccctgattacagccggacggcttgttagcgctcagttccccattgaccattttacgcacatctttatcgatgaggcgggacactgcatggagcccgagtccctcgtggctatcgctgggctcatggaggtaaaggaaacaggtgaccccggaggtcagctcgtgttggctggagatccgaggcagttgggacccgtgcttagatccccactgacacagaaacatggtctcggatattcccttttggagcgcctgctgacatataactccttatacaagaaggggcctgacggatacgacccgcaatttatcactaagctgctccgcaactatcggtcgcacccaactatcctggatataccgaatcaactctattacgagggagagcttcaggcatgtgctgatgtggtcgaccgagagaggttctgccggtgggcgggactgccacggcagggattccccattatctttcatggcgtgatgggcaaagatgagagggagggaaatagtccttcctttttcaatccggaggaagccgctacagtaacctcctacctaaaactgttgctggccccatcctctaaaaagggtaaagccagactgagtcccagaagcgttggtgttatatccccatacaggaaacaagttgaaaagatcaggtattgtataaccaaacttgatagggaactgcgcggattggacgatatcaaggacctaaaagtggggagcgtggaagagttccagggacaagaaaggagcgttatcctcatcagcacggttcggagctcccagtcattcgttcagcttgacctcgatttcaatttaggcttcttaaagaatccaaagcgctttaacgtggccgtgaccagggccaaagccttactcataattgtgggcaaccctctcctactcggccatgacccagactggaaagttttcctcgagttctgtaaagagaatgggggatataccggatgcccgttccccgcaaagttggatcttcaacaaggtcagaaccttctgcagggtttgagtaaactatccccttctacaagtgggccacatagtcatgactatttaccacaagagagggagggggagggtgggctgtctctgcaggtagaacccgaatggaggaacgagctttag

SEQ ID NO: 231074 - DNA, 2844 bp, synthetic construct
  misc_feature 1..2844: note = Description of Artificial Sequence: Synthetic coding sequence
  source 1..2844: mol_type = other DNA
atgctgtacggcatgaaaattgccaacctcgcttacgtcaccaaaactcgagtccggtttttcaggctcgatagatgggccgacgtgagattccctgaaaagcgtaggatgaagctggggtcagacatctcgaagcaccacaaaagcctacttgctaaaatcttctatgatagggcagagtacctgcacggaaaacatggcgtggatgtcgaggtgcagggccctcatgaggcccgagatgggcagcttctgatccgcttggacttaaatcggaaagaagtgctgaccctccggctgcgtaatggaggaacccagtctgtcaccctcactcacctatttcccctgtgtaggacgccccaattcgccttctacaatgaggatcaagagctgccctgtcccttgggccctggggaatgttacgagttgcatgtgcattgcaagacttccttcgtgggctactttcctgcaaccgtcctatgggagctactggggccaggggaatctggtagcgagggcgctgggaccttttacatagcgagattcctggctgctgtggctcactcacctctcgccgctcaactcaaacctatgactcctttcaagagaacaaggattactggtaaccctgtggtgactaataggatagaggaaggcgagaggcctgatcgagccaaggggtatgaccttgagctctctatggctctgggcacttactatcctccacctcgcctacgacaactccttcctatgctgttgcaggggacatctatattcacggctcccaaagagattgctgagatcaaagcacagctcgaaactgccctcaaatggcgaaactacgaggtcaagctgagactgctacttcacttagaggagctacagatggaacacgatatcaggcactatgatctggagtcagtccctatgacctgggatccggtggaccagaaccctaggctgctgactcttgaagtccccggagtgaccgaaagccggccttctgtccttagaggggaccacctatttgcactgctgtcatccgagacgcaccaagaggatccgatcacatataaaggctttgtgcacaaggtggaactagatcgtgttaaattgagttttagcatgtcacttttaagtaggtttgtggatggtctgaccttcaaagtgaattttacttttaatagacagcccctccgcgtgcagcacagggcccttgagctcactggccgatggcttctctggccaatgttatttccagtcgctcctagagacgtcccacttttaccatccgacgtcaagttgaagctttacgacagatccttggagagcaaccctgaacagctccaggcaatgcggcatatcgtaaccgggaccacacgtccggctccgtatataatatttggccctcctgggacagggaaaacagtcacgcttgttgaggcaataaagcaggtggttaagcacttgcccaaagctcacatacttgcgtgtgccccttctaacagtggtgccgacctgctctgccagcgattgcgcgtgcatctgcctagttccatttaccggctgttggccccaagcagagatattcggatggtcccggaagatataaagccatgttgtaattgggatgcaaaaaaaggcgaatacgtgttcccagcgaagaaaaaactgcaggaatatagagtgcttataacaacattaattaccgctggcagactggttagtgcccagttccccattgaccattttacccacatttttattgacgaggcagggcactgtatggaacctgaaagtctggtggctatcgccggtttgatggaggtcaaagagactggcgatcccggaggccagctcgtgctcgccggagatccacgacaactcgggccagtgcttcggtcaccactcactcagaagcacggtctgggatatagcctcctagagaggctgctgacctacaactccctctacaaaaagggaccagacggctatgacccacaattcatcacgaaactgctccgcaactaccggagccaccctactatcctggacatcccaaaccaactctattacgagggtgaacttcaagcttgcgcggatgtggtggatcgcgagaggttttgccggtgggccggacttcctcggcaaggcttcccaatcatatttcacggagtgatgggcaaggacgaacgggagggtaatagtccctctttcttcaaccctgaagaggccgcaactgtaaccagctatctgaagcttctcctcgcccctagttccaaaaaaggaaaagccaggttgtcaccacggtccgtgggtgtgatctcaccctacaggaagcaggtagagaagatccggtactgcataactaagttggaccgcgagttacgcggtctggacgatatcaaagacctgaaggtgggttctgtggaagagtttcagggccaggagagaagtgtgatcctgatcagtaccgttagatcttctcaatcattcgtccaactggacctggatttcaatttgggattcctcaagaaccctaagcggttcaatgtggcggtcaccagggcaaaggcattgctcatcattgtcggcaatcctctgctcttgggccacgatccagactggaaggtctttctggaattttgcaaagagaatggcggttataccggctgccctttccccgcaaagctggaccttcaacagggacagaatttactccagggcctgagtaaacttagcccttctacgagtgggcctcatagccacgattacctcccacaggagagggagggcgaggggggattgagcctccaggtcgaacccgagtggcgcaatgagttgtag

SEQ ID NO: 231075 - DNA, 3012 bp, synthetic construct
  misc_feature 1..3012: note = Description of Artificial Sequence: Synthetic coding sequence
  source 1..3012: mol_type = other DNA
atgccctccaaattctcatgtagacagctgcgggaagcgggacagtgttttgaatctttcctggtcgtgaggggtttggacatggagacagaccgtgagaggctgcgtaccatctataaccgcgactttaagatcagcttcgggaccccagcccctggattcagctctatgctctatgggatgaagatcgcaaatctggcctatgtgaccaagacacgggtccgattttttaggctggaccggtgggcagacgttcgttttccagagaagcgaaggatgaaattgggatcggatatatccaagcaccataagtcgctgttggccaagattttctacgatcgggcagaatacctacatggtaagcacggggtggacgtcgaagtgcaaggcccacatgaagctcgagacggccagctccttataaggttggacttgaatagaaaggaggtcctgaccttgaggctgcgcaacggaggcacccagagcgtgaccctcacgcatctttttcctttgtgccgcacccctcaatttgcattttataacgaggatcaagagctgccctgccccctgggccctggcgaatgctatgagctccacgtgcactgtaagacctccttcgtcggatatttcccagccacagtattatgggagctcctgggtcccggagaatctggcagcgagggagccggaactttttacatagccaggtttttggctgctgtggcgcattctccgctggcagcacagctgaagcctatgacccccttcaaaagaaccaggataacaggcaaccccgttgtcacgaatcgtatcgaggaaggtgaacgcccagatcgggctaagggatacgatttggaactttccatggccctgggtacttactatccacccccacgattacgtcagctgctccctatgctgttgcagggcactagtatattcacagctcctaaggagatcgccgagattaaggcacagttggagaccgcgctcaaatggcggaattacgaagtcaagctacggctcctgctgcatttagaagaattacaaatggagcacgacataagacattatgatctggagtccgtgcccatgacctgggacccagtcgatcagaacccccgacttcttacgcttgaggttcccggagtgacggaatctagaccaagtgtgctccgaggagaccacctgttcgccttgcttagttccgagacccatcaggaggatcctattacgtacaaagggttcgttcacaaagttgagctggaccgtgtgaagcttagtttctcaatgtcactgctgagtcgtttcgtggacgggctaaccttcaaggtgaactttaccttcaacagacaaccactccgggttcaacaccgggcactcgaactcaccggcaggtggctattgtggcccatgctcttcccagtcgcccctagggatgtccccctgctgcctagcgacgtgaagctcaaattatacgaccgctccctggaaagcaatccagagcaactgcaagccatgcgccacattgtgaccggtacaacccgtccagctccatacataattttcggtccacctggcacaggaaagaccgtgacgttagtcgaggctatcaaacaagtggtcaagcaccttcctaaagcacacatactcgcctgtgccccaagcaacagtggcgctgacctgctgtgtcagagactgcgggtgcatctccccagctccatctaccgattattagctccatctcgggacatcagaatggtgcccgaggacatcaagccatgctgtaattgggacgcaaagaaaggagagtatgtgttccctgctaagaagaagctgcaggagtaccgcgtgcttatcacaacactgattaccgctggcaggttggtcagtgctcagtttcccatcgaccattttacccacatcttcatcgatgaagcaggtcactgcatggaaccagaatctttagtggccatcgccggtctgatggaggtgaaggagacgggcgatccgggaggtcagcttgtcctggcaggtgaccccagacaactcgggccagtcctgcgatctcctctgacccagaagcatggcctgggatattctttgttggaaaggctccttacctataacagcttatataagaaggggcctgatggatacgatccccagtttatcaccaagctgttgagaaactatcggtctcatcctaccattttagatatcccaaatcagctttactatgaaggcgaattacaggcttgtgcagacgtagtagaccgcgaacggttttgccggtgggcaggactcccaaggcagggcttccccataatcttccatggcgtaatggggaaggacgaaagggagggtaactccccttcgtttttcaatcccgaggaagccgcaactgtaacatcctacctgaagttgctgctggcgccatcctctaaaaaaggaaaggccaggttgtccccgagatctgtgggggttatatctccatacagaaaacaggtggagaagatccggtactgcatcaccaagttggaccgcgagctcagaggcctcgacgatatcaaggatcttaaagtgggatccgtggaggagttccagggccaggagagaagtgtgatccttatctccacggtccggagctcacagtctttcgtccagcttgatctcgacttcaatttaggctttctcaagaatcccaagcgattcaatgttgcagtgactcgagctaaggccctgcttatcatagttggcaatccactgctcttggggcatgaccctgactggaaagtcttcctagagttctgcaaggagaatgggggatatacaggctgccctttccctgctaaattggatttgcagcagggacagaacttactgcaggggctgagtaagctttctccttctactagcggcccacattctcacgactatttaccacaggagagggaaggcgaagggggactatctctgcaggtcgagccagaatggagaaacgaactgtag

SEQ ID NO: 231076 - DNA, 2826 bp, synthetic construct
  misc_feature 1..2826: note = Description of Artificial Sequence: Synthetic coding sequence
  source 1..2826: mol_type = other DNA
atggagaccgaccgggagaggctcagaactatctataaccgcgattttaagatttccttcggcacccccgcacccggtttctccagtatgctatacgggatgaagatcgccaacttagcatacgttactaagaccagggtgcggtttttcaggctggataggtgggccgacgtacgctttcctgagaaacggcgtatgaaactaggctctgacatcagtaaacaccacaagtccctgttagccaaaatcttttacgatcgagctgagtatctgcatggcaaacatggaggaacgcagagcgtgaccctaacccatttattcccactttgccgcaccccgcagttcgctttctacaacgaggaccaagaattgccgtgcccattaggcccaggggagtgctacgagctgcacgttcactgcaagacctccttcgtgggctattttccggcaactgtcctctgggaactcttggggcctggcgagagtgggtctgagggcgcaggaacattctacatcgcccgttttctggccgctgtggcccacagccccttggccgcacaactaaaacccatgacaccattcaaacggacgagaatcacagggaatcctgtggtcaccaacaggattgaggagggagaacggccagatagagctaaaggatacgacctggagttgagtatggcacttgggacttattacccgccacctcgtctcagacagctgctcccaatgctactgcaggggacgtcgatttttactgcacccaaagagattgcagagatcaaggcccaactggagacagcactgaagtggagaaactatgaggtcaaactgaggctgttgctgcacctagaggagctgcagatggaacacgacatcaggcattacgacttggagagcgtcccaatgacatgggacccggtggaccaaaacccccgtttactcaccctggaagttcctggcgtaacagaatccagaccgtctgttcttcggggtgatcatctttttgcactgctgtctagcgagacccatcaggaggatcctatcacgtacaagggatttgttcacaaggttgagctggaccgcgtaaagctgagcttcagcatgagcctgcttagccgcttcgtggacgggctgacttttaaagtgaattttacatttaatcggcagcccctgcgtgtgcaacatcgggctttagagttgaccggcagatggctcctctggccgatgcttttccccgttgctccaagggacgtaccacttctgccaagcgacgtcaaactgaaattatacgaccgttccctggagagtaaccctgaacagctccaggcgatgcgtcacatagtcaccggcacaacacggcctgctccatacataatattcggacctccgggaaccggcaaaaccgtgactctggtggaggctatcaagcaggtcgtaaagcatttgcctaaggcgcatatactggcctgcgcgcctagcaactcaggagcggacttactttgtcagcgacttcgggtacacctgccgagctcaatatatcggctgctggcaccatccagggacattaggatggtgccagaggacattaagccttgttgcaactgggacgctaagaagggcgaatacgtgtttcctgcaaagaaaaagctgcaggaatacagggtgctcatcacgaccctgattactgccggacggttagtgagcgctcaatttcctatcgatcacttcacccacatctttattgatgaggccggtcattgtatggaaccagaatctctagtagctatagccggacttatggaagtaaaagagacaggcgatcccggtgggcagttagtgctggccggagatcctcgccagctgggccctgtgctaagatctcccctgacgcaaaaacacgggctaggctactctctgctagaacggcttcttacatataatagtctttataaaaagggacctgatgggtacgacccacagttcattaccaagttgctccggaattacaggagccaccctaccattcttgacatccccaaccagctatactacgagggagagctgcaagcttgcgccgatgttgtggatagagagcgcttctgccggtgggccggtctgccacgccagggcttccctatcatattccacggtgtgatggggaaggacgagagggagggaaatagtccttccttttttaatccggaagaggcagcaactgtgacaagttacctcaaactgctgctcgccccttcttccaagaaaggaaaggcacggttgagcccaagatcagtcggggttatttccccttaccgcaaacaagtggagaaaatccgctactgtattaccaaactggatcgggaactgcgcggacttgatgatattaaagacctaaaggtggggagtgtcgaggagttccagggacaagagcgatccgtcatcctcatcagcactgtccggagctctcagagtttcgtacagttagacctagatttcaaccttgggtttctgaagaaccctaaacgttttaacgtggccgtgactcgagctaaggcgctgctcatcatagtgggtaaccccctgcttctcggtcatgatcctgactggaaggtcttcctggagttttgtaaggagaatggaggttataccggatgtccattcccagctaagcttgaccttcagcaggggcagaacctccttcagggcctgagcaagctgagcccctccacctccggtccccacagtcatgactatctcccgcaggaacgcgaaggcgaaggtggactgagcttgcaggtagaaccggagtggcggaacgagctttag

SEQ ID NO: 231077 - DNA, 3012 bp, synthetic construct
  misc_feature 1..3012: note = Description of Artificial Sequence: Synthetic coding sequence
  source 1..3012: mol_type = other DNA
atgccttccaagttcagctgtaggcagctaagagaggctggacagtgtttcgagtccttcctggtggttaggggtctcgatatggaaaccgaccgcgaaaggttgcgcaccatctataatcgcgatttcaaaatcagtttcggaactcccgctccgggtttttccagcatgttatatggcatgaagatcgccaaccttgcttatgtcacaaagaccagggtgcgctttttccggctcgaccggtgggctgatgtcaggttcccagagaagagaaggatgaaactcgggtcggatataagcaaacatcacaagtccctgctggcaaaaatcttttatgaccgtgccgagtacttgcatggaaaacatggtgtggatgtcgaagttcagggcccacacgaagccagggacgggcagcttctgatccgtctggatcttaataggaaggaagtgttaactcttaggcttaggaacggagggacccagtctgtcaccttgactcacctttttcctttgtgccggactccacagttcgcattttacaatgaagatcaggagctgccgtgtcccctgggaccaggggagtgctatgaacttcacgttcattgtaagaccagttttgttggctattttccagccactgttctatgggaacttctgggcccaggcgagagcggcagcgagggggctggcaccttttacatcgcacggttcctggctgcagtggcccacagtccattggcagcacagctcaagcctatgacaccatttaaacggacccgcatcacaggaaatcccgtggtgaccaatcgcatcgaggaaggagaacgccctgatcgcgctaaaggctatgatctggagctgagtatggcgttaggaacctattacccccctcccagacttagacagcttctgccaatgcttctccaggggaccagtattttcaccgccccaaaggaaattgcagagatcaaagcccagttggagactgcactcaaatggcgaaattacgaggtaaagctgcgtcttctactccatctggaagaactgcagatggagcatgacatacggcattacgatcttgaaagcgttccaatgacctgggatcctgtggaccaaaaccctaggctcctaacattagaggtaccaggcgtgactgaatcccgtccaagtgttctgaggggcgatcatttatttgccctcctctcatccgagacacatcaggaagaccctattacctacaaaggttttgtgcataaagtcgaattggatagggtgaaattgagcttttctatgagccttctgagtagatttgtagacggcctgacattcaaggtcaattttacctttaacagacagccgctacgagtacagcacagggcgctggagctgacagggagatggctgctgtggcccatgttattccccgtggcccctagggacgtgcccctcttgccttcagacgttaaactgaagctatacgatcgttccttggagagcaaccccgagcaactccaggcaatgcgccacatcgtcacagggacaactcgcccagccccatatattatctttggacctcctggtactggcaaaacagtgacgctggtagaggcaatcaagcaggtggtgaagcatctccccaaggcccacatactcgcttgtgccccatcaaacagcggcgctgatttgctgtgccagcgcttacgtgttcatctgcctagttcgatctatcggctgttggccccttctcgggacatacggatggtcccggaagatattaaaccttgctgtaattgggacgccaagaaaggggagtatgtttttcccgcaaagaagaaactgcaggagtatcgtgtgctcatcaccacactgattaccgccggacgcttggtctctgctcagtttcccatcgatcacttcacccacatattcatagatgaagccggtcattgtatggaacctgaaagcctggtagcaatcgcgggactcatggaagtgaaggagacaggagatccgggtgggcagttggtgctggcaggggaccctaggcagctgggaccagtgctgaggtccccattaacccagaagcatggcttgggttatagtcttttggaacgtttgctgacctacaattcactttacaagaagggcccagatgggtacgatccccaattcatcacaaaactcctgagaaattaccgctcccatcccactattcttgacattccaaaccagctctattacgaaggcgaactgcaggcttgcgctgacgtggtggacagagagcggttctgcagatgggctggcctccctaggcaggggttcccgatcattttccacggtgtaatgggcaaagacgagagagaaggcaattcgccctctttttttaatcccgaagaggccgcaacagtgactagctatcttaaactgctcctggccccttctagcaaaaaaggtaaagcacgattgagtccacgatccgttggtgtgatatctccctacagaaagcaagtggaaaaaatccgctactgtataaccaaacttgatcgggagctcagaggccttgacgacatcaaggacctcaaggtaggctcagtcgaggagttccagggccaagagagaagcgtgatactaatcagtacggtacgttctagtcaatcctttgtgcagcttgacttagactttaacctgggttttcttaagaatcctaagaggtttaatgtggctgtgactagagctaaggccttgctgattattgtcggcaaccccctattgctagggcacgatccagactggaaagtgtttctggagttttgcaaggagaacggtggatacaccggctgtccttttccagcaaagttagacctccagcaggggcagaatcttctccaaggcctcagcaagctgtccccgagtacctcaggccctcacagccatgattatctgcctcaggagcgcgaaggagaggggggactgagcttgcaggtcgaacccgaatggagaaacgagctctag

SEQ ID NO: 231078 - DNA, 171 bp, synthetic construct
  misc_feature 1..171: note = Description of Artificial Sequence: Synthetic coding sequence
  source 1..171: mol_type = other DNA
atgcccagtaagttctcctgcaggcaacttcgggaggctggtcagtgctttgagtccttcctggtggtgcgtggcctcgatatggagaccgaccgcgagaggcttcggaccatttacaacagggattttaagataagcctagcttcgtctaagtcgatattgcagtcatag

SEQ ID NO: 231079 - DNA, 3636 bp, synthetic construct
  misc_feature 1..3636: note = Description of Artificial Sequence: Synthetic coding sequence
  source 1..3636: mol_type = other DNA
atgctcagcctagccgcaaaacttgtggcttttttttggaggaccgcagatacccccagagaagaggccggacagctagagcctgaactggcggagggggatactaaactcaaaaccgtgcgaggagtagttacgaggtattgctctgactacggcatgatagacgacatgatttacttcagcagtgatgccgtgaccagcagggtgctccttaacgttgggcaagaagtcattgccgtggtcgaggaaaataaagtgtcaaatgggctgaaggccatccgtgtggaggccgtgagtgacaaatgggaggacgactccagaaatcacggatctcctagcgattgtggaccccgtgtgctcattggatgcgttacatcactggtcgagggcgctggctgcatcagccagaccacctacttcagtttggagtctgtctgtgaaggattcgaaccatgcaagggggactgggtcgaggccgagtatagaattaggcctggcacgtggagctctgaagcgacctccgtgaagccactgcggtacaaacgggtggacaaggtgtgtattagctccctttgtgggagaaacggtgttctcgaagagtccattttcttcacgctcgactcgttgaagttacctgatggttatactccacgccgtggggacgttgtgaacgccgtagtggtggagtcatctcaaagctgttacgtatggcgcgcactgtgcatgactctggtaaaacgtagggatgccgctcctgtccacgaggcaactcatttttacggaacaatccttctcaagaataagggggatatcgaggtgacccaggtcacacactttggtactctcaaggaagggcgttcaaaaaccatggtgatttggattgaaaataagggagacatcccacagaacctggtgagttgcaagttggccggatgggataaaagcaagcagttcaggtttcagatgttagataaagaccaaatgtgtccagtggtatcctttgtgtccgtccctgaaaaagaaaacagctccgatgagaatatcaattcattgaactctcacactaaaaataaaacctcccaaatgagtgagtctagcttggtgaacaaccggggaatcagcccaggagattgtacttgcaaaggagaaaatggcgaaaaagacaatattctttcaaggaaacagatgacagagccagagcctggcggtctggtgcccccaggcggaaagacatttatcgtcgtgatctgcgacggtaaaaacccaggtcgttgtaaggagctcctgctgctatgcttctcagacttcctgatcggccgataccttgaagttaacgtgatcagcggcgaggaatccttaattgcggctagagagcccttcagctggaagaagctgaagtcgtcacaggccttgaccagcgcgaaaaccactgtggtcgtgaccgctcagaaacgcaactccagaaggcagctccctagttttctgccccaatatcctatccccgataggctcagaaaatgtgttgagcagaagatagacatcctgacctttcaaccgttactggccgaattgttgaacatgtcgaactacaaggagaaattctcaaccctactgtggctggaagaaatctacgcagagatggaactcaaagagtacaacatgtctggaatcattttgcgtagaaacggtgatctactggtgttagaggtcccaggactggccgagggaaggccctcactgtacgccggagataagctaatcctgaaaacacaggagtacaacgggcatgctatcgaatatattagctatgtaaccgagatccacgaagaagatgtcacactgaaaatcaatcctgagtttgagcaggcctacaacttcgaacctatggatgtcgagttcacttataatcggaccacaagtcgccgatgtcattttgcccttgaacatgtcattcatcttggtgtgaaggtgcttttcccagaagaaattattttacagtccccacaggtcacagggaactggaaccacgcacaggatactaagagcagcggccaatccactagcaaaaaaaacaggaagacgatgacagaccaggctgagcacggcactgaggagcggagggtgggggataaagatttgcctgtcttggcgcctttcactgcagagatgtccgactgggtcgacgaaattcagactccaaaggcacgcaaaatggagttcttcaatcctgtgcttaacgagaatcagaagctggctgttaagcggatccttagcggtgattgcaggcctctcccctacatcctgttcggtccaccaggcacaggaaaaaccgtgactataatcgaagccgtgctgcaggttcacttcgcactgccagactcccgcatcctcgtctgcgccccaagcaacagcgccgctgacctcgtgtgcctaagactccacgagtctaaagtgttacagcccgctacaatggtccgggtcaatgcaacctgtcggtttgaggaaattgttatcgatgcagtcaaaccttattgccgagatggggaggatatatggaaggcctccagattccgcattattattactacctgcagctcctccggactattttaccagatcggcgtgagagtcggccattttactcacgtgttcgtcgacgaggcaggccaagcaagcgagccagagtgcctcatacctcttggtttgatgtcggatatctctgggcagattgttctagccggagaccctatgcagctcgggccagtgatcaaaagtagattggccatggcgtatggtctaaatgtgagtttccttgagcggctcatgtcccgtcccgcttaccagcgagatgaaaatgccttcggggcttgtggcgctcataacccactgttagtcacaaaactggtgaagaattaccgctcacacgaggcattgctcatgctaccgagtcggctcttttaccatagagaactcgaggtatgtgcagatccaacagtcgtaacctccctgcttggttgggaaaagttgcctaagaaaggcttcccactgatcttccacggtgtgagaggctcagaagctcgggagggcaaatccccctcctggtttaaccccgcagaagcagtacaggtgctacgctactgttgcctgctcgcccactctatctcttctcaggtttccgcttctgatatcggtgtgataaccccctaccggaaacaggtggaaaagatcagaatacttctgcgcaacgttgatctgatggatatcaaggttggctcggttgaggagtttcaagggcaggagtatcttgtcatcattatctcaacagttagatcaaacgaagatagattcgaagacgatagatacttcctgggctttctgtcgaatagcaagcgctttaatgtagcaatcacaagacctaaggcccttcttatcgtgctcgggaatccgcacgtcctggtgagagatccctgcttcggggcattgcttgaatacagcatcaccaatggcgtgtatatgggttgcgatctgcccccagcactacagagtctgcagaattgtggcgaaggagtcgctgatccctcttatccagttgtccctgaatcaaccggccctgaaaagcatcaggagccaagttag

SEQ ID NO: 231080 - DNA, 378 bp, synthetic construct
  misc_feature 1..378: note = Description of Artificial Sequence: Synthetic coding sequence
  source 1..378: mol_type = other DNA
atgagcgatatctccggtcaggtgactaaactggtgaagaactataggtctcatgaggccctacttatgcttccctcgaggctgttttaccacagagagctcgaagtctgcgccgatccaacggttgtgacgagtctgcttgggtgggaaaaactgcccaagaaaggctttcccctaatctttcacggggttcgcggaagcgaggccagagaagggaaatctccttcctggtttaatcctgcagaggccgttcaggtgctgaggtattgttgcctgctggctcacagcatttcatcacaagttagtgcctcagacataggtgtgatcactccctacagaaagcaggtccggcctgcacaggctaggctggtactgtag

SEQ ID NO: 231081 - DNA, 378 bp, synthetic construct
  misc_feature 1..378: note = Description of Artificial Sequence: Synthetic coding sequence
  source 1..378: mol_type = other DNA
atgagtgacatctcaggacaggtaaccaagcttgtgaagaactatagatcacacgaggcgctgctcatgctgccctcccggttgttctaccacagggagctcgaggtgtgcgctgatccaacagttgtgaccagcctcctaggatgggagaaactgccaaaaaagggtttcccgctgatatttcatggagtccgaggcagtgaagcgcgagaggggaagtctcccagttggttcaacccagctgaggccgtgcaggtactgcggtactgttgtctcttagcgcattcaatcagctcacaggtgagcgctagtgatatcggggttatcaccccgtataggaaacaagtcagacctgcacaggctcggctcgtgttgtag

SEQ ID NO: 231082 - DNA, 1017 bp, synthetic construct
  misc_feature 1..1017: note = Description of Artificial Sequence: Synthetic coding sequence
  source 1..1017: mol_type = other DNA
atgttccgcgtcggccatttcacccacgtgtttgtggacgaagccggacaggcctcagaaccggaatgcctgatccctctgggactaatgtcagatatcagcgggcagattgtgctggcgggagatccaatgcaactgggccctgtaatcaagtctagactggctatggcatatgggctgaatgtgtcctttttggagcgcctgatgagcaggcccgcttatcagcgcgacgaaaacgcctttggcgcttgtggcgcacataatcccttgctggttaccaaattagtcaagaactatcgatcacacgaagcgctgcttatgttaccctccagactattctatcaccgtgaactcgaggtttgtgctgatcctacggtcgtgacttccttgctaggctgggaaaaactgcccaagaaaggctttcccctaatattccatggagtcagagggagtgaggctcgagagggcaaaagcccctcttggtttaacccagcagaggcagttcaggtgctgcggtattgttgtttactggcccactctatttctagccaggtctctgcgtctgatattggggtaatcactccataccgcaagcaagttgagaaaattaggatcctcctgcggaacgtggacctgatggatataaaagtgggatcagtggaagagtttcaaggacaagaatatttggtaatcattatttcgacagtccgcagcaacgaggataggtttgaagatgacagatactttctgggttttctatccaactcgaagagattcaatgttgcaattacacgccctaaggccttacttatagtgctggggaatcctcatgtccttgtgcgcgacccatgctttggggctttactggaatacagcatcaccaatggcgtctacatggggtgcgatctgcctccggcactgcagtctctgcagaattgtggggagggcgtcgcagacccctcctacccagtggttcctgagagcactggcccagaaaagcaccaggagccgagctag

SEQ ID NO: 231083 - DNA, 3498 bp, synthetic construct
  misc_feature 1..3498: note = Description of Artificial Sequence: Synthetic coding sequence
  source 1..3498: mol_type = other DNA
atgctaagcttggccgctaaactggtcgcctttttttggaggaccgccgacacccctcgggaggaggctggacaattggagccggaactggccgagggagacacgaaacttaaaaccgttcggggagtcgttacacggtattgctccgattatggcatgatcgacgacatgatttactttagctctgacgccgtgacctctcgcgtactgctgaacgtaggacaggaggtaatcgccgtggtggaggaaaataaagtcagcaacggtttaaaggctattagggtggaggctgtcagtgataaatgggaggatgacagcaggaatcacggctccccctccgattgcggccctagagttttgattgggtgtgttaccagcctcgttgaaggtgccggatgcatatcacagacgacttatttttcgctcgagtctgtgtgcgaaggcttcgagccctgcaaaggcgactgggtggaagctgaatatcgcattaggccaggtacatggagcagtgaagccacatccgtgaagcctctacgttacaaacgtgtggataaagtgtgcatttcgtctctctgtggcaggaacggcgtgctggaggaaagcatcttctttacactcgacagtctcaagcttccggatgggtacacgccacgacgcggtgacgtggtcaatgcagtagtggttgagtcatctcaatcctgttacgtgtggagggccctgtgcatgaccttggtcaaaagacgagatgccgcacccgtacatgaagccactcatttctatggcaccattttactgaagaacaaaggcgacatcgaagtcacccaggtgacccactttgggaccctcaaggaggggagatctaagacaatggttatctggatcgagaacaaaggagatattcctcagaatctcgtatcctgtaaactagccggatgggacaagagtaagcagtttcgttttcaaatgctagacaaggatcagatgtgccccgtcgtttccttcgttagcgtgcccgagaaagagaactcatcagatgaaaacatcaactctcttaactcccacactaaaaataagacttcccagatgtccgagagcagtcttgtgaataaccgcggaattagtcccggagattgcacttgcaaaggagaaaatggcgagaaggacaacatactcagcagaaagcaaatgaccgaaccagaacctgggggtctggtgccacctggaggcaagacgttcatcgtggtgatatgcgacggcaagaatccaggcaggtgcaaagaattgctgctgctttgtttttccgatttccttatcggcagataccttgaagtcaatgtaatctctggcgaggaatcactcatcgccgctagagaaccattttcttggaagaagctgaagagttcccaggcgctgaccagcgccaaaaccaccgtcgtggtcacagcccagaagaggaattcccgccgtcaactgccaagtttcctgccacagtaccctatccccgaccggctacgcaaatgcgtcgagcagaagattgatatccttacttttcagcccctgctggcagagctcctgaacatgagcaattacaaggagaagttctccacgctgctgtggctcgaggagatctacgcagagatggaactcaaggagtataacatgagtggcattattttaagacggaacggcgatcttcttgtgctcgaagttcctggacttgcagaaggtagaccatcgctgtacgccggagataagctgattctaaaaacacaagagtataatggacatgccatagaatacatcagttatgtcaccgaaattcacgaggaggacgtcactctgaagattaaccccgagtttgaacaggcatataactttgaacctatggacgttgagtttacctacaaccggacaacctcaagacggtgccactttgcccttgagcacgtaatccacctgggcgttaaagttcttttcccggaagaaattatcttgcagtcaccccaggtgacgggaaattggaatcatgcccaggatacaaaatcctccggccagtccacttctaaaaagaatagaaagacaatgaccgaccaagccgagcatggcacggaggagaggcgggtcggagacaaggaccttccagtcctggcacctttcactgcagagatgtcagattgggtggacgagatccagactccaaaagctcgaaagatggagttctttaaccctgtgctaaacgaaaaccagaaactcgctgttaaacgcatactcagtggcgactgtcggcctctcccctatatcctcttcggcccaccgggaacaggaaaaaccgtgaccatcattgaggccgtattgcaggtgcacttcgcactacctgactcccggattttagtgtgcgctccaagcaactccgctgccgacctggtttgcctgcgactccatgagtctaaagttctgcaaccagcaacaatggtccgcgttaacgctacgtgtcgctttgaagagatcgtgatcgacgccgtgaagccttactgccgagacggagaagacatatggaaggccagtcggtttagaataataataactacatgcagttcctctggactgttttaccagattggggtgcgagtggggcactttacacacgtgttcgtcgatgaggcaggtcaggcctcggagcctgagtgcttaataccccttggactgatgtctgacatctcgggccaaatcgtgctggcaggtgaccccatgcagctaggaccagtgatcaagagccgcctggcaatggcttacggcttgaatgtgtccttcctggaacggctgatgtcacgcccagcctatcagcgcgatgagaatgccttcggcgcttgcggtgcgcataaccccctactggttactaagcttgtgaagaactaccggagccatgaagccctgttgatgcttccatcgcggttgttttatcatcgcgagcttgaagtttgcgccgatccgaccgtcgtgacgtccctgctgggctgggagaaactccctaagaagggtttcccactgatctttcatggtgtccgcggttctgaggctcgcgaaggcaagtctccaagctggttcaatcccgctgaagctgtgcaggtgctgaggtattgctgcctcctagcacatagcatttcgagtcaagtatctgctagcgacattggcgtcattaccccttaccgtaaacaagtggagaagatcaggatcctcctgagaaatgtggacctcatggacataaaagttggtagtgttgaggaatttcagggccaggagtacctagtgattattatttcaaccgatccttgttttggagcactgctcgagtactccatcactaacggagtctacatgggctgtgaccttccacctgctctgcaatctcttcagaactgtggcgaaggcgtcgccgatcctagttaccctgtggtgccggaatcaacaggcccagagaaacaccaagagccaagttag

SEQ ID NO: 231084 - DNA, 636 bp, synthetic construct
  misc_feature 1..636: note = Description of Artificial Sequence: Synthetic coding sequence
  source 1..636: mol_type = other DNA
atgtcgttccttccagtgcgaagcgttatcggcggtggcgataccaaactgaagacggtgagaggggtcgtaacccgctattgttccgattacgggatgatcgacgacatgatctacttcagttctgacgcggtaacctctagggttctgttaaacgtgggccaggaagtgatcgccgtggtggaggagaacaaagttagtaacggcctgaaagcaattcgcgtcgaagctgtttctgataagtgggaggatgactccagaaaccacgggtccccctctgattgcggcccaagggtgctgatcggctgtgtgacctccctggtggagggcgctggatgtattagccagactacctactttagtctggagtcagtctgcgaggggtttgaaccctgtaaaggtgactgggtagaggcggagtataggattaggcccggtacgtggtcaagtgaggccacgtccgtcaaaccgctcagatacaagcgggtggataaggtcgcatgccgtctggtcgctccgctctgcgcctcaggtcgcccagccatccgcggtaatttgcacggacccggatttagctgcatgtgctggaaacccggtaagatcaaactgtgtcacggccagagagaaaagaagtag

SEQ ID NO: 231085 - DNA, 3498 bp, synthetic construct
  misc_feature 1..3498: note = Description of Artificial Sequence: Synthetic coding sequence
  source 1..3498: mol_type = other DNA
atgtccttcctgccggtgaggagtgtgatcggcggaggtgacaccaagctgaagacagtaaggggtgttgtgacaaggtattgctcagactacgggatgatcgatgacatgatttattttagctctgacgctgttacctctcgggtcttgctcaacgtggggcaggaggtgatcgccgttgtggaggagaataaagtgagtaatggcttgaaggctatcagagtggaggccgtgtctgacaagtgggaagacgactccagaaatcacggttctccaagcgactgcggccctcgagttctgatcggctgtgtgactagcctggtggagggtgcagggtgcattagtcagaccacttatttttctctcgagtccgtttgtgagggtttcgagccttgcaagggcgactgggtagaggccgagtatagaattaggccgggtacctggtcctctgaggccacaagcgtcaagccactgcgatacaaacgggtggataaggtttgcatatcgtccctgtgcggtcggaacggagtgctagaagaatccattttctttaccctggactccctgaagcttcccgacggatacacgcctcggaggggagatgtggtgaatgctgtggtggtcgagtcatcgcaaagctgctacgtgtggcgggcactgtgtatgaccctggtgaaaaggcgagatgccgcaccagtccatgaggcgactcacttctatggaacaattcttctgaaaaacaaaggcgatatcgaggtgacacaagtcacccacttcggcaccctgaaagagggaagaagcaagacgatggtgatctggatcgaaaacaaaggcgatatccctcagaacctggtcagctgcaagctggctgggtgggataagtccaagcagtttaggtttcagatgctggacaaggatcagatgtgtccggtcgtgtcattcgtatccgttccagaaaaagagaatagcagcgatgaaaatatcaactccctgaattcacatacgaaaaataaaacgtcacagatgtctgagagtagtctagtgaacaatcgcggaatcagtccgggagactgcacatgcaagggcgagaacggcgaaaaggacaacattctgagtcgcaagcagatgacagaacctgaacctggaggcctggtccctccaggtgggaaaaccttcatcgtcgtcatatgtgacgggaaaaatcccggtcgatgcaaggaactccttctgctatgcttttctgattttctcattgggcgttacctggaggtcaatgtgatctcaggggaagaatcgcttattgccgctagggagcccttcagctggaaaaagctcaagtcgtcacaggcattaacatccgcaaaaacaacggtggtggtgacagcacagaagagaaattccaggcgtcagcttcctagcttcctccctcagtatccaattcctgatagactgcgaaaatgtgtggagcagaaaattgacattctgactttccaacccctactagctgagctgctcaatatgagcaactataaggagaaatttagcaccttactctggctcgaggagatctacgccgagatggaactcaaggaatacaacatgagcggaatcatcctccgccgaaacggcgacctgctcgtcctggaagtcccaggccttgcagaaggtagaccctcattgtacgctggcgataaactgatactgaagactcaggaatacaacggccacgccatcgagtacatcagttacgtgaccgagatccacgaggaggatgtgacacttaagatcaacccagagttcgaacaggcctataatttcgaacccatggacgtcgaatttacttacaacaggaccacttcccgacgatgccacttcgcacttgagcacgtgatccatcttggggttaaggtgttattccccgaagagattatccttcagtccccacaagtaacaggcaattggaatcacgcccaggacaccaaaagctctgggcaaagcactagcaaaaagaaccgtaagaccatgactgaccaggctgaacatggaaccgaagaacgtagggtaggcgacaaggatctaccagtgctggcaccatttaccgcggagatgtcagactgggtcgacgaaatccagacaccaaaggcccgtaagatggagttctttaaccccgtcctgaatgaaaatcaaaagcttgccgtcaagcgtatcctgagcggcgattgtcgacctctgccgtacattctgttcggacctccaggcacaggaaaaaccgttacgatcatcgaggcggtgcttcaggtgcacttcgcgttacccgactcacggatcctcgtgtgtgcaccgagcaactccgcggcagacctggtttgcttgagactgcacgaatccaaagttctgcaacccgcaaccatggttagagttaacgccacctgtcgcttcgaggaaatcgtgatcgatgctgtgaagccttactgtagagacggagaggatatctggaaggcaagcagatttcgcattatcattactacatgcagtagctctgggctgttttaccagatcggcgtccgagtgggccatttcacacatgtgttcgtagacgaggccggtcaggcgtctgagcccgagtgtttgatcccacttggtctcatgtcggacatctctgggcagattgtcttggcgggagatcccatgcaactgggacccgtgatcaagtcccgtctcgctatggcttacgggctgaatgtgagtttcctggagcgactgatgtcgcggcctgcctatcagagggatgagaacgcttttggcgcttgtggggcacacaaccctctgctggttaccaaactcgttaagaattacagaagccatgaggccctacttatgctgccatccagactgttttaccatagggaactggaggtatgtgctgatccgaccgtggtgactagcctgctggggtgggaaaagcttccaaaaaaggggtttcctctcattttccatggggtgcggggaagcgaagccagagaaggcaagtcaccaagttggttcaatccagctgaagctgtgcaggtgctcaggtactgttgtttgctggctcattctatctcgtctcaggtctcagcttcggacatcggggttatcaccccttacagaaaacaggtggagaaaatccgaatcctgctgagaaatgtggacctgatggatatcaaagtgggatctgttgaggagtttcagggtcaggaatacctcgtcatcattataagcacagtgaggtcaaatgaagatcgctttgaagacgaccgttactttctaggattcctgtccaacagcaagcggttcaacgtggccatcacccgccctaaagccctcctcattgtgcttggtaatccccatgttctggttcgactgtggcgtggcggaggcaggccactgttgcccagtggggctaggatccataggacgcgggaggcctccggggcacagttgatctgctccgggtag

SEQ ID NO: 231086 - DNA, 3636 bp, synthetic construct
  misc_feature 1..3636: note = Description of Artificial Sequence: Synthetic coding sequence
  source 1..3636: mol_type = other DNA
atgctgtctctcgcggctaaactggtggcatttttctggagaacagctgatacccccagagaagaagcaggccagctagagcctgaactggctgagggagataccaagcttaagaccgtcagaggggtagttacccgatattgttccgattacggtatgattgatgatatgatctacttctcatccgatgccgtgaccagcagagttctgttgaacgtgggccaggaagtcattgctgtggtggaggaaaataaagtgagcaacgggctgaaagccatccgggtggaagctgtgtccgacaagtgggaggacgacagcaggaatcacggctccccatcagattgtggcccaagggttctcatcgggtgtgtcacttccctggtggagggcgctggatgcatttcccagacaacatacttttctctcgaaagtgtctgcgaagggtttgaaccctgcaaaggcgattgggtggaagctgagtatcggatacggccagggacgtggtctagcgaggcaacctcagtcaagccgttgagatacaagcgtgtcgacaaagtttgtatttcttctctgtgcggtaggaatggcgtgcttgaggagagcatatttttcacgcttgacagtctcaagctgccggatgggtatactccgaggagaggagatgtggtaaatgccgtggttgtcgagtccagccagagctgctacgtgtggagggccctgtgtatgactctggttaagcggagagacgctgccccagttcacgaggctacccacttttacgggacaatactgctaaagaacaagggcgatatcgaggtcactcaggttacacatttcggaacccttaaagagggccgttctaagacaatggtcatttggatcgaaaacaaaggtgatatcccacagaacctggtgtcctgcaagctggcaggatgggataaatccaagcaattcaggttccagatgctggataaggaccagatgtgcccggttgtgtcgttcgttagcgtgcccgagaaggaaaactcttcagacgagaatattaacagccttaacagtcacacaaaaaataagacttcccaaatgagcgagtcaagtctggttaataaccgaggcatttcccctggtgactgcacgtgcaagggcgagaacggtgaaaaggacaacattctcagccgtaaacagatgactgagccagagcccggaggactggtgcccccaggtggtaagacattcattgtggtaatctgcgacggaaagaatcccggaaggtgcaaggagctgctattattgtgtttttctgactttctgatcggcaggtatctggaagtgaatgtgatttccggcgaagagagccttatcgcggctcgagagccgttctcatggaagaagctgaagagctctcaagctttaacctccgctaaaactacagtagtcgtgactgcccagaagagaaatagccgacgccagttgccttccttcttgcctcaatatcccatccccgataggctccgcaagtgtgttgaacagaagatcgatatcctgacattccagcctcttcttgccgaactgctcaacatgagcaactataaagagaaatttagcacgctcctgtggctcgaagagatttacgcggaaatggagctaaaagaatataacatgtcaggcatcattctccgtagaaacggtgatctccttgttcttgaagtgcctgggttggcagaagggaggccatcattatacgcaggcgacaagcttattctgaagacccaggaatacaacggacatgccatcgagtacatctcttacgtgacagagatccatgaagaggatgttaccttgaagattaatccggagttcgaacaagcctacaactttgaaccgatggatgtggaatttacttacaatcgcacgacatctcggcgatgccacttcgcactcgaacatgtgatacacttgggggtcaaggtgttgttcccagaggagattattctccaaagtccgcaggtaaccggtaattggaaccacgcccaggatacaaagtctagtgggcaatccactagcaaaaaaaatagaaaaacaatgacagaccaggccgagcacggcaccgaggagcgccgagtgggcgataaagatctgccggtgttggccccttttacagccgagatgagtgattgggttgacgaaatccagacccccaaggcccgaaaaatggagttctttaatcccgtgctcaatgagaaccagaagctggccgtgaagaggatcctgtccggggactgccgccctctgccttacatcctgttcggccctcccggtacgggcaaaacagtaacaattatcgaggcggtgctgcaggtgcatttcgcccttcccgactcgcgtatcctggtttgcgccccttctaactccgccgcagacctcgtctgcttacggctgcatgaaagtaaagtcttacaaccggctacaatggtgagggttaacgctacatgccggtttgaagagatagtgattgacgccgtgaaaccttactgcagggacggcgaagacatctggaaggcttcccgattccggatcatcatcacgacatgcagttcttccggattattttaccagattggagtcagagtggggcacttcacccacgttttcgtggacgaggcgggacaggcaagcgaacctgagtgcctgatccccttggggctcatgtcagatatttctgggcagattgttctggccggagatcctatgcaacttggaccagttatcaagtctcgcctcgcaatggcatatgggctaaacgtctcctttttggaaaggctcatgtccaggcccgcataccagcgagacgaaaacgcgttcggtgcctgcggtgcacacaaccctctactggtaacaaaactggtcaagaattatagatcacacgaagctcttcttatgctcccttcccggctcttctatcacagggaactggaggtctgcgcagatcctaccgtggttacctccttgttaggatgggaaaagcttccaaagaaagggtttcctctgatctttcacggcgtgcggggatccgaggccagagaaggcaagtctccaagttggtttaaccccgctgaagcagtacaggttctccgatactgttgtcttctcgcgcactcaatatcttcacaggtctctgcaagtgatatcggcgtgatcaccccctacaggaaacaggtggagaaaatccggattctcctgcgcaatgttgacctaatggatatcaaggtaggctctgtcgaggagtttcagggccaggaatatcttgtaattattatttccacagttcgctctaatgaggatcgcttcgaggacgaccgctactttctaggttttctgagcaactccaagcgctttaacgtcgccattacacggccaaaggctctcctgattgttctgggaaatccccacgtcctcgtgcgagacccctgctttggagctctgcttgagtactctattacaaacggggtatatatgggctgcgacctaccgccagcactgcagtccctccaaaactgcggggaaggagtggctgacccctcttacccagtagtgcccgagtctacagggcctgagaagcaccaggaaccttcctag

SEQ ID NO: 231087 - DNA, 483 bp, synthetic construct
  misc_feature 1..483: note = Description of Artificial Sequence: Synthetic coding sequence
  source 1..483: mol_type = other DNA
atggctgccgaaagaaaaacgcgtctctctaagaacctgttgcggatgaaatttatgcagagaggcctggattcagagacgaagaaacaattggaggaagaggaaaaaaagatcatctctgaggagcactggtacctggacctccccgagttgaaagagaaggagtctttcatcatcgaagagcaaagtttcctgctgtgcgaggacttactctacgggagaatgagtttcaggggatttaaccctgaggtggagaagctcatgctgcaaatgaacgctaagcataaggctgaagaagtggaagatgaaactgtggagttagatgtgagcgatgaggagatggctcgaaggtacgagacgcttgtggggacaataggcaaaaagttcgcacggaagcgtgatcacgcaaattacgaggaggatgaaaatggcgatatcacccccattaaggcaaaaaaaatgttcctgaaaccacaggattag

SEQ ID NO: 231088 - DNA, 627 bp, synthetic construct
  misc_feature 1..627: note = Description of Artificial Sequence: Synthetic coding sequence
  source 1..627: mol_type = other DNA
atgaaagcatgtaagcgcggtaactccgacattgtgagattggtgatcgagtgtggggcagattgcaatattttgtctaagcaccagaattccgccttgcatttcgccaaacagagtaataatgtgttggtgtatgacttactgaagaatcaccttgagactctttccagagtcgccgaggaaacaattaaagactacttcgaggcccgtttagcgttactcgaaccagtgttccctattgcttgccacaggctctgcgagggacccgactttagtaccgacttcaattataagcctccacaaaacatccccgaaggttccgggattcttctgtttatttttcacgctaactttctgggaaaagaagtgatcgcacgcctttgcgggccatgctcagttcaggcagtagtattgaacgataaatttcagctgcccgttttcctgacaggctccagatcagttgtccaagccggtgtccagtggaggggccttcagttaacgggagtcctcacatcccaggctcaagccatcctccctccccaaccgcctaactatctgggcctcaagatgaccgtgatcctgttcactcactctgccctgttacaagtcccaattaacagcagttag

SEQ ID NO: 231089 - DNA, 2583 bp, synthetic construct
  misc_feature 1..2583: note = Description of Artificial Sequence: Synthetic coding sequence
  source 1..2583: mol_type = other DNA
atggaacaagtggccgaaggagcccgagtgactgctgtgcctgtatcagcggctgactcaaccgaggaactagccgaagtggaagagggcgtgggcgtggtgggcgaagataacgatgcagctgctcgtggcgctgaggcatttggggactcagaggaagacggtgaggatgtgtttgaggtcgagaaaatcctcgacatgaaaacagaggggggaaaggtgttgtataaggtgagatggaaaggttataccagtgatgacgacacctgggagcccgaaatacacttggaggattgcaaagaggttctgctcgagttccggaaaaagatcgccgaaaacaaagcaaaggctgtccggaaagatattcaaagactcagcctgaataatgatatttttgaggctaattcggatagtgaccagcagtctgagactaaagaggatactagcccaaagaaaaaaaagaaaaaacttcgccagcgcgaagagaaatcacctgatgaccttaaaaaaaaaaaagcaaaagccggaaagttgaaggacaagtcgaagcctgatctggaaagttctctcgagtcactggttttcgacctcagaactaagaaacggatctccgaggccaaggaggaactgaaggagtccaaaaaaccgaaaaaggacgaagtgaaagagactaaggagcttaaaaaggtaaaaaaaggagaaattagggatttaaaaaccaaaacacgggaggaccccaaggagaacagaaaaaccaagaaagaaaagttcgtggaatcgcaggttgaatcagaaagctccgtgctgaacgacagcccatttcctgaagacgactctgaagggcttcactccgactcccgcgaagaaaaacagaacactaagagcgccagagaacgcgctggacaagacatgggcttggagcacgggttcgaaaagccacttgactccgccatgtccgctgaagaggacacagatgtgcgcggtagaagaaagaaaaaaactccgagaaaggctgaagacacgcgggagaaccggaaactggaaaacaaaaatgccttcctcgaaaaaaagaccgtgcccaagaaacaaagaaaccaggaccgctccaaaagtgctgccgaactcgaaaagctaatgcctgtttctgctcaaacacccaaagggaggaggttgagcggggaggaacgaggattatggtctaccgacagcgccgaagaagacaaggaaacgaagcggaatgaaagcaaggaaaagtaccaaaaacggcacgactcagacaaagaagagaagggcaggaaggaacccaaaggcctgaaaacattaaaagaaatacggaacgcatttgacctgtttaaactgacacccgaagagaagaacgatgtcagcgaaaataacaggaagcgcgaagaaatccctctggactttaagaccatcgatgatcacaaaactaaagaaaacaagcagtccctaaaggagcgacgcaacacaagagatgagactgacacttgggcatatattgcggcagagggggaccaggaggtgctggacagtgtgtgccaagctgacgaaaacagcgatggacggcaacagattctgtctttgggcatggacctgcagctggaatggatgaagttggaggacttccaaaagcacttagacggtaaagacgagaatttcgcagccacggacgcgattccgtctaatgtgctgagagatgcagtgaagaatggggattacatcacggtgaaggtagcattgaactcaaacgaagaatataacctcgaccaggaggacagcagcggcatgacattagtgatgcttgcagctgcgggtggccaggatgacttattacggctgctcattaccaagggagccaaggtcaatggcaggcagaagaacgggactacagctctaatccatgcagctgagaaaaatttcctgactactgtcgcaatcctgctggaggccggagcctttgtaaacgtgcagcaatcaaatggcgaaaccgcactgatgaaagcctgcaagagaggaaatagtgatatcgtgcggttggtgatagagtgcggcgctgactgtaacattctgtccaagcaccagaactcagcactccacttcgctaagcagtctaataatgtactggtgtatgatctactcaaaaaccaccttgagactctgtctcgggtagcggaagaaactatcaaagactatttcgaggctcgcctggctctgctggaacccgtcttccccatagcgtgtcaccgcctctgcgagggtccagatttctctaccgacttcaattacaaaccaccgcaaaatatcccagagggttcagggatccttcttttcatctttcatgccaacttcctgggtaaagaggtcatcgcccgactctgcgggccttgtagcgttcaggctgtcgtactcaatgataaattccagctccccgtgttcctggactctcactttgtgtactccttcagtcccgtggcaggccctaacaagctatttattcggctgaccgaagctccttctgccaaagtcaaactgcttatcggtgcatatcgcgttcagctccagtag

SEQ ID NO: 231090 - DNA, 2604 bp, synthetic construct
  misc_feature 1..2604: note = Description of Artificial Sequence: Synthetic coding sequence
  source 1..2604: mol_type = other DNA
atggaacaggtggccgagggggctcgcgttaccgcggtgccagtaagcgccgctgactcgaccgaagaattggctgaggtcgaggaaggagtgggcgtggtgggcgaggacaatgacgctgctgccagaggggctgaggcttttggcgatagcgaggaagatggagaggatgtgtttgaggtagagaaaattctcgacatgaaaaccgaagggggaaaagtgttatacaaagtgcgctggaaagggtatacctcagatgacgacacctgggagcctgaaatccacctggaggactgcaaggaagttctgctcgagttcagaaaaaagatcgctgagaacaaggccaaagctgtgaggaaggacatccagcgcctcagcttgaacaatgacatattcgaagccaacagcgattcagaccagcagtctgaaacaaaagaggacactagccctaaaaagaagaaaaagaaactgcgacagagagaggaaaagtctcctgatgacctcaagaaaaagaaggccaaggccggaaaactgaaggacaagtctaaacccgacttagagagtagcctcgagtccctggtgtttgatcttcggactaagaagcgtatttcagaagccaaagaggagttgaaggagagcaagaaacctaagaaggacgaagtgaaggagactaaggagctgaaaaaggtaaagaaaggcgaaattagagacttgaaaactaagacccgcgaagatcccaaggaaaacaggaagacaaaaaaagagaaattcgtcgagtcgcaggtggagagcgaatcttcagttctgaatgattcaccgtttcctgaggacgactcagaggggctgcattccgactcccgggaggaaaaacaaaatacgaaaagcgccagagaaagagctgggcaagacatggggctagaacatggatttgaaaagccactggatagcgccatgagtgccgaggaggacactgacgtgcggggtaggagaaagaaaaagactccccgaaaggccgaagacacacgtgagaacaggaagcttgagaataaaaacgctttcctggaaaagaagaccgttccaaagaagcaacgcaaccaggaccggtccaaatccgcagccgaactggagaaactaatgcccgtgtccgcccagacaccaaaagggcgacggctgtccggcgaggagaggggcctttggagcactgactctgcagaggaggacaaagaaacaaagcgcaatgagtccaaagaaaagtaccagaagaggcacgactccgataaggaggagaaaggcaggaaggagcccaaggggttgaagacattaaaggagattagaaacgcctttgatctctttaagttgacaccagaggagaagaacgatgtcagtgaaaacaaccgtaagcgcgaagaaattcctttagatttcaaaactatcgacgatcataagacaaaagaaaataaacaaagcctgaaagagaggcggaatacacgcgacgagaccgatacttgggcttacatcgctgccgagggtgaccaggaggtcttggatagcgtttgtcaagcagatgagaatagcgacgggagacagcagattctgagcctgggcatggacttgcagttggaatggatgaagctcgaagatttccaaaagcacctggatggcaaggacgagaacttcgcagcgaccgacgccatcccatctaacgttctcagggacgctgtgaaaaacggtgattacattacggtgaaagtcgctctaaacagcaatgaagaatacaacctagatcaggaagactcctcagggatgaccctggtaatgctggctgccgctggagggcaggacgatctgttgaggctgctcatcacaaaaggcgctaaggtcaatgggagacaaaagaatggaaccactgctttgatccacgcagccgaaaagaattttctgaccaccgtagcaattcttttggaagctggagccttcgtgaacgtccagcaatccaatggggagactgcgctgatgaaggcctgtaagagaggcaacagcgatatagttcggcttgtgatagaatgcggagcagactgcaacatcctgtcaaagcaccagaacagcgcacttcatttcgctaaacagtctaataacgtgttggtctacgaccttttaaagaaccacttggagacactctctcgtgtcgcagaggaaaccattaaggattacttcgaagcaaggctggcactattagagcccgtgttcccgatcgcgtgtcaccgcctgtgcgagggcccagacttttccactgacttcaactataagccccctcagaatatcccagagggaagtggcattttgctctttattttccacgccaacttcctgggcaaggaagtaattgctcgtttgtgcggcccttgctccgttcaagccgtcgtgctcaacgacaaattccaactccctgtctttcttacaggctcacgttcagttgtccaggctggagtgcagtggcggggtctccagctcactggagtcctaacatctcaggcacaggccatcttaccgccacagcccccaaattatttagggctgaaaatgcatgctacaactagcggctag

SEQ ID NO: 231091 - DNA, 1812 bp, synthetic construct
  misc_feature 1..1812: note = Description of Artificial Sequence: Synthetic coding sequence
  source 1..1812: mol_type = other DNA
atggagcaggtggccgagggggctagggtgaccgctgtccctgtcagtgccgctgatagcaccgaagagttggctgaggtcgaagagggagtaggcgtagtcggagaagacaatgacgccgctgcgagaggagcagaagccttcggagattcggaggaagatggggaggacgttttcgaggtagaaaagatcctggacatgaagactgagggcggtaaagttctctataaagtccgatggaaagggtacacgagcgacgacgatacatgggaacccgagattcatttggaggactgtaaggaggtgctgttagaatttcgtaagaagatcgctgagaacaaagccaaagcggtcaggaaggacatccaacggctttcgctgaacaacgacattttcgaggccaatagtgattccgatcagcagtctgagaccaaggaggatacctctcccaagaagaaaaagaagaagttgcgccagagggaagaaaagagcccagacgacctaaagaagaaaaaagctaaggccggtaagctgaaagacaaatccaagccagatctggaaagtagtctggaaagcctggtgtttgacttgagaaccaagaagaggatcagtgaggctaaggaggagctgaaggaatctaaaaaacccaaaaaagatgaggtgaaggaaactaaggagctgaagaaggttaaaaaaggagaaattagagacctcaaaaccaagaccagagaagatcccaaagaaaatcgaaaaacaaagaaagaaaagtttgtggagagccaagtggagagcgagtcttctgtgctcaacgactcgccgttcccagaagacgactcagagggcttacactctgatagccgagaggagaagcagaacacaaaatctgcccgtgaaagggcgggacaagacatggggctcgaacacggatttgaaaaaccgcttgatagtgcaatgtcagctgaggaagacaccgacgttcgaggccgacggaaaaagaagacccctcgtaaggctgaggataccagggaaaacagaaaactcgagaacaaaaacgcttttttagaaaagaagaccgttcccaagaagcaaaggaatcaagatcgaagcaagtccgctgccgagctcgaaaagctcatgcccgttagcgcccagacgcctaaggggcgacggctgagtggggaagaaagaggcctgtggtctaccgatagcgccgaggaggacaaggaaacaaaacggaacgaatctaaggagaaataccagaagcggcatgactccgataaggaggaaaaaggtcgcaaagagccgaaaggcttgaaaaccttgaaggaaattcggaatgccttcgacctctttaagcttacccccgaggagaagaatgacgtgtctgagaacaatagaaagcgcgaagaaatccctctggattttaaaaccatcgacgaccacaagacgaaggaaaacaaacagtccttgaaggagcggagaaatactcgagatgaaaccgatacatgggcctacatcgccgcagagggggatcaagaggtcttagactccgtgtgccaagctgatgaaaattccgacggacgacaacagatcctctccctgggaatggatttacagctggaatggatgaagttagaggacttccagaagcatctggatggaaaagacgagaacttcgcagcgacagatgccatacctagcaacgtactccgagatgccgtgaaaaaaaaaaagaagaaaaaatttctcggcacgtacaccttttttttatttttctttttcgaaaagccggacttagtgccgttattttag

SEQ ID NO: 231092 - DNA, 3087 bp, synthetic construct
  misc_feature 1..3087: note = Description of Artificial Sequence: Synthetic coding sequence
  source 1..3087: mol_type = other DNA
atgggcttcttttcactttcgtcagagcgaaacgaatccgtaatccactacccggagtcgacagaaccggaaattcaacaagagatgtcgacatcccaaccagattgcaacgttgattcctgttctgtttcctctggctatgggaccttctgcattagtgaactgaatctgtacaagagcaaggatcctaaagagtttatggagcacatcgatgtccctaagggccagtacgtggctcccgcagttccagccgaatccctggtggacggcgtcaagaatgaaaacttttacatccagacgcctgaggagtgtcatgtgtcgttgaaggaagacgtgtcgatatctcctggtgaatttgaacacaatttcctgggcgagaataaagtgtccgaagtctactctggaaagaccaattccaatgccatcaccagttgggcgcaaaagctgaagcagaatcagcctaaaagggcccatgttgaagacggcggaagtaggtctaaacaaggtaatgaacagagtaaaaagactcctattgagaagagcgatttcgctgccgcaacacatccaagagccttttacctatccaagccagatgaaacaccgaatgcctggatgagcgatagcggaaccggtctgacatactggaaactggaggagaaggacatgcaccactcattgcccgaaacactggaaaagacttttatttcattgtcttcaaccgacgtgtctccaaatcaatctaatacttcaaatgagatgaagctgcccagtttaaaagatatttactataagaaacaacgggagaataaacagcttccagagcggaacctaacctcggcgagcaatcctaaccatcccccagaagtgcttacactggaccctacattgcatatgaaaccaaaacagcagatcagtggcattcagccacatggcttgccaaatgcccttgatgaccgcatctcgttttcccctgactccgtgttggagccttcgatgagctccccttcagacattgatagctttagccaggctagtaatgtgacttcccaactccctgggttcccgaagtatccctctcatacaaaagcatcacccgtggatagctggaagaatcagacgtttcagaacgagtcaaggacatcttcgacctttccttctgtttacacaataaccagtaacgacatctcagtaaatacagtggacgaggagaacacagtgatggtggccagtgcgtcagtatcccaatctcagcttccagggaccgccaatagcgttcctgagtgtataagtttaacatccttggaggacccagtgatactgagcaaaatcagacaaaacttaaaggaaaagcatgccagacacattgccgaccttcgggcatactatgagtcggaaatcaattcgcttaagcagaagctggaggccaaagagatttccggggtggaggattggaagattactaaccagattttggtcgatcggtgcgggcagcttgatagtgctctgcatgaggcaactagtcgggtgaggactctggagaataaaaacaatctgctggaaattgaagttaatgacctcagggagagatttagcgcagcgtccagcgccagtaagattctgcaggaacgcatcgaagagatgagaacgtcgtcaaaggagaaagacaatacgatcattcggctgaagagtcggctccaggacttggaggaagcctttgaaaatgcatataagcttagcgacgacaaagaggcgcaactcaaacaggagaataagatgttccaggatttgctgggggaatatgagtccctaggcaaggaacaccggagagtgaaggatgccctgaacactaccgaaaataagctgctcgacgcatacacacagatctctgatcttaaacggatgatttctaaacttgaggcacaagtgaagcaggtcgaacatgagaatatgctttcactgcgtcataattcccggattcacgtgcgcccttcaagggccaacacgctcgctaccagtgatgtttcccgcaggaagtggctgatccctggcgcagagtactcgatatttacggggcaacctctggatacccaagatagcaacgtggataatcaattagaagagacgtgtagcctcggacaccgatccccactggagaaggatagctcacctgggtcctcttccacctccctgctgatcaagaagcagagagagactagcgacacccccataatgagggccctgaaggaactggatgaggggaagatcttcaagaactggggtactcagaccgagaaggaagacacaagtaacattaacccgaggcagaccgagacttccgttaatgcctcacggtccccagagaaatgcgcccagcagcgacaaaagcgcctgaactcagcctcccagcggagttcttcccttccgcctagcaaccggaaatcatccaccccaaccaaacgcgaaataatgctgactcccgttaccgtggcgtattctccgaagcggagccctaaggaaaatctctctcccggtttttcccacctgctgagtaagaacgagtcttcccctattagattcgatatactcctcgacgaccttgataccgtgcccgtatcaactctccagcgtaccaacccaaggaagcaactgcaatttttgccactagacgactcagaggagaagacctatagcgagaaggctactgacaatcacgtgaatcactcttcctgcccggagcccgttcctaacggagtcaagaaggtgtcagtcaggacagcatgggagaaaaacaaaagcgttagttacgaacagtgtaaacccgtgagtgtcaccccccaaggaaatgacttcgaatatacagctaaaattcggactctggctgagaccgagagatttttcgatgagcttaccaaagagaaggatcagatcgaagccgcactcagccgtatgccctctcctgggggtcgaatcacccttcagacccggctcaatcagacaccccaaatatgtgaggaatcctcacacaagtgtgcttttgcgggtcattacgtgccttgccatttgtacgattacaggttccaaggctag

SEQ ID NO: 231093 - DNA, 3096 bp, synthetic construct
  misc_feature 1..3096: note = Description of Artificial Sequence: Synthetic coding sequence
  source 1..3096: mol_type = other DNA
atgggcttctttagcctctcttcagagcgcaacgaatctgtgattcattatcctgaatctaccgaacctgagatccagcaggaaatgtcgacctcgcagcctgattgtaatgtagacagctgtagcgtttcctccggttatggcaccttttgcataagcgaactgaatctctacaagtcgaaggaccccaaggagtttatggaacatatcgatgtgccgaaagggcagtatgtggccccagccgtacccgctgagtcattagtcgatggggttaaaaatgaaaacttctacatccaaacgcctgaggagtgccatgtgtctctgaaagaagacgtgtctatctccccaggtgagttcgaacacaatttcctaggcgaaaacaaagtctctgaggtctattcgggaaaaacgaactctaacgcaatcactagctgggctcaaaagctcaaacagaatcagcctaagcgcgctcacgtggaagatggaggaagtaggtccaagcaaggaaatgagcaaagcaagaagactcccattgaaaagagtgattttgccgcagctacacatccacgagcgttttatctgtctaaacccgatgagactccaaatgcctggatgagtgactcagggaccggactgacgtattggaagctggaagaaaaggatatgcaccactctttgcctgaaacgctggagaagaccttcattagcctctcctcaacggatgtgagcccaaaccagagtaataccagtaatgaaatgaagctcccaagtttgaaagacatctactacaaaaaacagcgtgaaaataagcagttaccagaacgaaatctgacctcagcatccaaccccaaccacccacccgaggtcttaaccttagacccaacactgcatatgaagccaaagcagcagatctccggaatacaaccacatggcctgcccaatgctctggacgatcggataagcttctctccagacagtgtccttgagccttccatgtcctcgccatccgatattgattccttctctcaagccagtaacgtcacctcccagcttcctggcttccccaagtaccctagccacacaaaagccagccccgttgactcttggaagaatcaaacatttcagaacgaatctagaaccagctcaaccttcccatctgtctacactattaccagtaatgacatctctgtgaatacagtggatgaggaaaatactgtcatggtcgcaagcgcttcggtgagtcagtctcagcttcccggaactgccaacagtgtgccggaatgcatcagtctaacctccttagaggaccccgtaatcctaagcaaaataagacaaaatctcaaggaaaagcacgctagacatatcgccgacctccgcgcttactatgagtccgagattaattcgctcaagcagaaactagaagccaaggaaatcagtggagtggaagattggaaaattactaatcaaattttggttgatcgatgtggccaactcgattccgccctgcatgaagccacctcccgcgttcgtactctggaaaacaagaataacctgctggagatcgaggttaacgacctacgcgaacggttcagcgccgctagtagtgccagtaaaatcctgcaggagcgcattgaagaaatgcgaaccagtagtaaggaaaaggataatactattatccggttgaagtctagactgcaagatctagaggaggcttttgaaaacgcctataagctcagcgacgataaagaggctcagttgaagcaggagaacaagatgtttcaagaccttttaggcgagtacgagagcctgggcaaggaacatagacgagttaaagatgctcttaataccaccgagaacaaactgctggacgcatacacacagatttccgatctgaagaggatgatttcaaagttagaggcacaggtcaagcaggtggaacacgagaacatgttatcactgcgccacaattcccggattcatgtgagaccctcacgtgcgaacaccctcgccacttctgacgtttctcgccgaaaatggcttatccccggagctgagtactctattttcacaggccagccccttgacacccaggactcaaacgtggacaaccagctggaggaaacctgttcacttggacaccggtccccccttgagaaagatagcagccccggatcaagcagtaccagtttactgatcaagaagcagcgcgagacatctgacacccctattatgagggcgctcaaagaattggacgaaggaaagatttttaagaactggggaactcagactgagaaggaagacacctcaaacatcaacccaagacaaactgagacatccgtaaacgcatctcgatctcctgaaaaatgtgcccagcagcggcagaagagactcaatagtgcttcacagcgtagctccagccttccgccaagcaaccgaaaatcttccacccccaccaaaagagaaatcatgctgacacctgtcacggtcgcctattcacccaaacggagtcctaaggagaacttaagccccggattctcccacctgctgtccaaaaacgaatcatctccaatccgcttcgacattctcctagatgacttagacactgtgccggtgagtactttgcaaagaaccaaccctaggaaacagctccagtttctgccattggatgactcagaggaaaagacctactcagaaaaggctactgacaatcatgtgaaccacagctcgtgccctgaaccagtgcctaatggcgttaagaaagtcagtgtcagaacggcctgggagaagaacaagtcagtatcttatgaacaatgcaaacccgtctcggttacaccacaagggaacgactttgagtacacagcaaaaattcgaaccctggcagagacagagcgttttttcgacgagttgactaaggagaaggatcagattgaagccgcactgtctagaatgccctcccccggtggcaggatcactcttcagacgaggctgaatcaagaggccctcgaggatagacttgagcgtataaaccgggagctggggagcgtgcggatgaccttgaaaaaattccacgttcttcgtacatctgccaatctgtag

SEQ ID NO: 231094 - DNA, 1167 bp, synthetic construct
  misc_feature 1..1167: note = Description of Artificial Sequence: Synthetic coding sequence
  source 1..1167: mol_type = other DNA
atggagccctcccctgccgcaggtgggctggaaactacacgtcttgtgtcaccacgggaccggggaggagcaggtggctctctgaggctgaagtccctgttcaccgagcccagcgagcctctccctgaggaatctaaaccagtggagatgccgttccaccattgccacagggacccacttcccccaccaggcctgaccccagagcggctgcatgccagacgtcaactatatgccgcttgtgctgtctgttttgtattcatggccggagaagtagtagggggatacctggctcattcactcgccatcatgacagatgcggctcacctgctggccgacgtcggttcaatgatgggaagcctattctctctctggctttccacacggccagcgacacgcacaatgactttcggctggcatcggagcgaaacattgggggcacttgccagcgttgtgtcactgtggatggtgaccggcatactgctgtatttggccttcgtgcgcctccttcattctgattaccacattgaagggggagcaatgctgttgaccgctagtattgccgtctgcgccaaccttctcatggcgtttgtgctgcatcaggctggtccgccacactcccatggctccaggggcgcagaatatgcccctctcgaggaaggacccgaagagcccctccccctcggcaacacatccgtgagggctgctttcgtgcacgtcctgggcgacctccttcagtctttcggtgtattggccgcaagcatcctgatatatttcaagcctcagtacaaagcggcagatcccataagcacttttctgttttctatctgtgcgctgggcagcaccgcgcctactctccgcgatgtcctgaggattctgatggagggtaccccacgcaatgtcggtttcgaacccgtgagagacactctgcttagtgtgcccggtgtgagggccactcacgaattacacctgtgggcactgactcttacgtatcacgtggcctcagcacaccttgcaattgactcaacggcagaccccgaggcagtcctggcagaggcatcgtcccgtctctatagtaggttcggcttcagttcctgtaccttacaggtggaacagtatcaacctgagatggcacaatgcttaaggtgtcaggaaccccctcaagcctag

SEQ ID NO: 231095 - DNA, 363 bp, synthetic construct
  misc_feature 1..363: note = Description of Artificial Sequence: Synthetic coding sequence
  source 1..363: mol_type = other DNA
atgtgccacctgtacgaaggacctgtagttggaggctggtataaagtgctggatagatttatccctgggacgaccaaggtggacgcactcaagaaaatgctactggaccaaggtggcttcgccccatgctttctgggctgtttcctgccattagtcggggctctgaacggactgtctgctcaggacaactgggctaagctccagcgcgactacccggatgctctgattacgaattattacctgtggccagcggtccaactagcaaatttttacctggtgcccctacactaccgactcgccgtggtccagtgtgtggccgtgatctggaatagttacttgtcatggaaagcacacagactgtag

SEQ ID NO: 231096 - DNA, 531 bp, synthetic construct
  misc_feature 1..531: note = Description of Artificial Sequence: Synthetic coding sequence
  source 1..531: mol_type = other DNA
atggccttgtggagggcataccaacgcgcactggcagctcacccctggaaagtgcaggttcttactgcgggaagcttaatgggcctgggcgacatcatctcacagcaactagtcgagcgacggggtttacaggagcaccaacggggacgcacactgacaatggtctctctcggctgtgggtttgtaggacccgtcgtcggaggatggtacaaggtgctggaccgcttcatcccgggtacaaccaaggtggatgctctgaagaagatgctgctagatcaagggggattcgcaccctgttttctcggctgtttcctgcctctggtgggggctctaaacgggctcagcgcgcaagataactgggctaagctacaacgagattatcccgatgcacttatcacaaattactatctctggcctgccgtgcagctggcaaatttttaccttgtccccctgcattatcggctggcagtcgtgcaatgcgtcgccgtgatttggaactcttacctcagttggaaagcccatcgcttgtag

SEQ ID NO: 231097 - DNA, 513 bp, synthetic construct
  misc_feature 1..513: note = Description of Artificial Sequence: Synthetic coding sequence
  source 1..513: mol_type = other DNA
atggctctgtggcgggcttatcagcgggcactagcagcccatccttggaaggtgcaggttttgaccgctgggtccctgatgggccttggcgacattatttctcaacagttagttgagcggaggggcctgcaggagcaccagagaggacggaccctgacgatggtttcccttggatgcggctttgtggggccagtagtagggggatggtacaaggtactggacaggttcataccgggtaccaccaaggtggacgcactgaagaagatgttactggatcagggcggatttgccccttgctttctcgggtgcttcttacctctggtgggcgcactgaatggcctgtccgcacaggacaattgggctaagttacaaagagactaccccgacgcattgatcacaaattattatgtggggagatgcccaatgtgttgctgttacctagaactgctgccagtcctggagggcacatctgcactgagtttgccacacagcatagtttcaacgttacagtag

SEQ ID NO: 231098 - DNA, 342 bp, synthetic construct
  misc_feature 1..342: note = Description of Artificial Sequence: Synthetic coding sequence
  source 1..342: mol_type = other DNA
atggcactttggagggcctatcaacgtgcattggcggcacatccatggaaggtgcaggtgttgacagcaggatccctgatgggcctaggagacattattagtcagcagctggtagagagacgcggactgcaggagcatcagaggggcaggacattgacaatggttagcctgggctgtggctttgtggactatcccgatgcattaattaccaactactacttatggccggcagtacagctcgcaaatttttacttagtcccgcttcactacaggctggctgttgttcagtgcgtggcagtaatttggaacagctacctttcttggaaggctcaccgcctctag

SEQ ID NO: 231099 - DNA, 576 bp, synthetic construct
  misc_feature 1..576: note = Description of Artificial Sequence: Synthetic coding sequence
  source 1..576: mol_type = other DNA
atggcgctctggcgcgcttatcagagagctttggctgcccatccatggaaagttcaggtcttaactgccgctcatcccaggaggtgcccagacaacacgtgtgtgccctgtatcggatcgctaatgggcctcggagacatcatctcgcagcagctggtggagagacgcggattacaggaacatcagagagggaggaccctgacaatggtgtctctcggatgtggattcgtgggccctgtggtggggggatggtacaaggtgctggataggttcatccctggcacaaccaaggtggatgctctcaaaaagatgttgttagaccaggggggtttcgctccatgctttctcggatgctttctccctttagtgggggcactgaatggactgtctgctcaggacaactgggctaaactgcagagagactatcctgatgccctgatcacaaactactatctctggccagccgtgcaacttgctaatttttacctggtgcccctgcattacaggttagccgtggtgcagtgcgtggctgtaatctggaatagctatctgagttggaaggctcacaggctgtag

SEQ ID NO: 231100 - DNA, 348 bp, synthetic construct
  misc_feature 1..348: note = Description of Artificial Sequence: Synthetic coding sequence
  source 1..348: mol_type = other DNA
atgggactcggggacataatcagtcaacaacttgtcgaacgacggggactgcaagagcatcagagggggaggacccttactatggtgtcactgggatgcggatttgtcggacccgtggttggaggctggtataaggtgttggatagattcatccctggcaccactaaagtggacgctttaaagaaaatgttgctggaccagggaggcttcgctccctgttttttgggatgctttctaccattggtcggagccctaaatgggctgagcgcccaagataactgggccaagctgcagagggactatcctgatgccctgattacaaattattacctgtggcccgctgtgtag

SEQ ID NO: 231101 - DNA, 366 bp, synthetic construct
  misc_feature 1..366: note = Description of Artificial Sequence: Synthetic coding sequence
  source 1..366: mol_type = other DNA
tgaagtttgatggggctgggagacattattagccagcagctggtcgaaagacgagggctccaggaacaccaaaggggtaggactctcacaatggtgagtctgggctgtgggttcgtggggccagtagtgggagggtggtacaaggtgcttgatcgatttatcccaggcactacaaaagtcgatgctctgaaaaaaatgctcctggaccaggactatcccgatgcgctaataactaactattatctgtggccggctgtccaattagctaacttttatctggtgcctcttcattaccgtctggctgtagtgcagtgtgtggccgtcatctggaattcttacctctcgtggaaagctcatagactatag

SEQ ID NO: 231102 - DNA, 204 bp, synthetic construct
  misc_feature 1..204: note = Description of Artificial Sequence: Synthetic coding sequence
  source 1..204: mol_type = other DNA
taggattcccagggtaaaaagactggctttactggcatcaagaaaggagactatccagatgcactgataactaactattacctgtggcctgctgtccagctggccaatttctatctcgtcccccttcattatcgtttagctgtggtacagtgcgttgcagttatttggaattcttacctcagctggaaggcacatcgactctag

SEQ ID NO: 231103 - DNA, 912 bp, synthetic construct
  misc_feature 1..912: note = Description of Artificial Sequence: Synthetic coding sequence
  source 1..912: mol_type = other DNA
atggccccagccgcagatatgacatcccttccgctcggcgtgaaggtggaggatagtgctttcggcaaacccgcagggggaggcgcagggcaggcaccttccgctgcagccgctacagccgcagctatgggggctgatgaggaaggggctaagcctaaggttagtccctcactacttcccttctctgttgaagccctgatggccgatcacagaaagcctggtgctaaagagtccgctttggccccatctgaaggcgtgcaggcagctgggggtagcgcccagccgctgggagtgccaccaggcagcctcggcgctcccgacgcgccaagctcacccagacctcttggccacttctctgtcggaggattactgaaactgcctgaagacgctctcgttaaggctgagagcccagaaaagccagagagaacaccctggatgcagagtccccgattctccccgcctccagccagaagactgtctcctcctgcgtgcacactcaggaaacacaaaacaaatcgtaagcctcgaaccccattcacaaccgcgcagttgctggccttggaacgcaaattccgtcagaaacaatacctctccattgcagagcgtgccgagttttcctcctccctgtcccttactgagacacaagtgaaaatatggtttcagaatcggagagccaaggcaaagaggctccaagaggcggaactggaaaagctgaagatggccgctaagcctatgttaccgcctgcagcctttggtctcagcttcccattgggtggccctgcagccgtggccgcagccgctggcgcaagtctatacggggcttcggggcctttccaaagagcggcactcccagtggcgcctgtgggcttgtacactgcccacgtgggatacagcatgtatcacttaacatag

SEQ ID NO: 231104 - DNA, 804 bp, synthetic construct
  misc_feature 1..804: note = Description of Artificial Sequence: Synthetic coding sequence
  source 1..804: mol_type = other DNA
atggccagtcctagcaaaggtaacgacctgttttccccggacgaggaaggaccagcagttgtcgctggacctggaccgggtcccggaggtgctgaaggggctgccgaggaaagaagagttaaggtatcgagcctgcctttttcagtggaagccctgatgtccgacaaaaagccacctaaagaagcctcgcctctgcccgcagaaagcgcctcagccggagctacactgagacctctgttactcagcggccacggcgcaagggaagcacacagtcccggacctctggtgaagcccttcgagactgcaagcgtgaaaagtgaaaatagtgaagatggtgctgcgtggatgcaggaacctggcagatattcccctcctccgaggcacatgtctcctaccacctgtacgctccgcaagcacaagacgaatcgaaaacctcgcaccccattcacaacgtctcagctcctggcactggaaagaaaattccggcagaaacagtatctgagcattgctgagcgggctgaattttccagctcattgaatctcaccgagactcaggtgaagatatggttccagaaccggagggcaaaggcaaagcggcttcaggaggctgagctcgagaaactcaaaatggccgcaaagcccatgctgccaagctcttttagcctcccctttcctatctcatcccctctgcaggccgcaagtatttatggagccagttaccctttccatcggccagtgctgcccatccctccagtggggctgtatgctacaccagtaggctacggtatgtaccatttgtcatag

SEQ ID NO: 231105 - DNA, 981 bp, synthetic construct
  misc_feature 1..981: note = Description of Artificial Sequence: Synthetic coding sequence
  source 1..981: mol_type = other DNA
atgaacacctccccgggaacagtgggtagtgatcccgttatcttggccaccgccggttacgatcataccgtccggttctggcaggcgcacagcggcatctgtacacgcacagtgcagcaccaagattcccaagtgaatgcattggaggtcactcccgaccgatctatgattgcagccgctggctaccagcatatccgcatgtatgaccttaatagtaacaaccccaacccaataatctcctacgacggagtgaataagaatatcgcctcagttgggttccacgaggatgggagatggatgtatacaggtggcgaggactgtactgcacgcatctgggacctcagatctcggaatctgcagtgccagcgaatttttcaggtgaatgcccctatcaattgcgtgtgtctacatcccaatcaggctgagttaatcgtcggtgaccagtccggggcaattcatatttgggatctgaagactgaccacaatgaacaattgattccggagcccgaagtaagcattactagcgcccatattgacccggacgcatcttacatggctgctgtgaacagtaccggcaattgttacgtatggaatctgaccggaggaatcggggacgaggtaacccaactgatccctaagacgaagattcccgctcacactcgctacgccctgcagtgtcgcttcagccctgactctactctgttagctacatgctccgctgaccagacctgtaaaatttggaggacgagcaatttttccctgatgaccgagctgagcatcaaatccggaaaccctggcgaaagttcccgtgggtggatgtggggatgtgcctttagcggcgactcccagtacatagtcacagcaagcagcgacaacttggcacggttatggtgtgtggaaacaggggagattaaacgcgagtacggcggacaccagaaggccgtagtgtgtcttgctttcaacgacagtgtcttagggtag

SEQ ID NO: 231106 - DNA, 981 bp, synthetic construct
  misc_feature 1..981: note = Description of Artificial Sequence: Synthetic coding sequence
  source 1..981: mol_type = other DNA
atgaatacctcgccaggcaccgtcggcagcgaccccgtgattctggcgacagctgggtacgaccacacagtacgcttctggcaggctcacagcggaatctgtactagaacagttcagcaccaggacagccaagtgaacgcgctggaagtgacaccagaccggagcatgattgcagctgctggttatcagcacatccggatgtacgacctcaacagcaacaaccctaacccaattatctcctatgacggcgtcaacaagaatattgccagcgttgggtttcacgaagacggcagatggatgtacaccggcggagaagattgtaccgcacggatatgggacctcagatcccggaacttgcagtgccagcggattttccaggttaatgcacctatcaactgcgtgtgtctccatccaaatcaggcagagctcattgttggggatcagagcggggcaattcacatttgggatttaaaaacagaccataatgaacaactgatccccgagccggaggtgagcattacaagtgcacacattgacccagatgcctcgtacatggccgctgtgaattcaacagggaattgttatgtatggaacttaaccggaggaataggagatgaggtgactcagctgattcctaagacaaagattcctgcccacacacggtatgctcttcagtgtcggttctccccggactctacgttattagctacatgtagtgctgaccagacttgcaagatctggagaacttctaatttcagtctcatgacagaactctccattaagagcgggaatcctggtgaaagtagccggggatggatgtggggctgtgcttttagcggagactcgcagtacattgttaccgcatcttccgacaacctggcccgactgtggtgcgtcgaaaccggcgagattaaaagggagtacggaggtcaccagaaggcggtggtctgtttggccttcaatgattccgttctcggttag

SEQ ID NO: 231107 - DNA, 984 bp, synthetic construct
  misc_feature 1..984: note = Description of Artificial Sequence: Synthetic coding sequence
  source 1..984: mol_type = other DNA
atgaataccagcccaggaaccgtcggcagcgaccctgttatactcgctactgccggttatgatcacacagtacgattttggcaggcgcattctggcatatgcacccgtactgtacagcaccaggactcccaagtgaacgctctggaggtgacccctgaccggtcgatgattgccgcagctgggtatcagcacattcgaatgtatgatttaaacagcaataatccaaaccccatcatctcatatgacggggtgaacaagaacattgccagcgttgggttccacgaggacggccgttggatgtacactggcggtgaggattgcaccgccaggatctgggacctgcgctctcgcaacctgcaatgccagcggatattccaggtcaatgcccctatcaactgcgtatgcttacacccgaaccaggcagagctcatcgttggagaccagagcggagcaattcacatctgggacttgaagaccgaccacaatgagcagttaataccagagccggaagtcagcatcacatcagctcatatcgaccctgatgctagctacatggccgcagttaactctaccgggaactgttacgtgtggaacctgacgggcggaatcggagacgaagtgactcagctgatccctaagacaaaaatacccgcacacacccgttacgccctccagtgtcggtttagccctgacagtaccctcctggccacttgttctgccgaccagacatgtaaaatctggagaacaagcaacttttcccttatgacagagttgtctatcaagagtggcaatcccggagagtccagtagaggttggatgtggggctgtgcattctccggagatagccaatatatcgtcactggcgaaccccgtccaggcctgccccatccgtggccacccgctttggcatctagggcttctcctccaaggctgcaactcccgctctgttgggggaggctcctaggactccacctgcgcagttag

SEQ ID NO: 231108 - DNA, 654 bp, synthetic construct
  misc_feature 1..654: note = Description of Artificial Sequence: Synthetic coding sequence
  source 1..654: mol_type = other DNA
atggaacacgcgccttggtcccctggggcaagttctagggctcgagctggccatactatgaatactagtccagggactgtaggcagcgatcctgtgatcttggctactgctggctatgaccacaccgtcaggttttggcaggcacactccgggatctgcacccgcaccgtacagcatcaagattcccaagttaacgccctggaagtgactcccgacaggtccatgatcgcggctgcgggttaccagcacattagaatgtatgaccttaatagcaacaacccgaaccccatcatctcttacgacggggtgaataagaacatcgcaagcgtgggcttccatgaggatggaaggtggatgtacactggaggtgaagattgcacagcgaggatttgggacctacgcagtcggaacctgcagtgccagaggatttttcaggtgaacgcgcctattaattgtgtctgcctgcaccctaaccaagccgaactgattgtaggcgaccagagtggagccattcacatatgggacctaaagactgaccataacgaacagctgattccggagccagaagtgtccattacgtccgctcatatcgaccctgacgcctcttatatggctgccgtgaactcaaccgccccacgacatctgctggggtag

SEQ ID NO: 231109 - DNA, 981 bp, synthetic construct
  misc_feature 1..981: note = Description of Artificial Sequence: Synthetic coding sequence
  source 1..981: mol_type = other DNA
atgaacacgtccccaggaacagtagggtcggaccccgttattctcgctaccgcgggttatgatcacacggttcggttttggcaggctcacagtgggatctgcacaaggaccgtccaacaccaggatagccaggtgaatgcgctggaggtgacccccgaccggtccatgattgctgcagccggttaccagcatattcgcatgtacgacctgaatagtaacaaccctaatccaatcatttcttacgacggcgtcaacaagaacattgcctcagttggctttcatgaggacggacggtggatgtacacgggcggagaggattgtactgccaggatttgggatctccgatcccgaaaccttcaatgtcagcgcatttttcaggtgaacgcgcctatcaactgcgtgtgtctccaccccaatcaggccgaactcatagtcggtgatcaatccggcgcaatccacatctgggatctcaaaactgatcacaacgaacagctgatcccagaacccgaagtaagcatcacatcagcacacatcgatccagatgccagctacatggccgcagtcaacagcaccggtaattgttatgtgtggaacctgacaggcggtattggagacgaagttactcagctcatcccaaaaacaaaaataccggcacatactcgatacgccctccaatgtcgtttcagccccgactctacccttctagccacctgtagtgccgatcagacgtgcaagatatggcggactagcaatttctctctgatgactgaactatcaattaagtctgggaaccctggcgagtctagccgcggttggatgtgggggtgtgccttcagcggcgattcgcagtatattgtgacagcctcatcagacaacctagcaaggttgtggtgcgtagagaccggcgaaatcaagcgcgaatacgggggtcaccagaaagccgtggtttgcttggcattcaatgactcggttctcgggtag

SEQ ID NO: 231110 - DNA, 981 bp, synthetic construct
  misc_feature 1..981: note = Description of Artificial Sequence: Synthetic coding sequence
  source 1..981: mol_type = other DNA
atgaacactagtccgggaacagtgggtagtgatcctgtcattctggcgaccgccggatacgaccacactgtacggttttggcaggcccacagtggaatttgcaccagaacggttcaacatcaggattcccaggtaaacgcactggaggtcacccctgatcggtcaatgattgcagccgcagggtaccaacacatccggatgtacgacctgaatagtaataatcccaatccaatcattagctacgatggggtcaataagaatattgcttcggtgggctttcatgaggacggcagatggatgtacacaggaggcgaagactgcaccgcccgaatctgggacctccgctctcggaatctgcagtgccagcgcattttccaagtgaacgcacctatcaactgcgtttgtttacaccccaaccaggccgagttgatagtgggggatcaaagcggcgcaatccacatttgggacctgaagaccgaccacaatgagcagctcatacctgagcccgaagtttcaataacgtcagcccatatcgatcccgatgcatcctatatggcagctgttaacagtaccggaaactgctacgtgtggaatctgactgggggtattggcgacgaggtgactcagctcattcccaagaccaaaattcccgctcatactcggtacgccctgcagtgccggttctctcccgactcaactttgctcgccacctgtagtgctgatcagacttgtaaaatatggagaaccagcaactttagtctgatgactgagctgtcaattaagtccgggaatcccggagagagctctcgaggctggatgtgggggtgcgcattcagtggagatagccagtacatcgtgacggcgtcaagcgacaacctggcacgcctgtggtgtgtagagaccggagaaatcaaaagagagtacggaggacaccagaaggcagtggtgtgcttggcctttaatgactctgtgctcgggtag

SEQ ID NO: 231111 - DNA, 1473 bp, synthetic construct
  misc_feature 1..1473: note = Description of Artificial Sequence: Synthetic coding sequence
  source 1..1473: mol_type = other DNA
atggctcagagggcggtctggttaatttcacacgagccaggcactccgctgtgtggaactgtgcggttcagccgacgctatccaacagtcgagaagcgggctagagttttcaatggcgcatcttatgtgccggtaccagaggacggacccttcctgaaggcattacttttcgaactgagattgctagacgacgataaagacttcgtcgaaagtcgggactcatgttcaaggatcaacaaaacctccatttatggactcttgataggaggcgaagagctctggcccgtggtggcttttctgaaaaacgatatgatctatgcctgtgtgcctctggtagagcagaccctgagcccacggcctccgctgatttcagtctccggcgtttctcagggcttcgagttcttgtttggcatacaggattttctgtactccggtcagaagaatgattcagagctgaataccaaattatctcaactgccagatttgctacttcaggcttgtcctttcggtaccctgctggatgcaaacctgcagaactcactggacaataccaacttcgcctccgttacacagccacagaagcagcctgcttggaagacggggacttacaagggaaaaccacaggtctccatcagcattaccgagaaagtgaagtcaatgcaatacgataagcagggtatagccgacacttggcaggtggtcggcacggtgacatgtaaatgcgacttagagggcatcatgcccaatgttacaattagtttgtctctcccaacaaatgggtcacctctgcaggacattctcgtacacccttgtgttacgtcgctggatagcgccatcctaacatcctcctccattgatgcaatggatgactctgccttcagtgggccttacaagtttccctttacccctcctctcgaaagcttcaatctgtgtttctacactagtcaggtgccggtcccgccaattttagggttctaccagatgaaagaagaggaagtgcagctgagaattaccatcaacctcaagctgcatgaaagcgtgaagaacaactttgaattctgcgaagctcatattccattttacaaccgagggccaattacccatctggagtacaaaacgtcctttggtcagcttgaagtgtttcgcgagaagtccctgctgatttggattatcggccagaagtttccaaagagcatggaaatttctctgagcggtaccgtgacgttcggtgccaaatcacacgaaaaacaaccattcgatcctatctgtaccggggaaaccgcttatttgaaactgcacttcaggatcctggattataccctgacaggttgctatgctgatcagcatagtgtgcaggtcttcgccagcggcaagcccaagattagcgcccatcgaaaactcatatcctccgattattacatctggaatagcaaggctccggctccggttacttacgggtcattacttctatag

SEQ ID NO: 231112 - DNA, 16437 bp, synthetic construct
  misc_feature 1..16437: note = Description of Artificial Sequence: Synthetic coding sequence
  source 1..16437: mol_type = other DNA
atgttagtcatttggattttgacactggcattaagactctgtgctagcgtgacaactgttacaccagaaggatccgctgtccacaaggcgatttctcaacagggaacactgtggacaggggaggtgctcgaaaaacaaaccgtggagcaaggtaaaagcacactgaggagacagaagaaccactttcatcgatccgctggtgaactgcgctgcagaaatgcattgaaggacgaaggggcttcagcaggttggtctgttatgtttgcaggcgagtccgtggtggttctggtccatctatggatgacgggcgctagagtcaagaacctcggactcgtcgagttcgctagtccaggagatgatggagacggccgagccgaggggttttctctgggcctccccttgagcgagcaggcacgggcagccggtgccagagagaaggaaagacaagagaccgtgatcaatcatagtaccttcagtgggttctcccaaatcacaggttctaccgtgaacacatccatcgggggtaacacaacatctgccagcacaccttcctcctcagatcccttcactaccttctctgactatggggtgtcagtgactttcataaccgggagcaccgcaactaaacactttctcgattctagcaccaactccgggcattccgaagagtccacagtttcccactcaggacctggagctactgggactaccctgttcccgagccactccgccacctcagtttttgtcggagagccaaaaacatccccaatcacctccgcctcaatggagaccaccgcactccctggttcaacaactacagccggactgagcgaaaaaagcactactttttatagttctccccgttcccccgatcgcaccctgagccccgcacgaacgaccagttccggcgtctcagaaaagagtaccacctctcacagcaggcctggcccaacgcataccatcgcctttcccgattcaaccaccatgccaggcgtgtcacaggaaagtaccgccagccacagcataccaggttccacagataccacgttaagtccaggaacaaccactccctcctccctgggccctgaatcaacaactttccactcgtcccccggatacacgaagactacgcgactcccggataacacgaccacgagcggactgttggaagctagcacacctgtccatagtagcactggcagcccacacaccacactctctcctagctccagcactactcatgaaggcgagcccaccactttccaaagttggccgagctccaaggatacgtcacctgcaccatcagggactactagcgcattcgtgaaactgtcaaccacttaccactcgtctccgtcatcgactcctactacgcatttttcggcatcctccaccactttaggacactcagaggagtcaacccccgtgcattcttcacctgtcgccacagccaccacccctccccctgctcgaagtgcaacctctgggcacgtggaggagagcaccgcttaccacagatctccgggaagtacccagaccatgcatttccctgagtctagcaccacaagcggtcactccgaggaatccgctacctttcacggaagcacaacccataccaaatcctccacccccagcacaacagccgcactggcccacacaagctaccacagctcactgggcagcactgaaacaacccactttcgggattcctccactatttctggcagaagcgaggagagcaaagcatcacattcatctccagacgcgatggccaccacggtccttccagccggtagcactccttccgtactggtgggggatagcacaccatcacccatttcatctggctccatggaaaccacggcgttacctggatcaactaccaagcctggcctcagtgagaagagcaccacattttattcctctcccagatcacccgacaccacccatcttcctgcttctatgacttcctcaggggtctctgaggaaagcacaacctcccattccagaccaggtagcacccacaccacagctttccctggtagcacgaccatgcccggactgtcccaggagagcacagcaagccacagtagccctggtccaaccgacacaaccttatcccctgggtctaccactgcatcatcactcgggcctgaatacactactttccacagtcggcctggaagcacagaaacaaccctgttgccagataacaccactgcgagcggcctgctggaagcttctatgccggtacactccagtaccagaagccctcacaccactctgtcccccgctggctctaccactcgccaaggggagtctacaaccttccactcatggcctagctcaaaggacacgcgcccagcaccgcctactaccactagcgcctttgtggagccctctacaacctcgcatggctccccttctagtatccccactacacatatctcagccaggtcaacaacgagcgggctggttgaggaatccactacatatcattcttcccctgggtctacccagaccatgcacttccccgagtctgacactacctcaggacgcggagaggaatccaccacaagccacagttcaacgacgcatacaatatcatctgctccgtcgacaacctctgcccttgtcgaagagccaacatcataccacagctccccaggatcaaccgctaccacccatttcccagattcaagcactaccagcggaaggtctgaggaatctactgctagccatagcagccaggatgctaccggaaccattgtgttgcctgcacgaagcacgacatcagtcttgctaggagagagtaccacttccccaatctcctccggctcaatggaaaccaccgcccttccaggctccactaccacaccgggactgtccgagcgctccactaccttccactcttctccaaggagccctgccacgaccctgtcgcctgcctccaccacatctagcggggttagtgaggaaagcaccacatctcgctcccggcctggaagtacacatactactgcgtttccggatagcaccactacgccaggtctgtctcgacattccacgacttcacactccagccctgggtccacagatactactctgctcccggcttccaccacaaccagcggtccgagccaggagtcaactactagccatagttcctccggttccactgatacggcgctttcccccggtagcacgaccgccttgtcctttggacaagagagtactacatttcattctaatcctggtagcacccataccaccctcttccccgatagcaccactagttctgggattgtggaagcctcaaccagggtccatagtagcaccggatctcccagaaccactttaagtccagcgtcttcaacctcccctggtcttcagggcgaatccacggcattccagacccatcctgctagtacacatactactccaagcccccctagtaccgcaactgcgcctgtagaggaatccacaacctaccacagatcacccggatcaacacctacaacccactttccggctagctccacaacttctggtcactcggagaaatcaactatttttcattcctctcccgatgcctccggaaccactcccagcagtgcgcactccacaacctcaggaaggggcgaatccaccacctctcggatttctcccggaagcacggagatcacaaccctcccaggatctacaaccactcctggcttgtccgaggcatctacgacgttctactcttcaccacgcagtccaacgactactctcagtcccgcatctatgacctccctcggcgttggggaggaaagcaccacgtcccggagccaacccggttcaacccactccaccgtctccccggcttcaacgactactcccggactgtccgaggaaagcaccaccgtatactcatcaagcagaggcagcaccgagacgacagtcttcccacatagtacaacaaccagtgtgcacggggaggagcctacaacattccattctcgcccagcaagcacccatactacactgttcaccgaagacagtacaacatctggtctcaccgaagaatccacagccttccctggctcccctgctagtacacagaccgggttgcccgcaactctgacgactgctgatcttggagaggaaagcacaacttttcccagctcgtctggatccaccgggacaaagctcagccccgctcggtctaccacttctggcctggtgggcgagagcacacctagcaggctcagtccctccagcaccgagaccacaaccctgccaggtagcccaacaaccccctccctaagtgaaaaatcaactactttctacacttcacctcgctcacccgatgccacgctctcacccgctacaacaaccagttccggggtgtcagaagagtctagcaccagtcactctcagcctgggagtacacataccactgctttcccggattctaccactactagtgatctgagtcaggaacctaccacatcgcatagttcgcaaggcagcaccgaagcaacactatccccaggctccaccacagccagcagcttaggtcagcagagcaccacttttcacagctctccaggagataccgagactactctgctgcccgacgacacaatcacctcgggactcgttgaggccagtacaccgacacacagctctacaggctctctgcacaccacgctcacacctgcttccagcactagtgccggactgcaggaagaatcaacaactttccagagttggccaagctcttccgacacaactcccagtcctcccggaacaacagccgctcctgtggaggtttccactacctaccactcccgcccttcttccacccccacgacacacttttcagccagcagtaccactctgggcaggtccgaggagtctacaaccgtgcattcttcccccggagcaactggcacagccctgtttccgacccgctctgccactagcgttcttgtgggcgagcctactacaagtcccatatcttctggtagcacagagacaactgcactgcctggatcaactaccacagccggactttctgaaaaaagcaccaccttctactcatctcctcgatcccccgacactactctgagccccgctagtacgacaagcagcggggtgtctgaggagtcaacaacatctcattctaggccgggttctacccacaccacagccttccccggatctacaaccatgcccggtgtgtctcaggagtctacagcctcccacagtagccccggtagtaccgacacaactttatccccagggtcgaccacagcttccagtctcggtcctgagtccaccaccttccattcatctcctgggagtaccgagacaacgttactgccagacaatacaactgcgtctggactcttggaggcctctacacctgttcactcttcaaccggctcaccacacacaacgttgtctccagccggttccacgacccgccaaggcgagtcgacgacctttcaatcttggccgagctctaaggataccatgccagctccgcctacaaccaccagcgcatttgtagaactctctacaacaagtcatggatcccctagctccacgcctaccactcacttttccgcttcatctacaaccctgggcagatctgaggaatctactaccgtccactcatctccggtcgccacagccaccacacccagccccgctagaagtaccacatcaggactcgttgaggaatccacggcctatcactcaagtcccggatcaacgcagactatgcacttccccgagagcagcacggctagcggcagatcagaggagtccagaacctcccactcctcaacgacacacaccatttccagcccaccatcaactaccagcgccctcgtggaggaaccaaccagttaccattcctcgccgggaagcacagccaccacccacttccctgactccagcacgacctccggacgaagtgaggagagcacggcttctcactcaagccaggacgctacgggcaccatcgtgctgcccgctcggagcaccactagcgttttgctgggggagagcactaccagccccatctcgagtggaagtatggaaacaacagcgcttcccggatctaccacgacccctggcttatcagagaagtccactacctttcactcaagccctagatctccagctaccacattgagccccgcaagcaccacttcctccggcgtgtcagaagagtcaacaacgtcacattctcgcccaggctcaactcacactaccgcatttcccgattcaacgactacaccaggactgtctcgacatagtaccacatcacactcttcacctggaagcaccgacaccaccttgctcccggcatctaccacgactagtggccctagtcaagaaagcaccacttcccactcatcacccggttctactgatactgccctgtctcctggcagtacaactgcgttgtcgtttggacaagagtccaccacgtttcattctagccctggatctactcacactacactgtttccagactctaccacatcctcgggcatcgttgaggcctcaacgagagtccatagcagtaccggttctcctcggaccacgctgtccccggctagtagcacttctcctggattgcagggggaaagcaccgccttccagactcaccctgcatccacccacacgactccaagcccgcctagcactgctactgctccagtggaagaaagcacaacgtaccatagaagcccaggtagtactcccactacccattttcccgctagttcaacgacctcaggtcacagcgagaagtccactatcttccattcatctcccgatgcgtccgggacaacccccagctctgcacacagcacaacctcaggaagaggcgagagcactacatctagaatcagccctggaagcacggagatcactaccctgccaggatctacaaccacacccggactgagtgaagccagcaccacattctattcctcgcctcggagcccgaccaccactctgtctccggcatctatgacgtcgctgggagtgggagaggaatcaacgacttcaaggtctcaaccagggtccacacattcgacagtatccccagctagcactacaaccccgggactatccgaggaaagtaccacggtctattcaagcagtcctgggtcaacagagacgacggtttttcccaggacccccaccaccagcgtgcgtggtgaggagcctaccaccttccacagtcggccagccagtacccacacgacactctttacagaggattccactacctcagggctgacagaggagagtacagcgttccccggatcgcccgcatccacccagacagggcttccagctaccctcacaacggccgacctgggcgaagaaagtaccaccttcccatcctcgtccggcagcaccggcacaacactcagcccagcccgtagcacaacctctgggctggtaggcgaatccacccctagtagattatctcccagtagtacggagacaacgaccctccccggatcacctaccacccccagcctgtcagaaaagtccacaacattctacaccagcccacggtcgcccgacgccactttgagccccgctactaccacgtcgagtggcgtttcagaagaatcttctacatcccattcccagcccggatcaacccataccaccgcatttcctgattcaaccacgacccccggtctgagtaggcactcgaccacctcacatagttctccaggttcgacagataccacactgcttccggctagcacgactacgtcaggaccatcacaggagtccacgacttcccattcctcccccggaagcactgacaccgcgctgagtccaggttctaccaccgctctgtccttcgggcaggagtctactaccttccacagttcaccgggatcaactcatacaactttatttcctgacagtacaactagctctggtatcgtagaagcctctacgcgcgtgcatagctccacagggagtcctcgtactacactgagcccagctagttccactagccctggattacagggcgagagtacgacttttcaaacccatccggcaagcacacacacaacaccgtctccacctagtaccgcaacagcacccgtggaagagtcaacgacctatcaccgaagccctggcagcactccaaccacacatttccctgcgtcatccactacaagcggacattccgagaaaagtactatttttcattccagccctgatgccagtggaaccactccatccagcgcccacagcaccacaagcggcaggggtgaaagcacaacatcccgcatttcacctgggtctacagagataaccacattaccaggtagtacaaccacgcccggactcagtgaggcttccacgacattctatagttctccacgaagccctacaaccactctatcccccgctagcatgacgtccctgggcgtcggagaagagtccaccacatccaggagtcaacccggaagcacccactctaccgtctctccggcttcaaccaccacacccggtctcagcgaggagagtaccacagtctatagtagctcacctggctctacagagactactgtgtttcctagatcgactactacttctgtgcggggtgaggagcctacaacgtttcactctaggccggcaagcactcacactacactgtttactgaggactccactaccagcggactcacagaagaatccaccgctttccctgggagcccagcttcgacccagactggtctacctgcgaccctgacaacggctgaccttggcgaggagtccacaacattcccctcgtcctctggatctacaggcaccactctgagtcccgcacggagcactacttctggcctcgtgggagagtcaacaccctctcggctgagcccgtcgagtaccgagactactacacttcccggtagccctactacaccaagtttaagcgagaagtccacgaccttctacacaagccccagaagtccggacgctacattgtcccctgctactaccacaagttctggagtgagcgaagagtcctcgacaagccattctcagccagggagcacgcatacgacagcctttccggatagtacaacaactagcgggctatcccaggagccgactgccagccacagctcacaagggagcacagaagcaaccctatctccagggtcaacaaccgctagctcattgggacagcaatctactaccttccacagctcacccggtgataccgaaacaaccttattgccagacgacacaatcacgtctggccttgtcgaggcatcaactccaacacacagttctaccggaagccttcacacaactctgactcctgcctccagcacctcggctgggcttcaggaggagagtacaacattccaatcctggccttcctcttccgacacgacaccttctccaccaggaacaacagccgcacctgtggaggtgtccaccacctaccattctagaccaagttcaactcccacaacgcatttcagcgctagttcaaccacgctcgggagatccgaggagagtactaccgtgcatagcagtcccggtgcaaccggcacagcactcttccctactcggtccgccacatctgtcctcgtgggcgagccaaccaccagcccgatctccagtgggagtacagaaaccacagcactgccgggttccaccacaaccgctggactatccgagaagtccactacgttctattccagtcctaggagcccagacacgacgctgtctcccgcttcaacaacatcctcaggagtgagtgaggagagcactacatcccattccagacccggttcaacccacactacagcgtttcccggatcaacaaccatgcccggagtctctcaggagtccactgcaagtcattcatcccccggatcaactgacacgactctgtccccaggaagtaccaccgcctcttctctggggccagagtccactaccttccacagtggtcccggatccaccgagaccaccctcttaccagataacaccacagcttccggtcttctcgaggcctccactcccgtacacagctctacaggcagcccgcacacaacccttagccctgcagggagcacaacccggcagggagagtcaactacgtttcaatcgtggcccaactcaaaagatacaacaccggctccccctactaccacatccgcctttgtggagctgtcaaccacttctcacggaagtccgtcatctacaccgactactcacttctcagctagcagtaccactctgggacgcagtgaggaatccacaacggtgcactcaagtcccgtcgccaccgcaaccacgccatccccggctcgctcaacaacatctgggcttgttgaggagtccactacataccatagcagccccggatctacacagactatgcactttcccgagtcagacacaacatccggtagaggggaggagtctactactagccactctagcacaactcacacaatttcgagtgcgccaagtactacgagtgctctcgtggaagaaccaacctcctaccattctagccctggatctaccgccactacccattttcctgattccagcaccacttcgggtcggagcgaagaatccaccgcgtctcattcatcgcaggacgccaccggaaccatcgttttgccggcacgatcaacaacgtccgtgttgctgggcgagtctaccacctctccgatctcttcaggctctatggaaactacagcactgccaggctctacaaccaccccgggactgagtgaaaagtccaccactttccacagttcccccaggtcccccgctaccacactctcccctgccagtaccacttcctcaggggtctccgaagaatccactactagccacagtcgtcccggaagcactcacacaacagcctttcccgattctacgacgacacccggtctctccaggcatagtaccaccagtcatagtagccctggaagcacagatactacattgctgcctgcatcgactaccacctctggctcatctcaggagagcacaactagccactcctcatcaggcagcaccgatacagcactgagcccaggttcgaccacagccctaagtttcggccaagagtcaaccactttccatagctcacctggctcaacacatactaccttatttcccgactccactacttccagcgggattgttgaggcttccactcgggtgcacagctccaccggatcaccacgcaccactttgtcgcctgcttccagcacatcacccggactgcagggagaatccacggccttccagacgcacccagcctcgacccataccaccccttcacctccctccacggccaccgccccagttgaggaatctacgacatatcaccggtctcccggttcgacacccaccacccatttcccagccagcagcaccacctcgggacactccgaaaaatctacaatcttccacagctctccagacgcctcaggcaccacgccatcatccgcacattctaccacgagtggacgaggagaaagtaccacatcccggattagcccgggaagtactgaaatcactacactgcctggctccactactaccccaggacttagtgaggcttcaactaccttttatagttcgccaagaagtcccaccaccactctgagcccagcttccatgacaagccttggtgtgggagaggagagtactacaagccgctcgcagccgggaagtacccatagcacggtatcccctgcatctacaactacgcctggacttagcgaagaaagcaccactgtgtactcttcatctccgggaagcactgagaccactgtcttccccaggagcacaaccacttccgtgcggagggaggagcccaccacgttccattcacgccctgcttccacgcatacaacactctttaccgaagacagcaccacatccggtcttacagaggagagtaccgcttttcctgggtctccagcttccacccaaactggcctgccagctacattaacaaccgccgacttgggcgaagagagcaccaccttcccctcttcttcaggatctacagggaccaagctgtcacctgctcgcagcacaacaagcggactcgtcggtgaaagtacaccaagtcgcctgtcccccagctctaccgaaaccacaacactcccaggatctcctactactccttcccttagcgagaagagcacaactttctacacgagtccgaggagccccgacgcgacactcagccccgctacaaccacatcttccggagtgagtgaggaaagcagcacctctcacagtcagccaggatccacccacacgactgcattcccggacagcacaactacgtctgggctttcccaggaacccactacatcccactcatctcaggggagtaccgaggccaccctgagtcctgggtccaccacagcgtcctctttggggcaacagtcaacaacattccatagcagtcccggtgataccgagacaaccctattaccggacgacaccattacaagcgggctggtggaggcttcgacccccacgcatagctcgactggatcgctccatacaacactaacacccgcatccagcacgagcacaggcttgcaggaagaaagcactacctttcagtcctggcctagctccagcgatacaactccctcccccccatctacaactgcagttccagttgaagtgtccaccacgtatcatagcaggccgtccagcactcctaccacccatttttctgcgtcatcaacgacgctgggtcgctccgaagagagcaccactgtgcattccagccctggagctaccggcaccgctctgttccccacaagatccgccacgagtgtactggttggggaacctacaacaagcccaatctcttccggctctaccgagactacagccctgcctggatcaacgaccaccgcaggactgtctgaaaaaagcaccacgttttacagctcccctagaagtccggacacgacactgagccctgctagcactactagctcgggcgtcagtgaagagtctactactagccacagccgtcccggttccatgcatactactgccttcccttcatctacaaccatgcctggcgtgagtcaagagtcaactgcctctcatagtagccccggttcaaccgatacaaccctgtctcctggcagcaccactgcttccagccttggaccagagtcgactactttccattcctcaccaggtagcactgaaactaccttgcttccagataataccacggctagcggactgttagaagcgtcgacacctgtgcacagcagtaccgggtcaccgcataccaccctgtcgcccgcaggctcaaccaccaggcagggagaaagtacaacctttcaatcttggcccaacagcaaagatacgacgccagctcctcccacaactacaagcgcttttgtggaactctccactacatcccacgggtctccatcaagtactccaacaacccatttttcagcgtcctctacaacacttggtcggtccgaggaatccactactgtgcattcctcacccgtggccaccgctactaccccttccccagctcggagtacaacctccgggcttgttgaggagtccactacctaccatagttccccaggcagtacacaaacaatgcattttccagaatcaaataccacatctggcagaggtgaggagagcaccacctcgcactcttctacaacacataccatcagctcagcaccctctaccaccagcgccctggtggaggagccaacaagttatcacagctcacccggatccacagcgactacgcacttcccagattcaagtacaaccagcgggcgaagtgaggaaagcaccgccagtcactcaagccaggacgctactggaacaatcgttttgccagctcggtctacgacctccgttctgctcggagagtcgacaacatctccgatctctagtggaagcatggagacaactgcgctgcctggctcgacaactacacctggactgtcagaaaagtccaccacctttcattcttcacccagttcaacacccaccacccacttcagtgctagtagcaccaccctggggaggagcgaggagtctaccacggtccattcaagtcctgtggctaccgctacgaccccatcccccgcacgcagcacaacttcagggctcgtcgaagagtcaacagcttatcactcaagccccggatcaactcaaaccatgcattttcccgagtccagcaccgcctctggcaggtcggaggagagtcgaaccagccattcttcaacaacccacactatatcctccccgccaagtacgactagtgcactggtagaggagcctacgtcctaccacagttccccgggttcgatcgccacgacccactttccagagagctctacgacttcgggcagatctgaagagagcactgcttctcacagctctcctgacactaacgggatcactcctctgcccgcacacttcactaccagcgggaggattgccgagtccaccacattctacatttctccaggtagtatggagaccacacttgcctcaaccgcaacaactcccggactatctgccaaaagcaccatcttatattcctcctcacgctctccggaccaaacactgtctcccgctagcatgaccagtagcagtatatcgggagagcctacctccctgtactcccaggccgaaagcactcatacaacagcttttccagcctctaccaccacgagtggcctgtcccaggagagtacaacattccactctaagccaggctccaccgagacaaccttgtctcctggctccattactacttctagtttcgcccaggaattcaccacaccccattctcagcctgggagcgcattatctaccgtgtcacctgcatccaccacggttccagggctctctgaggaatccaccacattctattctagccctggctctaccgaaacgactgcattcagtcacagcaacacgatgtccatccatagccagcagtccacccctttccctgattccccaggctttactcatacagtgctgcctgccactcttactaccactgacattggacaggaatcgaccgccttccactcaagctcggatgcaaccggcacaactccactcccagcgcgatctaccgcatccgacctggtgggagagccaacaactttttacatttctccatcacccacttatacgaccctgttccctgcatcttctagtacctcagggctgacagaggaatcgaccacctttcatacttcaccttccttcacttctactattgtcagcaccgagtcacttgagacgctggctcctgggctgtgtcaggaggggcagatttggaacggcaagcagtgtgtgtgcccccagggttacgtggggtaccagtgcttgtcccccctagagagctttcctgtggagaccccggagaagctcaatgctacccttggcatgaccgttaaggtgacctaccgcaatttcacggagaagatgaatgacgcctcctcccaggagtatcagaattttagcacgttgttcaagaatcgtatggacgttgtacttaagggtgacaacttacctcaataccgaggagtgaatatccgccgactccttaacggcagtatcgtggtgaagaatgacgtgatcctagaggccgactacactttggaatatgaggagctcttcgagaacctcgcagagatagttaaggcaaagataatgaatgagacgagaactaccctgctagatccagactcctgtcggaaagcgatcttatgctactccgaggaagatacattcgtggatagctccgtaacccccggattcgactttcaggagcagtgtacccagaaagcggctgagggctacacccagttttactacgtggacgtgctggatggaaaattggcgtgcgtcaataaatgcacgaaggggaccaagtcccagatgaattgtaacctgggaacgtgccagttacagaggagtgggcctaggtgcttgtgccctaatactaacacacactggtactggggcgaaacctgcgagtttaacattgccaagtcattggtttatggcatcgtcggcgcagtgatggcagttctactcctggcacttattatcttgatcatcctattttccctgtcccagcggaaaaggcaccgcgagcagtatgacgtgccacaagagtggaggaaagaggggacaccagggattttccagaagaccgccatttgggaggaccagaatttgagagagagtaggttcggactggaaaacgcgtataacaattttagaccgacgctggagacagtggactctgggacggagcttcatattcagcgccctgagatggtggcttccacagtttaa

SEQ ID NO: 231113 - DNA, 16008 bp, synthetic construct
  misc_feature 1..16008: note = Description of Artificial Sequence: Synthetic coding sequence
  source 1..16008: mol_type = other DNA
atgctggtcatctggatccttacactcgcactgcggctttgcgctagcgtcaccacggtcactcctggctcaaccgtgaatacatccatcgggggtaacacaacctcggcgagcacgccctctagttccgatccttttactacttttagtgattatggagtctctgtcaccttcattaccggttctactgccaccaaacatttcctagatagctcgaccaacagtggtcactctgaggaatctacagtgagtcattcgggcccaggcgcaaccggcactaccctcttcccaagtcattcggctacaagtgtgtttgtgggagaacccaaaaccagtccaattacaagtgcttcaatggaaaccaccgcactgcctggttcgaccacaaccgccggtctcagcgagaagagtacgacattttactccagtccgagatccccggacagaaccttgagtcccgctaggaccacatcatctggcgtgtctgaaaagagcactacctctcactcacgtcccggacctacacataccattgcttttcccgatagcaccaccatgccaggagtgtcgcaagaaagtactgcgagtcattctattcctgggtccactgacactactttgtctcccggaacaaccacaccttctagcttgggtcctgaatcgactacgtttcactcatcccctggctatactaagactacaagattacccgataatacaaccacttcagggctattggaagccagtacacccgtgcacagtagtaccggctcaccacacaccacactttcaccttcaagtagcactactcacgagggagagcctaccactttccagtcttggccgagttccaaagatacctctccagcgccatccggcacgacgtcagcctttgtgaaactcagtaccacatatcacagttcaccctctagtacgccaacgacacacttctccgcgagctctacaacgttgggacatagcgaagagagcaccccagtgcactcaagtccagttgctaccgctacaacacctcccccagctcggtccgccactagtggccatgtcgaggagtccaccgcttatcataggagtccgggatcgacgcagacaatgcattttccagagtcatccacgacctccggccactcagaagagagtgccacctttcacggaagcacaacccacacgaaatcttcgacccctagcactaccgcggctctggcacatacatcttatcactcttccctaggctctactgagactacccacttccgggattctagcaccatatccggtcgctcggaagaaagcaaggcttcacatagctcacccgatgctatggcaacaaccgtcctcccagccggttctacaccatctgtcctggtgggcgattccaccccgagccctataagttccggcagcatggaaactaccgccttaccaggttccaccacaaaaccaggtctgtccgaaaaatcaacaactttttattcgtccccacgcagccccgacactacacacctgccagcttctatgacttcatccggggtctcagaggaatccacaacgtctcactccaggccgggatccactcatacaacggcttttccaggttctaccacaatgccaggcctatctcaggagtctacagcatctcatagtagtccgggaccaacggacaccactttgtcacccggaagtaccacagcgagttctttgggcccagagtatactacttttcactcccgccctggctcaacggaaaccaccctgctgcctgataacaccactgcttcaggcctgctggaagctagcatgccagttcattcttccacccgtagtccccatacaacacttagtccggctgggtctaccacacggcagggcgagagtaccaccttccactcatggccttctagcaaagacaccaggccggctcctcctaccactacgagcgcgtttgtggagccctccactacttctcacggatctccatcttcaatacctacaacgcatatctctgccagatccacaacttccgggctggttgaagaatcgaccacctatcactcctctcccggaagcacccaaacgatgcattttcccgaatcagatacaacctctggcagaggcgaagagtctacaacttctcactccagcaccacacataccattagtagcgccccatctaccacgtcagccttagtagaagagccgacatcctaccattccagtccgggaagcacagccactacacactttcctgatagctccaccactagcggacggtctgaagaaagtaccgcctctcactcttcccaggacgccaccggtacaatcgtgctgccggctcgaagtacgacaagtgtcctgctgggtgagtctacgacgtcccctatttccagcgggtccatggagacgacggccctgccaggtagcaccacaacaccgggactgtccgagcgctccaccacttttcatagctcacctcggagccctgcaaccactctgagcccagcgagcactactagctcaggcgtgagtgaagagtccaccacaagtaggagcaggccagggtctacacacaccactgcgttcccagactctaccactactcccggtctgagccggcatagtactaccagtcactcatctcctggctcgacagacacaacacttctcccagccagcactacaaccagcgggccttctcaggaatcaactaccagccattcctcctccgggtccacagacaccgctctgtctcctggtagtactacagcactctcttttggccaggagtctacaacattccacagcaatcccggaagtacccacacgactctgttcccggacagtacaacgtcgagcgggatcgtggaggcctccaccagggtacactcatccacaggcagccccagaaccacactgagtcctgcctctagtacaagtcccggactgcaaggcgaatccactgcctttcaaacgcacccagcctccacccatactacgcctagccctccttccactgccaccgctccggttgaagaatcaaccacataccacagaagccccggtagcacacccactacccactttcccgcaagttcaaccacttccggtcactcagaaaaatccacaattttccatagctctcccgacgctagcggaactacaccatcttcagcccacagtaccacttctggtcgcggtgagtccacaacctccagaatctctcctggaagcactgaaattactactttacctgggtccactacaacccccggactctcagaagccagtaccacgttctactcaagcccaaggagtcctaccaccaccttgagcccagcatctatgacttccctgggcgtgggcgaagagtctaccaccagccggtcccaacccggtagcacccactcaaccgtgagtcctgcctcaactaccacacctggcctcagcgaggaatccacaactgtgtacagctccagccgagggagcaccgagacaaccgtgttccctcattccacgactaccagtgtgcatggcgaggagcccaccacttttcactcaaggcccgcttctacccatacaactctctttaccgaggactctactaccagcgggctgaccgaagagtctacagccttccctggaagtcctgcttctacacagacaggactgccagcaaccctgacaaccgccgacctgggagaagaaagtaccacttttccctcgtcaagtgggtctaccggcacgaagttgtctcccgctcggtctaccacatccgggctggtaggcgagagtactccttcaagactttcaccatctagtaccgagacaaccacgttacccggttcacccaccactccatccctgtccgagaaaagcactaccttctacacctcacccagaagccccgatgcgacactttcccctgccaccaccacaagtagcggcgtctcagaggaaagctctacgagccattctcagcccggatctacgcatactactgcatttcccgatagtacaaccacctctgacttatctcaagaaccaacaacctcccactcaagtcagggctcgacggaggcaaccctatctcccggttcaacaacagccagcagcctagggcagcagagcaccacctttcactcctctccaggagatactgaaaccacactcctgccggatgacactattaccagcggacttgtggaggcttctacccctacccactcaagcaccggctcccttcacactacgttgacccccgcaagtagcacatccgctggacttcaggaagagtcgacaactttccagagttggcccagctctagcgatacaactccatctccccctgggaccacagctgctccggtcgaggtgagcaccacttaccactcgcgcccttccagtacacccaccacacatttctccgcgtcatcaactacgttgggcagatcagaggaaagcaccacagtccacagtagtcccggtgctaccggcaccgccctgttcccgacgagaagtgccacatccgtcctcgttggcgaaccaaccaccagccccattagctctgggtccactgagactacagccctccccggtagtacaacgaccgcagggcttagcgagaagagtactacattctactcgtcacctcgcagcccagacaccacactgtcacccgcatcaacgacaagtagcggagtaagtgaggaatctacaacctctcactcccgacccggttcaacccatacaacagccttccccggttcaacaaccatgcctggagtgagccaggaatcgaccgccagtcattcttctccgggttcgactgacacaacactcagccccggatctaccaccgcgtcatcccttgggcctgaaagtacaacgttccattccagtcctggatccacggagaccactctgctgcccgataatacgactgcctccggactgcttgaggcctctacccccgtccattcatcgaccggcagccctcacaccacactttccccggctggctctacaactagacaaggcgaaagcaccaccttccagtcttggcctagctccaaagataccatgccggcacctccgacgacaacatcagccttcgttgagttatcgactacatcccacgggagcccatcgagtacacccacaacacacttctctgcttcgtccaccacgctggggagatccgaagagagcacaaccgtgcactccagtcctgtggccaccgctaccacgccttcccctgcacgcagcactactagcggccttgttgaagaaagcactgcttaccactcctcacccggatctactcagacaatgcacttccccgaaagctctacggcctctgggaggtccgaagagtcccgtacttcacactccagcacaactcacactatttcttctcccccttccacaacttctgccttagttgaggagcccacttcctatcacagttcaccaggatctacggcaacaacacattttccggacagcagcacaacatccggcaggagcgaagagagcactgcctcccactcatcgcaagatgccaccggtactatagtgctgcctgcccgtagcacgacctctgtcctgttgggcgagtctacaacaagtcctatcagttccggttctatggagactactgccctaccaggctccactacaacccctggtctgagcgagaaatccaccactttccatagctctcctcgatcacctgctaccacactgagtcccgctagtaccacatcctctggagtcagtgaagagtcaaccacaagtcactcgcgtccagggtccacccacactacagcctttcctgatagcacgacaacccctgggctgagtcgccatagtacaacttcccacagtagccctgggagcactgacacaacattgctgcccgcttctaccaccacctctggtccgtctcaagaatccacaacatcacattccagccctgggagcacggatactgctttgtccccagggagcaccaccgccctgtcttttggacaagaaagtaccaccttccactcctcacccggttctacacataccacactgtttcctgacagcaccacgtctagcggcatcgtagaggcaagtactagggtacattccagtaccggcagcccgcgtaccactctgtccccagcatcttcaaccagtcccggactgcaaggagaatcgacagcttttcagactcaccccgcttccacccatacaaccccttcgcccccaagcacagcaaccgctcctgttgaagaaagtacgacataccatcgctccccaggatctacacctaccacgcatttccctgcctcttcgacgactagcggccacagtgagaagtccacaatattccacagctctcccgacgcatctgggaccacacctagctcagctcatagtaccacttcaggtagaggcgaatcaaccacctcccgaatttccccgggaagtacagaaattaccactcttcctgggagtacaactaccccaggcctctctgaggccagcaccaccttttacagtagccctcggtccccgacaactactctgtcaccagcttcaatgaccagcctcggagtgggcgaggagagcacaactagccgttcgcaaccgggtagcacccactcgacagtatcccccgcttcaaccacaacccccggactgagcgaggaatctaccaccgtctactccagctcacctgggtccacggagacaaccgtatttcctaggacgcctacgacttctgtgcgaggcgaggagcctactacttttcactcgcggccagcatccactcacacgaccttatttaccgaagactctaccactagcggtctcacggaggaaagcaccgcttttcccggtagcccagctagcacacaaactggcctgcctgcgacacttaccacagctgacctgggagaggagagcactaccttcccctccagctccggatctactggaacaacactcagccctgcgaggagtacaacctcaggacttgtaggtgagagtactccctctcggctgagcccctcaagcacggagacaaccactctccccggttcccccactacccctagtctttcagagaaatcaaccacattttacacgtcccccagatctccagatgctacactgagccccgctactacaacgtcctctggggtgtctgaagaaagttccacaagccatagccagccagggagcacccatactacagcctttccggactccaccacgacacccggactttcccgccatagtaccacctcccacagcagtccaggctccaccgacacaactctgctacccgcttccactacgacctccggaccttcgcaggagagcactaccagtcacagttcccctggttctactgacactgctctttctcccggttccactaccgccctcagcttcgggcaggagagtactacctttcacagcagtcccggatctacacacaccactctcttcccggactctaccactagttccggaatcgtggaggcaagtacccgcgtgcactcgtctaccggatcccctcggactaccctgtccccagcgtcttccactagcccagggctgcagggagagagcacaacattccaaacgcatcctgcaagtacccatactaccccctccccccctagcaccgccacagcgccagtggaggaatctacaacataccacaggtcacccggatctacccccactacccacttcccagcttctagtacaactagcggccattcagaaaaatctaccatcttccattcttctccggatgcctctgggacaaccccttcaagcgcacatagtactacaagcggaagaggcgaaagcaccaccagccggatctcaccgggaagcacagaaatcacaactctacccggatccaccaccaccccagggttatcggaagcaagtaccactttctactcctcccctcggagccccaccactactctctcccctgcctctatgacctccctcggggttggcgaggagtctactacgagccggtctcagcccggtagtactcattctaccgtgagtcccgcttccacaacgacgcccggactgtcagaagagtctactaccgtatatagttctagcccaggttctaccgaaacaacagtctttcccaggtccacgacaacctcagtgcggggagaggagcccaccacctttcatagtaggcccgcatccactcacactactttgttcaccgaagacagcaccactagcggcctgaccgaagaatcaaccgcgttcccagggagcccagccagcacacagacggggctgcccgctactctgaccaccgcagatctaggcgaggagtccacaaccttcccttcctcatctgggtccactggcaccacactctcccccgcaagatccaccacgagcggactggtgggtgagagtacaccgagtaggctgtctccaagtagcaccgagacaaccaccctgccaggcagcccaaccacgcccagtctttcagagaagagtacaactttttacacgtctccaagatccccagacgcaaccctcagtcctgctacaacaacaagcagcggggtaagtgaagaaagcagcacttcccactcacaacccggtagtactcacacaacagcctttcctgattccacaactacgtccgggttaagtcaggaacccaccgcatcacactcatctcaaggctcaacggaggccactttgtcccctggatccacgacggcctcctctctcggccaacagagcaccacttttcactccagtccaggggataccgaaacgacccttctgccagacgataccataaccagtggtctcgttgaagcctctacccccacccacagttccacaggatccctccacacgaccctcactccagccagttctaccagcgctggtctgcaagaggaaagcactacattccagtcgtggcctagttcctcagatacaaccccttcccccccaggcaccaccgcagcccctgtggaagtttctaccacgtaccactccaggccctcatccaccccaacgactcacttttctgctagcagcaccacactggggcgtagcgaggaatctactaccgtccattcatctcctggcgctacgggaacagctctcttcccgacacgcagcgcaacttccgtgctcgtgggtgagccgactacttcccctatcagttctgggtcaactgagacgacggcattgcccggttctacaaccaccgcaggcctttcagaaaaaagtactacgttctactcatccccgaggagtcctgacactactctgtcgccggcttctacgaccagcagcggcgtctctgaggagtccacaacttctcacagccggcctgggtccactcacacaacagctttcccaggcagcactaccatgcctggtgtctctcaagaatccacagcatctcacagttctcctgggagcactgacaccacgttgtctcccggaagtacaactgctagttcgttagggcctgagtcgaccacatttcactcaggacccggttccaccgaaaccaccctgctaccagataacactacggcctccggcctgctggaggcttccaccccagtacattccagtacgggaagcccacacacgaccctgagtccggcaggctctacaacaaggcaaggcgaaagtaccactttccagtcctggcctaattcgaaggataccacacccgcaccccctacaactacctccgcttttgtggaacttagtacaaccagccacggctcgcccagtagtacccctacgactcacttttcagcttccagcaccacactggggagaagcgaggagagcacaactgtccactccagccccgtagccaccgccacaacgccatcaccagctagatcaaccactagcgggctggtggaagagtctactacctatcactcctctccagggtctacgcagaccatgcattttccagagagcgataccacatctgggagaggggaggaatccacaacaagccacagcagtactactcacaccattagcagcgccccaagtactactagtgcgctggtggaagagcccacctcttaccattccagtcccggaagtactgctacaacgcacttccccgacagctcaaccacgagtggtcgctcggaggagagcaccgcctcccattctagccaggatgcaaccggaaccatcgtactgcccgctcggtccacgaccagcgttctgctaggagagagcacgacgtcaccaatctcttcaggatccatggagaccaccgctttacccggatccactactacccctggcctttctgaaaagagtaccaccttccactcgtcacctcgtagtcccgcaaccacactatcccctgcaagcacgacgtcatcaggcgtgagtgaggagtcgacaacttcccattcaaggccgggatccactcatactacagcattcccagattcaacaaccacccccggtctgtctcggcactcaacaacgtcccattcgtctcccggatctaccgacactactctgctccctgcaagcactaccacttcaggtagctcccaggaaagcaccacgagccattcctcgagcggatccacggacacggcattgtcccccggtagcaccactgcgctcagtttcgggcaggaaagcacaactttccacagctccccaggctccacgcatactacactatttccggattctactacatcttctggcatcgtggaggccagtacacgagtgcactcctccaccgggagcccaagaacgactctctcgccagcttccagcactagccccggtttgcagggcgaatctacagcctttcagacccatcctgcgtccacccatactacgccatctcctccaagtacagcaactgctccagtggaggaaagcactacctatcacaggtcccccggatccacgccaacgactcacttccccgcatcttctacgactagtggtcattccgaaaaatctacgatctttcacagttctcctgatgcttctggcaccacaccaagcagcgcccacagcactacttccgggagaggcgagagtaccacttcacgcatttctcctggaagcaccgagatcaccacgcttcccggttctacaaccacacctggactctctgaggcttccacgactttttactctagcccccgatcgccgacaaccaccctgtcgcccgcttccatgactagccttggtgtcggagaggaaagcaccactagtcgatcccaacctggctcaacacactctaccgtcagtccggcatctaccacaacgccaggtctgtcggaagaaagcacaaccgtctactccagctctcccggaagcaccgaaaccacagtgtttccacgcagcactaccacctctgttcgccgagaagagccaaccacatttcacagcaggcccgcttccacccataccaccctgttcaccgaggactcgacgacctccggactgacggaagaaagcacggcttttccaggcagccccgcaagtacacaaactggcctgcctgctacactgacaacagcggaccttggagaagagtccactacttttccctcctcgtcagggtctaccggaaccaagcttagcccagcaagatccaccacttctggactcgttggtgagtcaacaccttctcgcctctccccaagctctacagagaccaccacgctgccagggtctcctacgacaccctcgctctccgagaaaagtaccacattttacacttctccacgctctccagatgcaaccttaagccctgccactactacctcctctggggtgtccgaggaaagctctacaagtcatagccagccaggcagcacacatactaccgctttccctgatagtactaccacatccggtctgtcgcaggagcccactacgtcacacagcagccagggctcaaccgaggcaactttatcacctgggagcaccacagcaagctccctgggtcagcaatcaacgaccttccactccagccccggagataccgagacaactttactgcctgacgacaccattacgtccggcttagtagaggcttccactcccactcactccagtactggatccctacatacaacactaaccccagcaagcagcacatctacaggactgcaggaggagagcaccaccttccagagctggcccagttcttcagacactactccctctccaccttccaccacagccgttcccgttgaggtctctaccacataccatagtagaccaagctcgacccctactacacacttttctgcttcctcaacaacccttggcagatccgaagagtccactacagttcacagcagtcctggagccactgggacagcgctttttccgacacgatccgctacctcagtactggtgggcgaacccaccacatcccccataagctcagggagcaccgagacgacagctctgcctgggagcaccacaacagcaggcctgtcagagaagtcaaccaccttctactctagtccacgaagtccggataccacgctgagtccggcaagcacgaccagttccggcgtatctgaggaatctaccacatcccattcacgccctgggtccatgcatactacagcatttccaagtagcaccacgatgccaggagtcagccaggaatctaccgcgtcacattcctcccccggatcaacagataccaccctgtcacccggatctaccactgccagcagtcttggacctgagagcaccacctttcattccagcccagggtcgacagaaactactctcttgcctgataacactacagcctctgggctccttgaagcatccacccccgtgcactcttccacgggttctccccataccacgctctcacccgcagggagtactaccagacagggggagagtaccacctttcaatcttggccaaattctaaagacacaactccggctccgccaaccactacctctgccttcgtggagctatccaccaccagtcacggctcccctagctctacacccaccacccatttcagtgctagcagcactaccctgggtcgctccgaagaatctacaaccgtccactccagtcctgtggctaccgccacgacccccagcccagcccgaagcactactagcggtctcgtcgaagaaagcacaacgtaccattcttcccccggatcgacacagactatgcacttccctgagtccaacacgacctcgggtagaggggaggaatctacaacctcacactcaagcaccacacacacgatttccagcgctccttccaccacctcagcgcttgtcgaggaacccaccagttatcactcttcccccggatctacggccacaactcattttcccgatagtagtacgaccagcggaaggagcgaggagtctacagcctcacactcaagccaggacgctaccggcaccatcgtgctccccgcacgttccacgaccagcgtcttgcttggggaaagcacgacatctcccattagctctggttctatggagaccacggctttgcccggttccaccaccactcccggactttcagagaaaagcactacctttcattcttcacccagttcgacacccacaactcacttttcagcctcctcaacaactctgggacgttcagaagagagtaccacagtgcactcctcccctgtggccaccgcgaccactccatcccctgccagatcgacaacctccgggctagtggaagagagtaccgcgtaccactcatcccccggatcgacccagaccatgcatttcccagaatcaagtacagcgtccggaaggtctgaggaatctaggactagtcactcctcaacgacacatacaatttctagcccgccttccaccacctccgctcttgtggaggagccaacgagctaccactcctctcccggttccatcgcaacaacacacttcccagagtcttccacaacctcgggtagaagcgaggagtccaccgcctcacattctagtcccgataccaatggcattactcccctccctgcccactttaccacttctggtcgcatcgccgaaagcacgaccttttatatcagcccaggatcaatggagactacgttagcgagtaccgccacaacgcccggactcagcgctaagtccacgatactgtactcctcttcacgcagccctgaccaaacgttgtcacccgctagcatgacatcctcatcaatatctggcgagcccactagcctgtactcacaggccgagagcacccacaccactgcttttcctgcatccacaacaactagcggtctgagtcaggaatctaccacattccatagcaagcctggctctaccgagaccactttatcacctgggtcaataacaacctcttcctttgcccaggagtttacaacacctcactcccagcccggtagtgctctctccacagttagccctgcaagcaccacagttccaggactgtccgaggagagtacgaccttttactcaagtccaggcagtactgaaacgactgcattcagccacagtaataccatgagtattcacagccaacagtctacacccttcccggattcaccgggattcacccacactgtcctgccagccaccctgacaacaacggatattggacaggaatccacagcctttcactccagttctgacgctacaggaactactcctctccccgctaggtctaccgcttccgatcttgtgggtgagcccaccaccttttatatcagtccctctccaacctacaccacgctcttccctgccagctcaagcacttcaggcctgaccgaggaatccaccaccttccacactagcccatcctttacatccacaatcgtgtccactgaaagtctggaaactcttgctccgggactgtgtcaagaaggtcagatatggaatggcaaacagtgcgtgtgtccgcaaggctacgtaggctaccagtgcctgagcccgctcgaatctttccccgtcgagacccccgagaagctgaatgcaacactggggatgactgtcaaggttacatatagaaattttaccgagaagatgaacgatgcctcctcccaggaatatcagaatttcagcaccttgtttaagaatcggatggatgtggttctgaagggggataatcttccacagtaccggggtgtcaatatcaggcgccttcttaatgggagtatcgtagtcaaaaacgacgtaattctcgaggccgattatactcttgagtatgaggaactttttgagaacctggccgaaattgtgaaagccaagatcatgaatgaaaccaggacaaccttgctggatccagacagctgtcgcaaggcaattctgtgctactccgaagaggatacgtttgtggattcttctgtgaccccaggatttgattttcaggagcaatgcacacaaaaagctgctgaggggtacacccagttttattatgttgacgtgttggacggaaagcttgcctgcgttaacaagtgcacaaagggcaccaagagccagatgaattgcaacctgggcacctgccagctgcaaaggtcgggcccacgttgcctgtgtcccaataccaacacacactggtattggggcgaaacctgcgagttcaatattgctaagagccttgtgtatgggatcgtcggggcagtgatggccgtgctcctgttggcactgattattctcatcatcctgttctcactgagccagcgcaagcgacacagagagcagtacgatgttccccaagagtggcgtaaggagggcaccccagggattttccagaagacagcgatctgggaggaccaaaatttacgggaatccagatttggtttagagaatgcgtataataattttaggccgaccctggaaaccgttgactctggcaccgagctgcacattcagcgcccagaaatggtcgctagcaccgtttac

SEQ ID NO: 231114 - DNA, 1536 bp, synthetic construct
  misc_feature 1..1536: note = Description of Artificial Sequence: Synthetic coding sequence
  source 1..1536: mol_type = other DNA
atgaaggcaatcattcacctgaccctcctggcccttctctctgtgaacaccgccacgaatcaaggaaattccgctgacgcagttaccaccacagaaaccgcaacttcaggccctacagtggcagccgctgatacaaccgagactaatttccctgaaaccgcatccaccaccgccaacacgcccttcccaaccgccacctctcctgcacctcctatcatctctacccacagctcgtctaccatccccaccccagccccaccaattatttccacacatagttcaagcacaatacccatacctaccgcagcggactctgaaagtaccacaaacgtcaatagtctcgctacttcagatatcatcaccgcctcatcccccaacgacggcctgattacaatggttccgtcggaaacccaaagcaataacgagatgagtccaacaactgaggataaccagtcttcagggccacccaccggaaccgctctcttggaaacgtccactttaaatagtaccgggccttctaacccttgccaggacgacccttgtgcagataactctctgtgcgtcaagcttcataacacttccttctgcctctgccttgaggggtattactacaattcatcaacatgcaagaaagggaaagtgtttccaggcaaaatatccgtcacagtgtcagaaacatttgatcctgaggagaagcactccatggcctatcaggatttacactccgaaatcacctccttattcaaggatgttttcggcacttctgtgtatgggcagactgtgattctgactgtatccacgtcgctttctcccaggagtgaaatgagagccgacgacaagttcgtcaacgtgaccatcgtgaccatattagcagagaccacttcggacaacgagaagactgtcactgaaaaaatcaacaaagcgatcagatcttccagcagtaattttctgaattatgacctgacgctgcgctgtgactattacggctgcaatcagactgccgacgattgccttaatggtctggcctgcgactgtaagtcagaccttcagagaccgaacccccagtcccccttctgtgtggctagctcactgaagtgcccagacgcctgcaacgcccagcacaaacagtgccttattaaaaagtcaggcggtgcacctgaatgtgcctgtgtcccgggttaccaggaagatgctaacggaaactgccagaagtgcgccttcggctactccggactcgactgcaaggataagttccagctcatcctaacgatagtgggaactatcgctggcatcgtcatcctgtcgatgattattgctcttatcgtgacagcgaggtctaataataaaacaaaacacatcgaggaggagaacctaattgacgaggattttcagaatttaaaactgcggtctactgggtttaccaacctcggggctgaaggatcagtattcccaaaagtgagaatcaccgcatctcgggatagccagatgcaaaatccgtactctagacactcatccatgccacgcccagactactag

SEQ ID NO: 231115 - DNA, 13482 bp, synthetic construct
  misc_feature 1..13482: note = Description of Artificial Sequence: Synthetic coding sequence
  source 1..13482: mol_type = other DNA
atgccccgacctgggaccatggcactttgcctactgacccttgttctttcattacttccacctcaggccgctgctgaacaggatctcagcgtgaatcgagctgtttgggatggtggaggctgtatctcacagggggatgtgctgaaccggcaatgtcaacaactgagccaacatgtccgcactggatctgctgcaaacaccgccaccgggaccacatcaactaacgttgtggaaccccgaatgtatttgtcttgtagtacaaacccagaaatgactagcatcgagtcttcggtaacttctgacaccccaggcgtttcgtccacccgtatgactccaacggagtctagaacaacatctgagtcaacgtcagatagtaccaccctgtttccctcctccacagaagatacttcatcccctaccacacccgaaggcaccgacgttccaatgtctactccctcggaagaaagtataagctctacgatggcatttgtaagtaccgcccctttaccgagctttgaggcgtacaccagcctcacttataaagtggacatgtccacccccctcacgacaagtacccaggcctctagctctccaaccactcccgagagcacgaccattcctaaatccaccaactccgagggatctacacccctgacgtccatgccagcatctacaatgaaggtcgcttctagtgaagccatcactctgctgactactcctgtggaaatctctacacctgtaacaatatccgctcaggcaagcagctcaccgactaccgccgagggccctagtctgtccaacagtgctccgtctgggggatcgacccctttgacacgaatgcccttgtcagttatgctcgtcgtttctagcgaagccagcaccctgagtacaactccagccgcaactaatattccagtgatcacctccaccgaggcttccagctcccccaccacagccgaaggcacgagcattcccacctccacctacaccgaaggttctactcctctcacctccacccctgcaagcaccatgcccgtggcaacgtcagagatgagcacccttagtattactcctgtggacacatcaacacttgtcaccacatccacagaaccaagttctttacctactacagcagaagcaaccagcatgttaacgagcaccttgagcgagggtagcacacccctcaccaatatgcccgtctcgaccatcttagtcgcctcctccgaggcatccacaacctcaacaatcccagtcgactccaaaactttcgtgactactgcatcagaggcctccagttctcccaccaccgccgaagatacaagcatcgccacaagtaccccttctgaagggtcaacccctctgaccagcatgcctgtgtctaccacaccggtcgccagtagcgaggctagtaatttatcaaccactcctgtcgattctaagactcaggtaacaactagtacagaagcctccagttcgcctcccactgctgaggtgaatagtatgcccacctctacgcccagcgagggcagcaccccacttacttctatgtctgtctcgactatgccagtcgccagctccgaagcctccactctgtccactactccggtcgatacatcaactcctgtaacaacctcgagcgaagcatcatcttcttcgaccacccccgaggggacaagtatccccacgagtactccgtctgagggatcaaccccactgaccaatatgcccgtgtccactcgcctggtcgtctcttctgaggcctcaacaactagcactacccctgctgattcaaacacgttcgttacaacatccagtgaggcctcatcaagctccactacagccgaaggcacctcaatgccaaccagcacatacagtgagcggggaaccactattacttccatgtctgtgagcactacgctggtagcctccagcgaggcatcaactctttccacaacacccgtcgactccaacacacctgtcactactagcacagaagccacctcaagctcaactaccgctgaggggacgagcatgcccacgagtacatacactgagggttctacacccttgacgagtatgcctgtaaatactacactcgttgcatcatccgaagcctcaaccctgtctaccactcctgtggatacttcaaccccagtgactacatccaccgaggccagctccagtcctacgacagctgatggtgcatccatgcccacttcaactccttcagagggctccacaccactgacttcaatgcctgtgtccaagaccctgcttacctcatccgaagcttcaacgctgtctacgactccactcgatacctctacccacatcacgacttctaccgaagcatcttgttccccaacaacaacagaagggacctccatgccgatatctacgccttccgaaggcagtcctttgcttacaagcatcccggtgtctattacgccggtcaccagcccggaggcgtctaccttaagtacaacaccggtggactccaactcacctgtcacgacatccaccgaggtgagtagcagtcctacgcctgccgagggtacatctatgccaacaagcacatacagcgaggggaggacacctctgacttccatgccagttagtaccaccctcgtggctacgtccgcaatttccacattgagcacgactcccgtggatacgtccaccccagtgactaacagcaccgaggctaggtcgagcccaaccactagtgaagggacttccatgcctacatccacgcccggagaaggatccacccctttgactagcatgccagacagtacgactccggtggtatcgagcgaggccagaaccctctccgcaacgcctgtcgatacatcgactcctgtaacaacctctacagaggcgacctccagtcccacaaccgctgaaggaacttccatccctacttctacgccgtctgaagggacaacacctttaacttctactcctgtgtcccataccctcgtggcgaattctgaggcttccaccctgagcaccactcccgtggactcaaacacaccgctcacaacaagtactgaagcttcctccccacctcctactgcggagggcacatccatgcccacatccacacccagcgaaggtagcactcccctgacccggatgcccgtcagtaccactatggtggcaagcagcgaaaccagtaccttaagtaccaccccagccgatacctcgacacccgtgaccacttacagtcaagcctcttcttctagcacaactgccgatggtactagcatgccgactagcacctactctgaaggctccactcctctgacatccgtccctgtgagcacaaggctggtcgtctcctctgaagcgagcaccctgagcacaacccccgtggatacatctatccccgtgactacaagtaccgaggccagttcttctccaacgacggctgaaggcacttcgatccccaccagtcccccttctgaggggaccacacccttggcttctatgccagtgagcacgactctcgtcgtcagttccgaggccaacacactctccactacacccgtggactccaaaacccaggtcgccacttccactgaggcttcctccccccctcctactgcagaggtgacaagcatgcctacttctactccaggcgagcgctcaactccattgaccagtatgcccgttaggcatactccagtagctagctccgaggcatctaccctgagcacatctcctgtggatacgtccactcctgtgaccactagcgcagagacttcgtcctctccaactactgccgaagggacgagcctgcctacttctactacctccgagggaagcacactcctgaccagcatccctgtctccacaactctcgtgacgagccccgaggcatccacccttttaactacaccggtggacaccaaaggaccagtggtgaccagcaatgaggtgtcttcttcacctacccccgctgagggcacctcaatgcccacctcgacttattccgagggaagaacccctctaacctcaatacccgtaaacaccaccctggtcgcctctagcgctatttcaatcctatctaccacacctgtggataacagcacgccagtgaccacttcaactgaagcttgttcttcgcccacaaccagcgaaggcaccagtatgccaaactccaatccttcagagggtactacccctctgacttcaatacccgtgagcaccacgcccgtggtgtcaagcgaggcctccactctgtccgccacccccgtggacaccagcactccaggcacgaccagcgccgaagcaacatcctcaccgactaccgcagagggaatttccattccaacttcaaccccaagcgagggtaaaaccccactgaagtctatacccgtgagcaacacccccgtcgcgaactctgaagcatcaacattgtcaaccactcctgttgattctaatagccctgttgtaaccagcactgcggtgtcctcaagtcccaccccagcggagggaacctcgatcgccattagcacaccgtctgaaggctctactgctctcacttctatccctgtctccactaccaccgtggcctcttccgagataaactcattgtcaaccactcccgcagtcacaagcactccggtgactacttattcccaagcttcatctagtccaaccaccgctgatggtaccagcatgcagacctcaacctacagtgaagggagtacccccctgacctcactccctgtgtcgactatgcttgtagtgagttccgaagctaacacgctgtccaccacaccaatcgactcaaaaacgcaggtcacggcgtcgaccgaagctagttccagtactactgccgaggggagctcaatgaccatcagcactccatcggaaggctccccattactgaccagcattcccgtgagtacaactcctgtcgccagccctgaagcgagtacacttagtacaacgcccgtggattcaaatagccctgtcataaccagcacagaggtaagctcgtctccaacacccgcagaaggcactagtatgcccacttctacctacacagaaggcagaacgcctctaacctctatcacagtccggacgacgcccgtggcctccagcgccattagcacgttatccaccactcccgttgataactccactcccgtaaccacatccaccgaagcacgatcctcacctacaacatcagaaggcacctctatgcccaatagcacacctagcgagggaactacccccttaacatcgatcccggtgtccactacgccagtgttgtcctccgaagcctcaaccttgagcgcgactcctatcgatacatctaccccggtgaccacttctaccgaggccacaagcagtcctactacagccgaaggaactagtatacctacttccacactatcagaagggatgactccgctgacatccacaccggtctcccacaccttggtagccaactctgaagcctctacgttgagtacaactcccgttgattcaaattcgccagtggtgacctccacagccgtgtcgagcagcccaacgccagcggaaggcacatccatagcgacatcaactccaagcgagggtagtacagcgcttacttcaattcctgtgagcaccacaaccgttgcatccagtgaaacgaacactttgagtaccacccctgcagttacatcaacgcccgtgacaacctacgcccaagtttcttcgagtcccactactgctgacggatcatccatgccaacatctacccccagggaagggaggccccctcttacctcgattcctgtgtccactaccactgtggctagctccgagatcaacacactctccaccactctggccgacacacggaccccggtgaccacgtacagccaggcaagctcttcgcctactacagccgatggcactagcatgccaactccagcatacagtgaaggcagtacaccactgacctcaatgccactgtctactaccctggtggtgagttcggaggcctccactctctcaactacccccgtggatactagtacaccagcgacgacgtcaacagaggggtccagctcaccgacgacagcaggtggtaccagcattcagacgtccacaccttccgaacgcactacacctttggccggtatgcctgtgtctacaacactggtggtatcttccgagggcaataccctgagtactacccctgtagacagtaaaactcaggtcactaatagtactgaggctagcagcagcgccactgccgagggatcaagtatgactatctctgccccatccgagggctcacccctgttaacatctatccccttgtctaccactcccgtggcaagtcccgaggccagcaccctctccacaacacctgtcgacagcaattcccccgtgataacatccactgaagtttccagttcccctatcccgactgaaggcacctcgatgcagaccagcacatatagcgatcgcagaacaccgctcacatctatgcctgtcagcacaaccgtggtggcctcatccgctatctctactctgtctactaccccagtggatacctctactccggtgaccaattctactgaggccagatccagccctaccacctcagagggcacatctatgccaacgtcaacccccagtgagggatccactcctttcacttctatgcctgtgtctacaatgccagtcgtcacatccgaagcctctaccctcagtgcaacccccgtcgatacaagcacccctgtcacaacttccaccgaggccacaagtagcccaacaacagccgaggggacttcgatccccaccagcacactgtctgaaggaacaacaccgctgacctccatccctgtgagccataccctggtcgctaacagcgaggtatctaccctcagcactacacccgtggactccaatacaccatttacgacatccacagaggcatcatctcccccaccaacagctgaagggacctctatgcccacgtcaacttcctccgagggtaacaccccattaactagaatgcctgtttccaccaccatggtagcttcctttgagacgagcaccctgtccactacacccgcagacactagtacaccagtcactacttactcacaagccggttcctcacccaccactgcagacgacacaagcatgccaacatccacatactccgagggttcgactcctctgacctcagtaccagtgtccacgatgcctgtcgtgagcagcgaagcgtcgacacatagcaccacgccggtagatacttcaacaccagtgacaactagcacagaagcaagcagctccccaaccaccgccgaaggaacttctatccctacaagccccccttcagagggtactacgccgctggcgtccatgcctgtgtcgaccactcccgtcgtctcttccgaggccggaacactgagcacaacaccagtggatacatcaacccccatgacaacatcaacggaagcatcgagcagccccactactgctgaggacatcgtggtgccaatcagtacagcgtcagaaggcagtactctccttacttcaatcccagtgtcaacaaccccagtcgcttcacccgaggctagtacactgtccaccacgcctgtggactcaaatagtccagtagtcacctctactgagattagttccagcgccaccagtgcggaaggaacatcaatgcccacctctacttatagcgaaggcagcaccccgctgaggtcaatgccagtaagcacaaagccacttgcttcttccgaggcatctacactgagtactaccccggtcgatacatcaatcccagtgacaacaagcaccgaaacatcctcatcccctactaccgctaaagatacttctatgccaatctccacgccctctgaagtctctacttctctgacctctatcctggtgtcaacaatgcctgtagcctcgtccgaggcctcaaccctgagcacaacgccagtcgatactcgcacccttgtgacaacctcgactggaacttcgtcatcacctacaactgccgaagggagcagcatgccgacaagcacccctggtgaaaggagcacgccactgactaatatactcgtgtccaccacactgctggccaacagtgaggcttcgactctgagcacaacgccggttgatacctccacccctgtgaccactagcgctgaggcttcttccagccccacgacagccgaaggtacaagcatgaggatcagcacaccctcagatggatctacaccactaaccagcatcttggttagcactctgccagttgcatctagcgaggcttctaccgtcagcacaactgcagtcgacactagtattcccgtgactacatcaacggaggcctcttcatctccgaccacggcagaggtgaccagtatgccgacttccacaccgagtgaaacctccacccctctcacaagcatgcctgtgaaccacacacccgtggcctcctccgaggccggaacactgtcaaccactcctgtcgatacatcaaccccagtcaccacttctaccaaggctagctcttcccctaccaccgctgagggcatcgtcgtccctatatccaccgcttcagagggatctactcttctcacatccattcctgtgagtactacacccgttgcctcaagcgaggcgtccacattgagtaccactccagtggataccagcattcctgtcactaccagcactgagggatcttcgtcccctacgacggctgaggggaccagcatgcccatcagcaccccctccgaggtgagcaccccgctgacctcaatcctggtctcgaccgtgcccgtggcaggttctgaggcgtcgacgctgtcaaccacccctgtggatacgaggactcccgtgacaacatctgcggaggcatcttcttcccctacaacagcggaggggacctcgatgccaatcagtacacctggcgaacggagaacaccccttacttcaatgtctgtgagtacaatgcctgtggctagttctgaagcaagcactctgtcaagaacacctgcagacacgagcacccctgtgactacctccacggaagcatctagctcaccgactactgccgaaggcacggggattcccatctctaccccatctgagggttccaccccgctgacttccattcccgtgtccacgacccctgtggcaatcccagaagcatccaccctgtccactactcccgttgattccaattcacctgtcgtcactagcacagaagtgtcatctagtcccacgcccgctgaaggcacatctatgccaatctctacatacagcgaagggtccacgcccttgaccggtgtgcctgtctcaacgaccccagtgacctctagtgccatcagcacgctaagcaccacccctgtcgacacctcgacccccgtcaccacctctaccgaagcgcactcctcccccacgacaagcgagggtacttccatgcctacttcgacaccgtccgaaggcagcactcccctgacatacatgcctgtcagcactatgctggtcgtaagctccgaggactccacattgtcggcaactccagtggacaccagcacgcccgttaccacaagcacagaggccactagctcaaccacggccgagggaacttctattcctacaagcacgccatccgaaggcatgactccgctcacgagtgtaccggtatccaataccccggttgctagctcagaggcgtccatcctaagcacgacgcccgttgacagcaacacccctctgaccacgagtactgaggctagctcatctccccctactgctgagggcaccagcatgccaaccagcacccctagcgaaggttccacacctttaacaagcatgccggtttctactactaccgtggcatcttccgaaactagcactttgagcaccacccctgccgacacctcaacacccgtcacaacgtactctcaagcttccagcagcccacccattgccgatgggacctcaatgcccactagcacatacagcgagggctcgactccactgacaaacatgagttttagtacaacacccgtcgtttcgagcgaggcatcaaccctgtcaactacaccagtggacacaagcacccccgttactacatctaccgaggcatcattgagccccaccacagctgagggaacgagtataccaacgagctcaccctctgaaggcacaacacctcttgctagcatgccagtatctacaacgcccgtcgtctccagtgaggttaatacccttagcacaactccagtggattcgaacacactggtgactacctctacggaggccagctctagccccacgattgctgagggcacatcgttgcccaccagcaccacttccgagggatccactcctctgtctatcatgccactttcgactacacctgtggcttcatcagaggcctccacactcagcacgactcctgtagacaccagcaccccagttaccacgtcaagccccacaaatagcagccctaccacagcagaggtcacgtctatgccgacaagtacagccggagaaggctctaccccactcaccaatatgcccgtgagcactactccggtcgcttcgtcggaggctagcacactctcaactacaccagtcgattctaatacattcgttacaagctcctctcaagccagctcatctccggcaaccctacaggttaccactatgcgcatgtcaacacctagcgaagggagtagctcattgacaacgatgctcctgtcttctacctacgtgacgtcctctgaagcatcaactccttccaccccctcggtggacaggtcaacgcctgtcaccacttccacccagtccaacagcacccctaccccacctgaagtgatcactctgccgatgtcaacaccctctgaagtctccaccccacttacaattatgcccgtgtctacaacttcggtgaccatttccgaggcgggaaccgcttccactctcccggtcgatacctccacacctgtcattacgagcacccaggtttctagtagccccgttacccctgagggcaccactatgccaatctggaccccaagtgaagggtccactcctctgaccacaatgcccgtgagcactacgcgtgtgactagctctgaaggcagcaccctatcaacaccatctgtggttacttcaaccccagttacgacctctacggaggcgatctcatcttctgccactctagactcaacaacaatgagcgtaagcatgccgatggagattagtactctggggacaacaattctggtttccaccactccagtcaccagatttcctgagagctccacgccctccataccatcagtgtacacctcaatgtctatgaccacagcttccgagggtagctcatcgcccactacactggaggggactactacaatgcccatgtctaccacatccgagcggtccactcttctcactacggtgctaatatcaccaatctctgtaatgtctccatctgaagcgagcacattgagtacacctccgggagacacctctactccgctgcttacaagcactaaggcaggaagttttagtatccctgccgaggtgacaaccattagaataagcataacgtctgagcggtcaacacccttgacaaccctgctagtctcaacgacgctcccaacgagttttcctggcgcatccatcgcatcgaccccccctctggatacctcaaccactttcactccctccactgatactgcgagtacccccactattccggtggcaacaaccattagtgtaagcgtcatcaccgaaggatctaccccaggaacaactatctttattcccagcactccagtaaccagcagcaccgccgacgtgttccccgcaaccacgggcgctgtgtcaacacccgtcatcaccagcacagagttgaacactcccagtactagttcaagtagtactaccacctccttcagcaccaccaaggaatttactacgcccgcaatgacaaccgccgcacccttaacatacgtaaccatgagtaccgccccatccaccccaaggacaacatctagaggctgcaccaccagcgcctccacactctccgccaccagcacaccgcatacctcaacttcggtgacaacacgccctgttacacctagttcggagtcaagtcgaccttccactatcacatcccataccattcccccaacctttcccccagcacatagttctactcctccaacaaccagcgcttccagtacaaccgttaatcccgaagctgtgacaacgatgacaacaaggactaagccttcaacccgcaccacaagcttcccaactgtcacaacgactgcggtaccaacaaacaccacaatcaagtctaatcccacgtctactcccacagtgcctaggaccactacgtgtttcggcgatgggtgtcagaataccgcgagccgctgcaaaaatggaggcacatgggatgggctgaagtgccagtgtcctaatttgtactacggcgaactgtgtgaagaagtcgtgagcagcatagacattggtcctccagaaactatctcggctcagatggagttaacggtgacagtgacctcagtgaaatttaccgaagaactcaagaatcactcaagtcaggagtttcaggagtttaaacagactttcacagaacagatgaatatcgtgtattctgggattcccgaatacgtaggggtcaacatcaccaaattacgcttgggctccgttgtggtcgagcatgacgttcttttgcgtacaaaatatacacctgaatataagactgttctcgataacgcaacggaggtggtgaaggagaaaatcactaaggttacaacacagcagataatgataaacgacatttgctcagatatgatgtgctttaacacaacggggacacaggtccagaacattaccgtaacacagtatgaccctgaagaggattgcaggaagatggcgaaagaatacggagactacttcgtggtagagtaccgcgaccaaaaaccttactgcatttcaccctgcgagcctggcttttctgtgagcaaaaactgcaacttgggcaaatgccagatgagtctgtctgggcctcaatgtttatgcgttaccactgaaacccactggtattctggggaaacctgcaatcagggcactcagaagtctctagtatacggcttggtgggcgcaggcgtggtgctgatgcttatcatcctggttgccctcctgatgctggtgttccgcagcaaaagagaggttaagcgccagaagtaccgcctgtctcagctttataagtggcaagaggaagatagtggtccagcccctggcacattccagaatataggattcgatatctgccaggacgatgacagtattcatcttgagtctatctacagcaactttcagcctagtctgcggcacatcgaccctgagaccaagattagaatccaacggccacaggttatgacgacgtctttctaa

SEQ ID NO: 231116 - DNA, 843 bp, synthetic construct
  misc_feature 1..843: note = Description of Artificial Sequence: Synthetic coding sequence
  source 1..843: mol_type = other DNA
atgacgactgctctgggcagccagctatccagctcccaaacagtgatccccggatcctctggaactatctcacatactactgtggccccaggcagctctgtgacaggtactacaaccggtgctagtgatgatcaggtcacaggttctaaaacggggaccactggagttgccctgagcaccacagttgcaccaggatccagtagtacagaagccacaactagcacaggtgtgcaccggaccactgtggtgggacaaaaaaccggagctaccacccgaggatcagctaagcaaggcaccaggtcgacgatcgaggctacaaccagtttcaggggaaccgggacaaccggctctggtatgaatactggaaccactggagtagtgagtgggaatactatatctccctccagctttaataccgaggccacatccggcacctccgaacggcctaatcccggaagcgaaattggtactaccggaattgtcagtggcactacggttgctcctggcagtagcaacaccgaagccacaacatcccttggaaacggcggaaccacggaggcaggctctaaaatcgttaccacaggcatcacgactggcaccactatcgttcctggttcttttaacacaaaagccactacttccaccgatgtaggcgtcgccactggcgtgggcatggcaacaggcatcaccaatatcatcagcggcaggtcccagcccactgggagcaagactgggtacaccgtgactggctccggcaccacggcccttcctggtgggttcagaaccgattcccccagtttcccattattcttgatctgttcttataggggtcacaatttttag

SEQ ID NO: 231117 - DNA, 837 bp, synthetic construct
  misc_feature 1..837: note = Description of Artificial Sequence: Synthetic coding sequence
  source 1..837: mol_type = other DNA
cctactggcacgcagactccaacccccacgcctatttcgacgaccaccactgttacccccacgccaacccccacggggacacagaccccgacaacgactccaatcaccaccacaacaactgtgacacccacaccaaccccaaccggcactcagactccgaccaccgtattgatcactacaacaacaacaatgacaccaactcccacccccacatctaccaaatccactactgtgaccccaatcacaacaactactacagtaaccgcaaccccaacccctaccggaacccaaacgccgacaatgatccctatcagcacgacaacgaccgtcacacctactcctaccccaacgaccggatcgactggaccacccacccatacatccactgcacctattgccgagttaaccaccagtaatccccctcccgagtcatccacacctcagacatcccgtagcactagctcgcccctgaccgaatctacgaccctcttatcaacactgccacctgctattgagatgactagcacagccccaccaagtacgcctacagcccctacaactacatcgggtggacacacactgtctccccctccctccacaactacctctcctcctggcaccccaacccggggaactacaactggctcaagttctgcgcctaccccgtctacggttcaaaccacaacgacgtccgcatggacccccacacccacgcctctgtctacacccagcattattcgaacgaccggcctccgtccatacccctcaagcgttttaatatgctgcgttctgaacgacacttactacgcccctggtgaagaggtctataacggatag

SEQ ID NO: 231118 - DNA, 5342 bp, synthetic construct
  misc_feature 1..5342: note = Description of Artificial Sequence: Synthetic coding sequence
  source 1..5342: mol_type = other DNA
atggggttgccattggcacgcctggcggcagtatgtcttgccctgtcattggccggaggttcagagctgcagaccgagggacggactcgcaatcacggtcataacgtttgctccacctggggcaattttcactataaaacctttgacggcgacgttttcaggttcccaggcctttgcgattacaacttcgcctctgactgtagagggtcttataaagagttcgctgtacatttgaagcgcggacccggacaagctgaagcacccgctggagtagaatcgatcttactcacgattaaggatgataccatctacctgactcggcacctagccgtcctgaatggagcagtagtgagtaccccccactattctcctggacttctgattgagaaaagcgatgcatacaccaaggtgtactcccgggcaggactgacgcttatgtggaacagagaagatgctttaatgctggagttagacacgaaattcaggaaccatacctgtgggctttgtggggactacaacggactccaaagttatagtgagttcctttcagacggggtgctgtttagtccactggaatttggtaacatgcaaaagatcaatcagcccgatgtcgtgtgtgaggatccagaagaagaagtggccccagcatcttgctcagaacatagggccgagtgtgaaagactgctgactgccgaagcctttgccgactgtcaggatctcgtcccgttggagccctatctgcgggcatgccagcaggatagatgtcgctgccccggtggcgacacctgcgtgtgttcaactgtcgcagagttctcacgacagtgtagccatgccggaggacgcccaggaaactggcgaactgcaaccctctgcccaaagacctgtccgggaaacctggtgtatttggagagtggctcgccttgcatggatacgtgctctcatctggaggtatcttccctgtgcgaggaacataggatggatggctgcttctgcccagaaggaacggtgtatgatgacatcggagacagcggatgtgttccagtgtcgcagtgtcattgtcggcttcacggccacttatatacgccagggcaggagatcactaatgactgcgagcaatgcgtttgtaatgccggaagatgggtgtgtaaggatctcccttgccctggaacttgcgctctggagggcggatcgcacattactacctttgatggtaaaacttatactttccacggcgactgctactatgtgcttgccaagggcgaccataatgatagttacgcgcttctgggcgagctggctccctgtggcagtaccgacaagcaaacatgcctcaagacagttgtgttgttagctgacaaaaaaaaaaacgtcgttgtcttcaaatcagacgggtctgtcctgcttaatgagctgcaagtaaatcttccccacgtgaccgcgtccttctcagtgttcagaccctcaagctaccacattatggtgtccatggcaattggtgtgcgcctgcaagtccagctagccccagtcatgcaactttttgtcaccctggaccaggcctctcagggacaggtgcaaggactttgcggcaattttaacgggctcgagggcgatgactttaagacagcctccgggctggtggaggctacgggcgctggcttcgccaatacttggaaagcccagtcttcctgtcatgacaagctggactggctggatgacccatgctccttgaacattgaatccgctaattatgcggaacactggtgttctcttctaaaaaaaactgagactccctttggtagatgtcactcggcggtcgatcctgcagaatactacaaacggtgcaaatacgatacctgtaactgtcaaaacaatgaagactgcctttgcgccgctctcagttcttatgccagagcatgtactgcaaaaggcgtcatgttatgggggtggagagaacacgtttgcaacaaggacgtgggatcgtgccccaattcacaagtgttcctgtacaacctgacaacgtgccagcaaacatgcaggtcactttcagaggccgatagccattgcctggagggattcgctcccgtggatgggtgtgggtgtcctgaccacacctttctcgacgagaaaggtcgatgtgtgcccttggctaaatgttcctgctatcacagggggttatacctagaagccggagatgtggtcgtccgacaagaagagcgctgcgtgtgtagagatggccgactgcactgtagacaaatccgcctaatcggacaaagctgtaccgcacccaagatccacatggactgttctaacctcacagcgctcgcgacctccaaacctagagctctcagctgtcaaacgctagctgctggttactatcacacagagtgcgtgtccgggtgtgtctgtccagacggccttatggatgatgggcgagggggttgcgtggtggagaaggagtgcccgtgtgtccataacaatgacctttactcaagtggagcgaagatcaaggttgattgcaacacctgcacctgcaagaggggtagatgggtctgcactcaggctgtttgtcatggaacctgcagcatttatggatcgggacactacatcaccttcgacggtaaatactatgatttcgatgggcactgcagttatgtggcggtgcaggattactgtggccagaactccagcctggggagcttcagcatcatcacagagaatgtcccgtgtggaacaacgggcgtgacttgcagcaaagccattaagatcttcatgggcagaaccgagctgaaacttgaggacaagcatagagttgttatccagcgagatgagggccaccacgttgcctacaccactcgggaggttggacaatacctggtggtggagagcagcacgggtatcattgtaatctgggataagaggacaactgtctttataaaactcgcaccaagttacaaggggacagtatgtggactttgcggcaattttgaccataggtcgaataacgacttcactactcgggatcatatggtcgtaagctccgagcttgactttggtaatagctggaaggaagcacccacatgtcccgatgtgagtacaaacccagagccctgcagtctaaatccccaccggcgtagttgggccgaaaaacagtgtagcatcttaaagagtagcgtctttagtatttgccactccaaggttgaccccaagcccttctacgaggcctgtgtgcatgactcatgttcttgcgatacaggcggtgattgcgaatgcttttgcagcgccgtggccagctacgctcaagaatgtaccaaggagggcgcatgtgttttctggcgaactcctgatctgtgtcccatattttgcgactactacaatccaccacacgagtgtgaatggcactacgaaccctgcggaaatcggagttttgagacttgccgaacaatcaatggaatacacagtaacatctctgtgtcatacttggagggctgttatccaaggtgccccaaagatcgaccgatctatgaagaagatcttaagaagtgcgtgacggccgacaagtgcgggtgctatgtggaggatacgcactatcccccaggggcatccgtccctacagaagaaacctgcaagtcctggtgtacatgcacgcagacccacaccgcttatcatgtacatactcacggtaagatccttaaccagacacaggatggcgctttctgttactgggaaatatgtggtccaaatggaaccgtggaaaaacactttaacatctgcagcatcaccacccgaccttctaccctgaccacatttaccactatcaccctgccaacaactcctacaacgttcactaccacaacgaccaccacaacccctacatctagcaccgtcctctccacaacccccaaattgtgctgtttatggtctgactggattaatgaagaccacccctcctctggaagcgatgatggggatagggagacctttgacggagtctgcggggctcccgaggatatcgagtgcaggtctgtaaaagatccccacctctcactggaacagcttggacaaaaggtccaatgtgacgtgtcagtgggattcatctgtaagaacgaggaccagtttgggaatggtcctttcggcttatgctatgactataaaatacgcgttaattgttgctggcctatggataagtgcatcaccacccctagccctcctacgactacaccatctccccctcccaccagcacaacaactttgccacccaccacaacgcccagcccccctaccacaaccacgacaactccccctccgaccacgacgccttctcctccaatcacaaccaccacaacccctccccctactaccacccccagtccacccatctcaaccaccacaactccaccacctacgaccacccctagcccccctacaaccaccccctccccacccaccacaactcctagtcctcccaccaccacaactactaccccgcctccaactactacgccaagccctcctacaactacaccaattacccctccagcttctacgaccactttacctccaacgaccactccgagtccccctactacgactaccaccaccccccctcctacaacaactcctatcaccacaactaccacggtcacccctactccaactcctacaggtacccaaacacctactaccaccccaattacgactacaactactgtcactcccacgccaacccccacagggacgcagactcctacctcaacacctattactaccaccacgactactcctacacccacagccattacaaccactactaccgtcacgccaaccccaacccccactggcacacaaacccctacaaccacacctatcacgaccactacgactgttaccccaaccccaacccccaccggaacccagtcacccactcccacagcgattactactactaccaccgtgacccccactcctacacccacagggacgcaaacccctacatcgacccctattaccactactaccacagttacgcccactcccacacctaccggcacacagacacctactcctacccccatctcaactacaacaacagtgaccccgacacctactcccacagggacccagacaccaaccacaaccccaattacaaccactacaaccgtgacacccactcctacacccacaggaacccagacacctactactacaccaaccccgacaagtacaaaatccacaaccgtgacccccattacgacaactacaaccgtgaccgcaacccctacccctactggaacacagacacccaccatgattcctatctctacgacaactacggtgaccccgta

SEQ ID NO: 231119 - DNA, 1230 bp, synthetic construct
  misc_feature 1..1230: note = Description of Artificial Sequence: Synthetic coding sequence
  source 1..1230: mol_type = other DNA
gatattgagtgtcgatccgtaaaggatccccacctgtctcttgaacaactcggccagaaggtgcaatgtgatgtgagcgtagggtttatttgtaagaatgaggaccagtttgggaatgggccatttggactttgctatgactacaagatcagagttaattgctgttgcacccctactagaggaaccactacagggtcctctagcgcccctaccccttctaccgtccagactactacaacatccgcgtggacaccaactcctacccctctgagcacaccatcgattataaggacgaccggacttaggccctatcccagcagtgtgcttatctgttgcgttctgaacgacacctattacgcccctggcgaagaagtttacaatggaacctatggcgatacgtgctacttcgtgaactgcagcctcagttgcacgctcgagttttacaactggagttgccccagcactccgagcccaacacccaccccctcaaagagcacaccaactccctccaaaccaagttcgacccctagtaagccaactcccggtactaagcctcctgagtgcccagattttgaccccccacggcaagaaaatgagacgtggtggctgtgtgattgttttatggccacatgtaaatacaataatacggtggaaattgttaaggtggaatgtgagccgccacctatgcctacctgttctaacggcctccaaccagttcgagtggaggatccagacggctgctgctggcattgggaatgcgattgttattgcacggggtggggtgatccacattacgtgacatttgacggcctgtactattcgtaccaagggaattgtacgtacgtgttggtggaggagattagtccttctgtagacaacttcggggtctatatcgacaactatcactgcgatcctaacgataaggtgagttgcccgaggacattaatcgtcaggcatgaaacacaagaagtgctgatcaaaaccgttcacatgatgcccatgcaagttcaagttcaggtcaatcgtcaggcagtggccctgccgtataagaagtatggcttagaggtctaccaaagcggaattaattatgtcgtagacatccccgaactcggcgtactagtatcctataacggactcagttttagcgtgcgtttgccatatcaccggtttggaaataatactaaggggcagtgcggaacatgcactaatacgacgagcgacgactgttag

SEQ ID NO: 231120 - DNA, 8453 bp, synthetic construct
  misc_feature 1..8453: note = Description of Artificial Sequence: Synthetic coding sequence
  source 1..8453: mol_type = other DNA
atgggcctcccacttgctcgcctggctgcagtttgcctggctctctccctggctggcggaagcgagttacagacggaaggacggactagaaaccacggccacaatgtgtgcagtacctgggggaacttccattacaaaactttcgatggcgacgtgtttcgctttccgggtctgtgtgactataacttcgctagcgattgccgaggcagttataaagagtttgccgtgcacctgaaacgtggccctggtcaggccgaggccccagctggagttgagtctatcttgctgactataaaggacgacaccatctacctgacgcggcatctggctgtactgaacggtgccgtggtctcaactcctcactactccccgggactcctgatcgagaagagcgacgcatacaccaaagtgtactctcgagctggcctcacactgatgtggaacagagaggacgctctgatgctggagctggacaccaaatttcggaatcacacttgtggtttgtgtggagactacaacggccttcagtcctattccgagttcctgtctgatggagtgctcttttcacctctggagttcgggaatatgcagaagataaatcagcctgacgtggtctgtgaagacccagaggaggaggtggccccagctagctgttctgagcaccgcgctgaatgtgaacgactgcttacggcagaggccttcgctgattgccaggatctagttcccctggagccataccttcgggcatgtcagcaagaccgctgccgctgcccgggaggcgatacctgcgtatgcagtactgtggctgagtttagccggcagtgctcacacgccggtggacgcccaggtaactggagaactgcaacactgtgtcccaagacttgcccgggaaacctggtctatcttgagtcgggttctccctgcatggatacatgcagtcacctggaagtgagtagcttatgcgaagaacatcgaatggacgggtgtttctgccctgaagggactgtctatgatgacatcggtgacagtggatgcgtgcctgtcagccagtgtcattgccgtttgcacgggcacctgtatacgcctgggcaggaaatcacaaacgactgcgagcaatgcgtatgcaacgccggtagatgggtatgcaaggacctgccgtgcccgggtacttgcgctctcgaggggggatcacatattactacctttgacggcaagacgtacactttccacggagattgctattatgtgctggcaaagggggaccacaacgattcctatgcgctgctcggtgaattggccccatgcggctccaccgataagcaaacatgtttgaaaacagtcgttcttctagccgacaagaagaaaaatgtggtggtgttcaagtcagacggctccgtgctgctgaacgagctgcaggtgaacctgccacacgtgactgcaagtttcagtgtcttcaggccctcatcctaccacatcatggtttcgatggctattggcgtacggctgcaggtccagctggctcccgtgatgcagttgttcgtgacactcgatcaggcatcccagggtcaggtgcaggggttatgcgggaattttaacggactcgaaggggacgatttcaagaccgcatccggccttgtggaagccacaggggcagggtttgcaaacacatggaaagctcagtcgtcttgccacgataagttggattggttagacgatccttgcagcctgaatattgagtctgcaaactacgcagaacactggtgctccttgctgaagaagaccgagacaccgtttggtcggtgtcacagtgcagtcgatccagccgaatactataaacgatgtaaatacgacacatgtaattgccagaacaacgaagactgtctgtgcgctgccctatcctcatacgccagggcctgtactgcaaagggagtaatgctatgggggtggagagaacacgtatgtaataaggatgtgggcagctgtccaaattcccaagtgtttctctacaacctcacaacctgtcaacagacctgccggagtctgtccgaggctgactcgcactgcctggagggattcgccccagtggacgggtgtggatgtccagaccacacttttctggacgaaaaaggcagatgcgtgcctcttgccaagtgtagctgttatcacaggggtctgtacctggaggccggtgatgtggtggtccggcaagaagagagatgcgtgtgccgtgatggaagacttcactgtcggcaaatacgcctcattggccagtcctgtacagcgccaaaaatccacatggattgctccaatctgaccgctctggcgacaagtaagccacgtgccctgagttgtcagacattagcagccggatactatcacaccgagtgcgttagcggatgtgtctgcccagatggccttatggatgatggcaggggcggttgcgttgtagagaaagagtgcccctgtgtccataacaacgatctttacagctcaggggctaagatcaaggtggattgcaatacttgtacctgcaagcgaggcaggtgggtgtgcacacaggccgtctgccacgggacctgttccatctacggctcgggtcattacatcaccttcgatggcaaatactacgattttgacgggcactgctcctatgtggccgtccaggactactgcggacagaacagctccctgggatcattttctataattactgagaatgtgccatgtgggacaactggagttacctgctctaaggccattaagatcttcatgggacgtaccgagctcaagctcgaggataagcatcgcgttgtaattcaacgggatgagggccatcacgtggcgtacacgactcgcgaggttggtcagtacctggtcgttgagagttctaccggtatcatagtgatttgggataaaaggacgactgtgtttatcaagctcgctccgagttacaagggaacggtatgcggactctgcgggaattttgaccataggtccaacaacgactttaccacccgagatcatatggttgttagctctgaactggattttggaaacagctggaaggaagccccaacatgccccgacgtgtccacaaatcccgagccatgtagcttgaacccgcatcgtcgctcatgggcagagaaacagtgcagcatactgaaaagttcggtgttttccatttgccattccaaggtggatcctaaacctttctatgaagcatgcgtccatgacagctgcagctgtgatactggtggtgattgtgaatgcttctgctctgcagtcgcttcttatgcgcaggagtgcactaaagaaggtgcttgtgtgttctggcggacccctgacttatgcccaattttttgtgactactacaaccctccacacgagtgtgaatggcactacgagccatgtgggaaccgcagctttgaaacatgcaggaccattaacggcatccactccaacatctcagtgtcttacttagaagggtgctaccccaggtgccctaaggaccggcctatctacgaagaagacttgaaaaaatgtgtcaccgctgacaaatgtggatgctacgtagaagatacacactacccacccggagctagcgttcctacagaagaaacctgtaaatcttgtgtgtgtaccaacagcagccaggtggtctgtcgaccggaggaaggaaagatcctgaaccagactcaagacggagcattctgctactgggagatttgtgggccaaacggaacagtagagaagcatttcaatatctgcagtattactacccggccttccacactgacaacattcaccacaatcactctgcccaccactccaaccacattcaccacaaccacgactacaactacccctacatctagcaccgttctgtccacgacccctaagctgtgctgtctatggtcagactggatcaacgaggatcatccgtcaagcggatccgacgacggtgatcgcgagacgttcgatggggtgtgcggtgctccagaagacatagagtgcaggtccgtcaaggacccccatcttagtctggagcaattaggccagaaggtacagtgcgatgtgagcgttgggttcatttgcaaaaatgaagatcagtttgggaatggccctttcggcttgtgctacgactacaagattagagttaactgctgttggcctatggataaatgcatcacaacccctagccccccaacgactacaccttcacctccacccaccagcaccactactctccccccaacaacaactccttcccccccaactactacaacaacaactccccctcccactacaactccttccccccctattaccaccaccacaactccacctccaactacgacccctagcccacctatcagcacaactactacgccacccccaaccactactccttcacctccgactaccacacctagcccacctacaaccactccaagcccccctacgaccaccacaactacaccccctcctaccacaaccccgtccccgccaaccactacccctattacccccccagctagcacaacaacgttgcccccaacaaccacaccttcccccccaactacgaccaccaccacaccccctcccacaactactcctatcaccactactacaactgtgaccccgaccccgactccgactgggacccaaacccccactactactcctatcaccacaaccactacggtgacacccactccaacccccacaggaactcagacccctacctctacaccaattaccacaacgacgaccgtgacccctaccccaacaccaaccggtacccagacgcctacaactaccccaatcactaccactacaacagtgaccccaacccccactcccactggcacacagacgccaaccccaactgcgatcactactaccactacagttacccccacaccaacccctaccgggacccagacacctaccaccacacctataaccacgaccaccacagtaaccccgaccccaacacccaccggcacccagtcacccactccgactgcaatcaccaccaccaccacagtgacgcccacccctacccccaccggaacccagactcctacgagtacccctatcacgacaacaacgacagtgacgccaacacctacaccaaccggcacgcagactcctacccctacgcctatttcaacaaccaccaccgtgacccctacaccgactcctaccggaacccagaccccaacaaccactccaataaccacaaccacaacggtcacgcccactcccacacccacggggacgcagacccccacaaccgtacttattacaacaacaacgaccatgacccccacgccaacaccaacgtccacaaagagtacaactgttaccccaattaccaccactacaaccgtgacggcgactcccacccctaccgggacgcagacacctacaatgataccaatttctacaaccaccacggttacgccgactcctacacctaccacaggctctacagggcctcctacccatacaagtacagcccctatcgcagaactaacaacatcaaatcccccaccggaaagtagtaccccacagacttccagaagcactagttccccgctaacagagtctaccaccctgctgagcactttgcccccagcaattgagatgactagtacagccccaccctctacgcccaccgccccaacaactacctctggtggtcacaccctttctccaccaccctcaactacaactagccctcccggaacccctacgagaggaaccacgacggggtccagttccgctcccactccatcaacagtgcagactactacaacatctgcttggacccccacaccaacccccctgtcaactccatcgatcatacgcacaacggggcttaggccatatcctagcagcgtccttatctgttgcgtgctgaatgacacctattacgcaccgggtgaggaggtttataatgggacctacggtgatacgtgctactttgttaactgctcactgagctgcacgctcgagttttataattggagttgcccttctacaccctctccgaccccaactccttcaaaatccactcccacaccctcaaaaccctcatcaaccccctcaaagcccaccccagggactaagccccctgagtgtccggatttcgacccacccaggcaggagaacgaaacatggtggctctgtgactgctttatggcgacatgtaagtataacaatacagtagaaatcgtgaaagtagaatgtgagccaccccctatgccaacttgctccaacggattacaaccagtgcgggtcgaggaccccgacggatgttgctggcattgggaatgtgactgttattgcacaggttggggcgatccacattacgtgacatttgatggactgtattattcctaccagggcaactgcacctacgtgctggtcgaggagatcagccccagcgtcgacaacttcggcgtgtatattgacaactatcactgtgaccccaatgataaggtgtcttgtcctaggacgctcatcgtccggcatgagacacaagaagtgctaataaagactgttcatatgatgccaatgcaggtgcaggttcaggtgaacagacaggctgtcgcattgccctacaaaaagtacggactcgaagtatatcagagcggcattaactatgttgtagatattcccgaactgggcgtactggtgagttataacgggctatccttcagtgtacggttgccttatcatagattcggaaacaacacaaaaggtcagtgcggcacgtgtacgaatactactagtgatgattgcatccttccttccggtgagatcgtgtctaattgtgaggcagcagccgatcaatggctagttaacgatccgtcaaaaccgcattgcccacacagtagcagcaccacgaaacggccagcagtgactgtccccggtggtggaaaaaccaccccacataaggactgcactccgtcccctttatgtcaacttatcaaagacagtctattcgcacagtgtcacgcattggtgccacctcaacactattacgacgcctgtgtgtttgatagttgctttatgccaggatctagtctggagtgcgcttcactgcaagcctatgcggctctatgcgcccagcagaacatttgcctggactggcgcaatcatactcatggagcttgcttagtcgagtgcccaagtcatcgcgaatatcaggcttgtggcccagctgaagagcccacatgtaaatcatcctcctctcagcagaacaacacagtgttagtcgagggatgtttttgccctgaggggaccatgaattacgcccctggtttcgatgtgtgtgtgaagacctgtggctgtgttggccctgataatgtgccacgcgagtttggagagcattttgaatttgattgtaagaattgcgtgtgtttggaaggaggctctggaattatctgccagcccaaacgatgctcgcagaaaccagttacacattgtgtcgaagatggcacttatcttgctactgaggtcaaccctgctgatacgtgttgtaacatcactgtgtgcaagtgtaatacctccctctgcaaagagaaaccatctgtgtgtcccttgggatttgaagtgaagtctaaaatggtccccggacggtgctgccctttctactggtgcgagtcaaaaggcgtctgcgtgcatgggaacgccgagtatcaacccggatcaccagtttactcctccaaatgccaggattgcgtatgcaccgataaggttgataacaacaccctgctcaatgttattgcttgtacccatgtgccttgcaacacatcctgctcaccaggcttcgagctgatggaagccccaggtgagtgctgcaaaaaatgtgagcagacccactgtatcatcaagaggcccgacaaccagcacgtaatcctcaagccaggcgatttcaagtctgaccctaagaacaattgtaccttcttctcatgcgtgaaaattcataatcagcttatttcctctgtgagcaatattacctgccctaattttgatgctagtatctgtattcctggctcaattaccttcatgccaaatggctgctgcaagacgtgcactccgcgtaacgaaacacgtgttccatgcagtacagtgccagttaccaccgaagtatcatacgcgggatgcacaaaaaccgtattgatgaaccattgctccggcagctgcggtacttttgtgatgtatagcgctaaggcccaagccctggaccactcctgtagctgctgcaaggaggagaagacatctcagagagaggtggtgctgtcttgtcctaatggtggcagtttaacgcacacttacacgcacatcgagagctgtcaatgccaggatacagtgtgtgggttgccaacagggacatctaggagagcgcgaagaagtccgaggcacctggggtctggcta

SEQ ID NO: 231121 - DNA, 2631 bp, synthetic construct
  misc_feature 1..2631: note = Description of Artificial Sequence: Synthetic coding sequence
  source 1..2631: mol_type = other DNA
atctatagtactgtgtcgacctctaccactgccattacgtcccactttaccacttccgaaacggccgtgacccccactccagtgacccccagttcattaagcactgacattccaacaactagtctgagaaccttgacaccaagtagcgttggaacaagtacatcgctgacaaccaccaccgatttcccaagcatccctactgacattagcacactgcccacaagaacacatattatctcttctagcccaagcattcagagcactgaaaccagctccctggtcggcaccacatcccctactatgtccaccgtgaggatgacattaagaatcacagagaacacgcccatatctagtttctctacctcaatcgtagtcatccctgagacaccgactcagactcctccggtactgacgagcgcgaccggaacacaaacaagcccagcccctactacagtgacctttggaagtaccgatagttcgaccagcaccttgcacacccttaccccgtcaacagctttgtctactatagtttcaacttctcaggtgccaatccctagtacacactcgagcaccttacagaccactccgtcgacgccttccctgcagacctcattgactagtaccagtgagttcacaaccgagtcatttaccaggggctcaaccagtaccaatgcaatcctgacctcgttttcaacgattatttggtcttcaacaccgactatcatcatgtcctcatctccatccagcgcttcaatcacccctgtgttcagcacaacaattcactcggtaccatcctccccatatattttttctacagagaatgttgggtctgcctcgattacgggcttccctagcctttcttcatctgctactacgagtacgagttccacatcctctagtttaactactgctctcaccgaaataaccccattcagctatatttcactgccatctaccactccatgtccaggcactatcacaataacaatcgttcccgcttccccgaccgacccatgtgtggaaatggacccgagtaccgaagcaacctcaccccctactacgcccctcaccgtgttcccatttacaactgaaatggtcacctgtccaacatccatcagcattcagaccaccctgactacttacatggatacctcctcaatgatgcctgagtcagagtcatctatcagccctaacgcttcttcctccactggaactggaactgtgccgaccaacactgtttttactagcacccgattaccgacctcggagacgtggctaagcaatagctctgtaatccctcttcccttaccaggggtgagtaccattccccttacgatgaagccgagttcttcacttcccactattctgaggacctcttccaagagcacacacccatctcccccaaccacacgcactagcgaaacccccgttgctacaacccagacacccacaaccctgacctcccggcgaactactaggatcacgtcacaaatgactacacagtctactctcacaacaactgcaggaacctgtgacaacggcggaacatgggagcagggacagtgtgcttgcctgccgggattctcaggcgaccgctgtcaactgcagacaaggtgccagaacggaggacagtgggatggcctgaaatgccaatgtcctagcaccttctatggtagttcatgcgagtttgccgtagaacaggtcgatctggacgtggttgagactgaggttgggatggaagtgagtgttgatcagcagttttccccagacctcaatgataatacgtctcaggcctatcgcgatttcaacaagactttctggaaccagatgcaaaaaattttcgccgacatgcaggggtttacatttaaaggagtggaaattctgtcgctgcgtaacggaagtattgtcgtcgactacctcgtgctgctcgagatgcctttcagcccgcagctcgagtccgagtatgagcaagtaaagaccactctgaaagaagggctccaaaacgcctcacaagatgccaactcctgccaggactcccagaccctgtgtttcaagcccgattccatcaaggtcaacaataatagcaagaccgagctgacaccagaagcaatttgtagacgtgctgctccaacgggttacgaagagttttattttcctctagtagaagccacccggctgaggtgcgtgacaaaatgtacaagtggggtcgacaacgccattgactgtcatcaagggcagtgcgtgttggaaacatcaggacctgcctgcagatgctatagtaccgatactcattggttttctggtccccgttgtgaggtcgcagtgcactggcgtgcgctggtcggcggtttgaccgcgggtgctgccctgctggtcctcctactgctggccctgggcgtcagagccgtgagatctgggtggtggggaggtcagcgacgcggaagaagttgggatcaggacagaaagtggtttgagacctgggacgaggaagtggtggggactttcagcaactggggcttcgaggatgacggaacagacaaagacaccaatttccacgtcgccctggaaaacgttgacactactatgaaggtgcacattaaacggcctgagatgacaagctcatccgtatag

SEQ ID NO: 231122 - DNA, 927 bp, synthetic construct
  misc_feature 1..927: note = Description of Artificial Sequence: Synthetic coding sequence
  source 1..927: mol_type = other DNA
tgcgacaatggagggacttgggagcagggacagtgtgcgtgcttacccggtttcagtggcgaccgctgccaactgcagacacggtgccaaaacggaggccagtgggacggtctcaaatgccagtgcccaagcactttttatggtagtagctgcgagttcgcggtcgaacaggtggacttggatgtcgtggagacagaggtcggaatggaagtatcagtcgatcagcagttcagtcctgatctaaacgacaatacctcccaggcttatcgcgactttaataagacattctggaaccaaatgcagaaaatctttgccgacatgcaaggattcacattcaaaggggtcgagatattgtcccttaggaatggatccattgtggtcgattacctggttctcctggagatgccattttctccccagctcgagagtgagtatgagcaagtgaagaccaccctgaaggagggactgcaaaacgcctcacaggacgccaactcctgccaagattcacagacactgtgcttcaagcccgatagtattaaggtcaacaacaactctaagaccgagttaactccagaagccatttgtcgtagggcggctccaactggttacgaagagttctactttccactggtggaggcaactcgcctcagatgtgtcaccaagtgcacttctggcgtggataatgcaattgattgccaccaaggacagtgcgtgctggaaacctccggccctgcttgtcgctcctgggaccaggaccgtaaatggtttgagacctgggatgaggaggtcgtgggaacgttcagtaactggggcttcgaagatgacggaactgacaaagatactaatttccacgtggcccttgagaacgtggataccaccatgaaggtgcacattaaaaggccagagatgaccagcagctctgtgtag

SEQ ID NO: 231123 - DNA, 3531 bp, synthetic construct
  misc_feature 1..3531: note = Description of Artificial Sequence: Synthetic coding sequence
  source 1..3531: mol_type = other DNA
atgaagggcgcacgctggcgaagggtgccctgggtgtccttgtcctgtctgtgtctgtgcctcctgccccacgtggtgccaggcatgacaacaccgagccttaaaaccgatgggggtcgcagaaccgcaacttcccctcctcccacaacttctcagactattatctctacgataccgtctaccgcgatgcacacaagatctacagccgcacctatacctatcctgcccgaacgtggtgtgtcactgtttccatacggagcgggagccggtgaccttgagttcgtgcgcagaaccgtcgactttacctcgcctttgtttaagcccgctactggcttccccctcggcagttccctgcgcgactcgctgtatttcacagacaacggtcagatcattttccctgagtccgactatcaaatcttttcttatccaaatcccctgcccaccggctttacaggccgtgatcccgttgccctcgtggccccattctgggacgacgccgacttttctaccggacggggtactacgttctaccaggagtacgaaactttctacggggagcacagcttgttggttcagcaggccgagtcgtggatccgcaaaatgacaaacaacgggggatataaggctcgctgggcccttaaggttacctgggtgaatgcacacgcctacccggctcagtggacgctggggagcaatacatatcaggcgatcctaagcacagatggaagccgctcctatgctctgttcctgtatcagtctggaggaatgcagtgggatgttgctcagagatcaggtaatcctgtcctgatggggttctcctctggcgacggctatttcgagaatagcccactcatgagccagcctgtgtgggagaggtacagacccgataggttcctcaatagtaactctggactgcagggcctgcaattctaccgactccacagagaggaacgacctaactataggttagaatgcctgcagtggctgaaatcacagccacgctggccgagttggggatggaatcaagtgtcgtgcccttgctcatggcagcaggggcgacgcgacctccgatttcagccggtatctatcggaagatggggcctagggtctcgccagctgtgctcttttacaagctggagaggtggagtctgctgctcctacgggccatggggcgaattcagggagggatggcatgtgcagagaccctggcagcttgctcaggagctcgaaccccagagctggtgttgtcgatggaacgacaagccctacttgtgcgccctttatcagcagaggaggcctcatgtaggctgcgccacatatcggcctcctcagcctgcttggatgtttggagatcctcacatcaccacgctggatggcgttagttataccttcaacggcctcggtgacttcctgctggtgggagcccaagacggaaattcttctttcctcctacagggacgtaccgcccaaacaggctcagctcaagcaactaactttatcgcttttgccgctcaatatagatctagttcccttggtcccgtgaccgtgcagtggttgctagagccccatgatgccattagggtgctgctggacaatcaaacagtgaccttccagccggaccacgaagatggcggaggccaggaaacattcaatgctacgggtgtactcctgagccggaacggaagcgaggtcagcgcctcctttgacggctgggccaccgtgagcgtcatcgcactgtccaatattctgcatgccagcgccagcttgcctcctgagtaccagaacagaaccgagggactgctaggagtttggaacaacaaccccgaggacgattttaggatgcctaacggcagtactatcccaccagggagtcctgaagagatgctctttcattttggaatgacatggcagattaatggcacaggcctgctgggaaaacggaacgaccagctgccatctaacttcactcctgttttttacagccagttgcaaaaaaatagtagctgggctgaacacctcattagcaactgcgacggggactcctcctgcatctatgatacgctggccctgcgaaatgctagtattgggctgcacaccagggaggtgagcaagaactacgagcaggccaatgcgacactcaaccagtatccgccatcaattaatggaggacgcgtgatcgaagcctacaagggacagactacactgatacagtacaccagcaatgccgaggacgcaaacttcaccctgagagatagttgtaccgatctagagttgttcgagaacggtactctcctctggacgccaaaaagcctggaacccttcactcttgaaattctagcacggtctgccaagatcggcctagcttctgccctgcagcctaggacagtggtgtgccactgcaatgcagaatcccagtgtctctacaaccagacgtccagagtaggaaactccagtctggaggtggctgggtgcaagtgcgatggaggcactttcggccgatactgtgaggggagtgaagatgcctgcgaggagccctgttttcctagtgttcactgcgtgccaggaaagggttgcgaagcgtgccctcccaatctcactggcgatggccgtcattgtgctgccctcggctcctcttttctgtgccaaaaccagagctgtcccgtgaactactgttacaaccagggccattgctacatttcgcagacactgggatgtcaacccatgtgtacctgccccccagctttcaccgactcccgatgctttcttgcaggaaataacttctccccaacggttaacctcgaactgcccttacgtgttatccagttgctgctttccgaagaggaaaatgcatctatggccgaggtgaacgcttccgtcgcatatagattgggcaccttggacatgcgggcattcctgcgaaactctcaagtagaacgtattgattcggccgcacccgctagcggaagtccaattcagcactggatggtgataagcgagtttcagtatagacctcggggtcccgttatagactttctgaacaaccagttgctggccgctgtagtcgaggctttcctgtatcatgtcccacgcagatccgaagagccacgtaatgatgtcgtgtttcagccaatctcaggagaggatgtaagagatgtgaccgcgctgaacgtgagtacactcaaagcttactttcgctgcgatgggtataaaggatatgatttagtgtactcccctcaatccgggttcacctgcgtctcgccctgcagccgcggttactgcgatcatgggggacagtgccaacacctcccctctggaccccgatgcagttgtgtttccttttccatttacactgcctggggggagcactgtgagcacctgagcatgaagttagatgccttctttgggattttctttggggcactggggggactgctgctgctcggtgtcgggacgtttgtggtattacgattctgggggtgcagtggagctcggttcagctactttctgaatagcgcagaagctctgccttag

SEQ ID NO: 231124 - DNA, 3378 bp, synthetic construct
  misc_feature 1..3378: note = Description of Artificial Sequence: Synthetic coding sequence
  source 1..3378: mol_type = other DNA
atgaagggtgcccgttggcggcgtgtgccctgggtgtctctcagctgcctctgcctgtgcttgctcccccacgtggttcccggagtttcactgttcccttatggagccggagccggtgatctggaattcgtcagacggacagtcgactttactagccccttgttcaaacctgcgactggattccctctgggcagctcactccgagacagcctctacttcacagataacggccaaatcatcttccctgaaagcgactaccaaatatttagttaccccaatccgctgcctacgggctttactggtagggatcccgtcgctttggtggccccattttgggacgatgctgacttcagcaccggacgcggaaccaccttctaccaggagtatgagaccttctatggcgagcactcactgctcgtacagcaagccgaaagttggattcgtaagatgacgaacaatggaggttacaaagccaggtgggctctgaaggttacatgggtaaatgcgcatgcctaccccgctcagtggaccctcggcagtaacacatatcaggcaatcctctcgactgatggatccaggagttacgccctctttctgtatcagtcaggcggtatgcagtgggacgtcgcccagcggtcgggcaacccagttcttatggggttctcgagtggggacgggtattttgagaactccccactgatgagccagcctgtatgggaacgctaccggcctgatcgatttttgaactcaaacagtggcctgcagggtctccaattctatcgacttcacagagaagaacgacctaattacagattagaatgtctgcagtggctgaaaagccagccacgatggcccagctggggctggaatcaggtcagttgtccttgtagctggcagcaggggagaagagatttgcgctttcaacccgtgtccatagggagatgggggctcggctcccgacaactgtgctctttcactagttggcgaggtggtgtgtgttgcagctacgggccttggggcgagtttagagagggctggcacgtgcagaggccatggcagctggcccaggagctggagccgcagagctggtgctgtcggtggaatgataagccctacttgtgcgccctgtatcaacagcggcgtccacacgttggctgcgccacctatcgacctccccaacctgcatggatgttcggggatccccacataactacattggatggggtgagttatacatttaatggactgggagacttcctcctggttggcgcacaggatggaaactccagtttcttgctgcagggacggaccgcccagactggaagtgcccaggccacaaacttcatagcttttgccgctcagtaccgatcctcttctctgggtccagttacagtgcagtggctgttggaacctcacgatgcgattcgggtcctattagacaaccagactgtaacgtttcagcctgatcatgaggacgggggagggcaagagacttttaatgccacgggagtactgctttctagaaatgggagcgaagtgagcgcatcatttgacggatgggcgaccgtgtcagtgatcgccctgagtaacatactccatgcaagcgcgtccctgccacccgaatatcagaatcgtacagagggcctgctgggtgtgtggaacaataatccagaagacgacttcagaatgcccaatgggagcaccattcctcctgggtcccctgaagaaatgttatttcatttcggcatgacatggcagatcaacgggaccgggctacttggaaaacgtaatgaccagcttccgtctaattttactcccgtgttttattcacagctccagaaaaactcatcatgggctgagcacttaattagcaattgcgacggagattcttcatgcatctacgatacgctggctttacggaatgccagcatcggccttcacacaagggaagtatccaaaaactacgaacaggccaatgctactctcaaccagtaccccccaagtatcaacggtgggagagttatcgaagcctacaaaggccagaccacactgattcagtacacctcgaatgccgaggacgcgaacttcaccctcagagatagttgcacggatctggagctcttcgagaatggtactttactctggacccccaagagtctcgagccattcacactggaaatactggccagatcggccaagattggcctggcctccgcgctccaacctcgtaccgtcgtctgccattgcaacgccgagtcccagtgcctctacaaccagacgtctagagtcggcaattcttccctggaggtggccggttgcaaatgcgatgggggaacgttcgggcgttattgcgagggaagcgaagacgcatgtgaagagccttgtttcccatccgtgcactgtgtcccaggtaaggggtgtgaggcttgtcctcccaatctcactggcgacgggcgtcattgcgctgcccttggctcttcctttctctgtcagaaccaatcctgccctgtcaattactgttacaaccaggggcattgttacattagccaaaccctgggttgtcagcccatgtgcacctgcccaccggcatttacagatagccgatgctttcttgcaggcaataacttcagtccgactgtcaacctagaacttcctctacgggtcattcagctccttttgagtgaagaggagaacgcttccatggccgaagttaatgcatccgtagcctaccgcctcggaaccctggacatgcgtgctttcctgagaaatagtcaagtggagcgcatagacagcgccgctcccgcttccggatcaccaattcagcactggatggttatcagcgaattccaataccggccaaggggaccagtgatagacttcctgaacaatcaattactggcagctgtggtggaggcgtttctctaccacgtacccagacgaagcgaagagccaagaaatgacgtggtgttccaacctatctccggcgaagacgtgcgagatgtgactgccctgaacgtgagcacactcaaggcctattttcggtgcgacggttacaaaggctacgatttggtctatagcccccagagtggcttcacatgtgtctccccctgtagccggggttactgtgaccacggagggcaatgtcagcacctgccgtccgggccacggtgcagttgcgtgtctttcagtatatatacagcatggggggagcactgcgagcacttatccatgaagctggatgctttcttcggcatcttctttggggctctgggcggattgcttcttctgggggtaggcacctttgtggttctgagattctggggatgctccggggctcggttcagctacttcttgaactcggcggaggccctcccatag

SEQ ID NO: 231125 - DNA, 5739 bp, synthetic construct
  misc_feature 1..5739: note = Description of Artificial Sequence: Synthetic coding sequence
  source 1..5739: mol_type = other DNA
cctgggaccactgaggacaccttgatcacaggatctaagactgcggctcccgtgacatctactggttctacaacagctaccctggagggtcagtctacagcagcttcctcgcgaacctcaaaccaggacatcagcgcctcttcacagaatcaccagacaaagagtactgaaactactagtaaggcccaaactgatacactgactcaaatgatgacatccactctttttagtagcccaagcgtgcacaacgtgatggagaccgcacctcccgatgaaatgaccacgtcattcccctcatcagtcactaacacattaatgatgacatctaaaacgattacaatgactaccagcacggacagcacccttggaaatacggaagaaacatcaaccgctgggaccgaaagcagcacaccagtcactagtgcggtgtccatcactgctggccaggaaggacagtcgaggaccacatcctggaggacttctatccaggacacaagcgcctcatctcagaatcactggaccaggtcgacccaaactactcgggagtcccagacctctacccttactcataggacaactagtaccccatcgttttcccccagcgtgcataacgtgaccggaacagtcagccagaagaccagtccgtccggggagaccgccacctcatcattatgctcagtaaccaataccagcatgatgacctccgagaagatcaccgtcaccacatccactggcagtacactaggtaatcccggagagacctccagtgtgcccgtaacgggctccttgatgccagtaactagcgccgcactggtgaccttcgatcctgagggccagtcgccagcgactttttctcgcactagcacacaagacactactgccttttctaagaaccaccagacacagtcagtggaaacgacaagagtgagccagattaataccctgaacacgcttacaccagttactacatccaccgtgttgtcgtccccatctggcttcaacccttctggtacggtgtcacaggagacctttccatcgggcgaaaccaccacgagcagcccaagctctgtttccaatacattcctcgttaccagcaaggttttccgtatgcctacatctagagattccactctgggaaacacggaagagaccagcctgtcggtgtcaggaaccatcagcgccatcacttcgaaggtttctaccatatggtggagcgacactctttccactgctctctccccctcttccctgccacctaagatcagcaccgcttttcacacacaacagagtgagggagctgaaaccacgggaagaccacacgagaggagttcattctcccccggagtgagtcaggagatcttcactctccatgagacaacaacctggcccagttcattttcttcgaagggtcatacaacctggtcccagactgagctcccaagcacatcaacgggggcagccacgcgcctggtaacaggcaatccctccacaggcacggcgggtaccatacctcgagtacccagcaaggtgtcagccattggagaacctggggaacccaccacttactctagccattctacaaccctgcccaagactactggcgctggcgctcaaacacagtggacacaggaaaccggaacaaccggggaggccctgttgtcctccccttcctattccgtgacccagatgattaagactgcaacatctccatctagctcacccatgcttgacaggcataccagtcagcaaattaccactgccccaagtacaaatcacagtaccatccatagtacaagcacgtcaccacaggaaagtccggctgtatcccagagaggtcatacccaagctccgcagactacgcaggaatcccagacaactcgctcggtctcaccaatgaccgataccaaaacggtgacaaccccaggtagtagctttaccgcttcgggccacagtccttcggagattgttccgcaggacgctcctaccatttctgccgcaaccactttcgcgcctgcaccgaccggtgatggacatacaacccaagctcccaccacagctctccaggctgcgcctagctctcacgacgctactctggggccatctggtggtactagcttatctaaaactggggctcttactttggccaattcggtggtgtccacccccggaggaccagaaggccagtggacctccgcctccgcaagtacatctcccgacaccgctgccgctatgacacacacacaccaagctgaaagcactgaggcatccgggcagacgcagacaagtgagccagcttctagtgggtccaggacaactagtgctggcacagccactcctagctcttcaggagcctccggtaccacaccctccggcagcgaggggatcagtacatcaggggagactactcgattcagctccaacccgtctagggactcacacaccacacaaagcacaaccgagctgcttagtgcaagcgccagccacggagccatccccgtaagtacaggaatggcctcttccatcgtgccaggcacctttcaccctacactgtccgaagcttctacggcgggtagacccacaggacaaagttcaccaacctcacccagtgctagccctcaggagacagctgccatcagccgcatggcccagacccagaggacccggacgtctcgaggctccgataccatctctctggctagccaggccacggacacattcagtaccgttcctcccacaccccctagcattacgtctaccggcctgacgagtccccagaccgaaacccacactctgagcccatcgggaagcggaaaaacgttcacaaccgctttgatcagcaatgctaccccattaccagtgacctatgccagctccgcgagcacgggacacgcgactccacttgccgtttctagtgctacctccgcttcaaccgtgagttcagacagccctttaaagatggagactcctgggatgaccactccatctctcaagaccgatggcggtcgcagaaccgccacctctccacccccaactacctcacagactataatctcaacgatcccaagcacggccatgcacacgagaagtaccgccgctcccattcccatactgcccgaaaggggggtaagcctctttccatatggagccggagcaggggacctcgagttcgtcaggaggaccgtggactttacgtcccctctcttcaagcccgctacagggttcccactgggatcaagcctgcgggactccctttatttcacagacaacggccagatcattttcccggagtccgattaccagatcttttcctaccccaaccctctgcctacagggtttaccggtcgggacccagtcgccttagttgcccctttctgggatgacgcagatttctctactgggagagggacaacattttaccaggagtacgaaactttttacggagaacacagcctcttagtgcagcaggctgaatcatggatcaggaagatgacaaataacgggggatacaaagccaggtgggcgctgaaggtgacctgggtaaacgctcacgcatatcctgcccagtggacattgggtagcaacacgtatcaagcgatactgagcactgacgggtctcgttcctatgcgctgtttttatatcagtcaggaggcatgcaatgggacgtcgcccaaaggtccggcaatccagtgctgatgggcttcagttccggcgatggatatttcgagaattctcctcttatgagccagcccgtgtgggagcgatacaggccagatcggttcctgaacagcaacagtggtctgcaagggctacagttctacaggctccaccgcgaggagcgtcctaattatagattggagtgcttgcaatggttaaagtcccaacctagatggccatcgtgggggtggaatcaggtttcatgcccctgttcatggcagcagggaaggagagatctcagattccagcccgcatcccttccaccagagtatcagaaccgaaccgaggggctgcttggcgtgtggaacaataatccagaggatgatttcaggatgcccaacggctccaccatccctccgggaagcccggaagagatgctgttccattttggcatgacctggcagattaacggcaccggactgcttgggaaacgcaatgatcaactaccgagcaattttacccccgtgttttacagtcagttgcaaaaaaattccagctgggcggagcacctgattagcaattgtgacggggactcatcctgtatatacgatacactcgcgctcaggaatgccagcataggcctccacaccagggaggtgtccaagaactacgaacaagcgaacgctactctcaaccaatacccaccatccatcaatggcggaagagtaatcgaagcctacaagggtcagaccactctgatacagtacacatctaacgccgaggatgctaattttacactcagggactcttgtacagatctcgagttgttcgagaacgggactctcctgtggactcctaagagcctggagccctttacactcgagattttggcccgttccgctaagatcggattagcttcggccctccaaccacgaaccgttgtctgtcattgtaacgctgagagccagtgcctgtataaccagacatccagagtggggaatagctccctggaagtggcaggctgcaagtgtgacggcggaacttttgggaggtattgcgaaggttccgaagacgcctgtgaagaaccctgttttccaagtgtgcattgcgtgcctggtaagggatgcgaagcatgcccaccgaacctcacaggagacggcagacattgtgccgctctgggtagtagctttctgtgccagaatcagtcttgccccgttaattactgctataaccagggccactgctacatctcccagactctgggctgccagcctatgtgtacctgcccacccgcatttaccgactcgaggtgtttcttagcgggaaataatttttcacctacagtgaacctggagctgcctttgcgcgtgatccagttgctgttgtcggaggaggagaacgcatcaatggccgaggtgaacgcctccgtagcgtaccggctcggcactttggatatgagagccttcctgaggaattcccaggtggagcgtatcgactcggcggctcccgcttctggatcccctattcagcattggatggtcattagcgaatttcaatatcgccctaggggcccagtgatcgattttctgaacaatcagttactcgctgcagtggtggaagccttcttataccacgtgccgcgtcgatcagaagagcctagaaacgatgtcgtatttcaacctatttccggagaggatgtgagagacgtaactgccctgaatgtaagtaccctgaaggcctattttcgctgcgatggatataaggggtatgacctggtttacagcccccagagtggcttcacttgtgtgtccccttgctctcggggttactgcgaccacggtggacagtgccagcacctgccttcaggcccacggtgctcatgtgtcagcttctctatttatactgcctggggggagcattgcgagcacttgagcatgaaattagacgccttcttcggaatcttcttcggcgcactggggggactcttactgctcggcgttggaacattcgtcgtcttaaggttctggggctgctcaggcgctagattttcatattttttgaacagtgctgaggcgctgccgtac

SEQ ID NO: 231126 - DNA, 16239 bp, synthetic construct
  misc_feature 1..16239: note = Description of Artificial Sequence: Synthetic coding sequence
  source 1..16239: mol_type = other DNA
atgaaaggtgcccgatggcggagggtcccttgggttagcctctcctgtctgtgtttatgtttacttccacatgtcgtgcctggcaccacagaggatacactgatcactgggtctaaaactgcagccccagtcacttcgacggggtccacgaccgctactcttgagggccagtctaccgccgctagcagccgaacctctaatcaggacatctcagcctcatcccagaatcatcagactaagagtaccgaaactaccagcaaggcacagaccgataccctgacacaaatgatgacgagcaccctattctctagtccctccgttcacaacgttatggaaacagctcccccagacgaaatgaccacaagttttcctagctctgttacgaacactttgatgatgaccagcaaaacaatcacaatgacaacatcaacagattctaccttgggtaatacagaggagacttcgaccgcagggaccgagagctcaacaccagtcaccagtgccgtaagtattacagccggacaggaaggccaatctaggactacatcctggagaacttcaatccaagatacctccgcatcaagccagaaccactggacccgcagcactcaaacaacccgcgaatcccaaacatctaccctcactcatcggaccacatcaaccccaagcttcagcccttccgtccacaacgtaacgggcacagtcagccagaagacctcgccctccggcgaaaccgctacctcctccctttgttcagtgaccaatacaagcatgatgacaagcgaaaagattaccgtgaccacctctaccgggtctacattaggtaatcccggagaaacatccagcgtgcccgttaccggttctctgatgccagtgacatcagcagcccttgtgacttttgacccggagggacagtcccccgcaacattcagccgcacttctactcaagacactactgcattctcgaaaaaccatcaaacccagagcgtggaaacaactcgcgtgagccagattaacaccctcaataccctcaccccagtgactacaagcactgtgctgagttctccgagcggattcaacccaagtggtacagtctcccaagaaacctttccttcgggcgaaaccaccacctcctctccaagctcggtgagcaacacctttctggtgaccagcaaagtgttccggatgccgacatcccgggacagcaccttaggaaacacagaagaaacgagcctctccgtgtcaggaacaatatctgcaattacatccaaggtgagcaccatctggtggagcgatactctgagcaccgctttatctccaagctccctgcccccaaaaatctccaccgcctttcacacccagcaaagcgagggggcagaaactactgggcgaccacacgaacgctcctccttctctccaggcgtgagtcaggaaatcttcactcttcacgagaccaccacttggccgtcttcgttctcctccaagggacacaccacctggtcacagacagagctcccctccacgagtacgggagccgcaaccagactggtaaccggcaacccttccacaggaaccgcgggaactatacctcgggtgccctcaaaagtttcggcaatcggggaacctggggaacctacgacttactcctcacactccacaactctccccaaaacaacaggggcaggagcgcaaacacaatggacacaggagacaggtaccactggagaagccttgctgtcgtccccaagttacagcgttactcagatgataaagaccgcaacctcaccatcttctagccctatgctggaccggcacaccagtcaacaaatcaccaccgccccttccaccaaccactcaacgattcatagcacatccacaagcccacaggagtcgcctgccgtgtcacagagagggcacacacaagcacctcagacaacacaggagagccagacaacccggagcgtatccccaatgactgacaccaagaccgtgacaacccccggatccagctttactgccagcggccatagtcctagcgagattgtacctcaggatgcccctaccatcagcgcggcaaccacgttcgccccagcgcctactggcgacgggcataccacgcaggctccaaccactgcgctacaggctgcaccctccagccacgatgctaccctaggtccttccggtggaacaagtctttctaagaccggcgcactcaccttagcaaattccgtggtgagcacgcccggagggcctgaagggcagtggaccagcgcctctgcctcaactagccctgacacagccgcagctatgactcatacccaccaggcagagagcaccgaagctagcgggcagacgcagactagcgaacccgcatcctctggcagcaggacaactagcgccggaactgccacaccgagtagctcaggcgcatcgggaactaccccgtcaggttcagaagggatttctacatcgggcgaaacaacacggttcagctcaaacccttcacgtgatagccacactacccagtccaccaccgaactgctcagcgccagcgcaagccacggcgctatacccgttagtaccggcatggcctcgtccatcgttccaggtacctttcacccaactctgtcagaggcatccaccgccggtcggcctacaggccaatcgagcccaacttctccaagcgcatccccacaggagacggctgctatttcgagaatggcacagacgcagcgaacccgaaccagccggggttcggacacgatctccctagcaagtcaggcaaccgataccttttctacagtacctcccacacctccatcaatcacctccacgggcttgacatcgcctcagacagaaacgcatacactctcacctagtgggtccggaaaaacctttactactgcgctcatctccaatgctacccctctccctgttacttatgcctcttctgcgagtacaggtcacacaacacccctccacgtcacagacgcctctagcgtctcaacaggacacgccactcctcttcctgtaacgtctcctagctctgtgagtactggccacacaaccccacttccagttacagacaccagttctgagagcaccggtcacgtgactcccctaccggtcaccagcttcagctcggcctcgacaggcgattcgacaccacttccagtgaccgatacaagttcagcgtctaccggacacgtcaccccccttcctgtcacttcactaagtagtgcatctaccggtgacaccactcctctgcccgtcacagacacgtcctcagcttccaccggacatgccacctccctgccggtgactgatacttcaagcgtctctacaggacacaccacaccactgcccgtgacggatacgtccagcgcgtccactgggcatgccacatccctgccagtcacggacacaagctctgtgtccaccggtcatacaaccccgctgcatgtgaccgacgccagcagcgcctctacagggcaggcaacccctcttccagtcacctctctatcttccgtgtctaccggtgacactacacccctgccggtgacttccccgtcgtcagcttccacagggcacgctactcctctgctcgtgaccgacacatctagtgcctcaaccgggcatgctacacctctcccagtgaccgatgcttcgagcgtaagcacagatcacgccacttcactccctgtgacaattccctccgcggcttccactgggcataccaccccccttcctgttaccgacaccagttctgcctcaaccggtcaagccacctccctgctggtaactgacacaagttccgtgagcactggggacacaacgccgttgcccgtcacatctacatcttcagcctccacggggcacgtaacacctctgcacgtgacctctcccagctctgcctccacagggcatgccacacctttgcccgtcaccagtctgtcaagcgcctctaccggggatacgatgcctctcccagtgacgtctcctagttcagccagcactggggacaccacacccctccccgtgacggacgcctcatctgtttcaacagggcacaccacacccctccacgtgacagacgcctcctccgcttcaacaggccaagctacaccattgccagtgacttcactcagctccgtgtccaccggcgacaccactccattaccagtgacctccccatcctcagctagcacaggacacgccactcctctcctggtgacagacaccagctctgcctcaacggggcatgcgacccccctccccgtgacagacgcctcatccgtatcgacagaccatgccacatctttaccagtgactattccttccgcagcctccacagggcatactacgcctctccccgtgactgacacctcctccgcgagcaccggccaggccacctcacttttagtgaccgatactagttccgtgtccaccggggacaccacccctctccctgttacaagcacatctagtgcgtccaccgggcacgttacccccctccacgtcacctctccatcatcagcaagtaccgggcacgcgacccccctccctgtaacttccctatcaagcgcaagtacaggcgacacaatgcctctgcccgttacaagtccaagcagcgcttctaccggagacaccacgccactgcccgtaaccgatgcatcttccgtgtctacaggccacacaacccccctgcctgtgacttctccatccagcgcgtcaactggccacacaacacccctgcctgtgacagatacttcaagcgcctctaaaggcgatacaacccctcttcccgtcacctcaccgtcttccgctagcaccggccacaccacccctctacccgtaacagatacaagcagtgcttcgacaggagacacaacacctctaccagtgaccaatgcttcaagcctttcaactgggcacgctacccccctgcatgtgactagtccgtcttcagcgagcaccgggcatgcgacccctctgcccgttacaagtacatcttccgcttctactggacacgccacaccactgcctgtgaccggcctgagctcagccaccacagatgatacaaccaggctacccgtgactgatgtcagctcagccagtaccggtcaggcaacccctctacctgtgacatcacttagcagtgtctcaaccggtgacacaacccccctgcccgtcacttcccccagctctgcttcaacaggccatgcaagtcctctgctggtgacggatgcaagcagtgcaagcacaggccaggcgactccgctgcccgttaccgacactagcagtgtgagtaccgcccacgctactccccttcccgttacaggtttgagttccgctagtactgatgacacgacaaggctgccggtgaccgacgtgagttctgcctccacgggccaggccattccattgcctgtaacttcgccctcctctgcctctaccggcgacacgacccctctacctgttacagatgcatcctctgcgtccacaggcgacaccacttctctacccgttacaatcccttcgtccgcaagttcaggtcatacaacatccttacctgtaactgacgcgagtagtgtgtccactggtcacgcaacgagtctccttgtaacagatgcctcttccgtgtcaaccggggataccacccctcttcccgtcacagacacgaacagcgcctccacgggggatacgaccccactgcacgtcacggatgcgagctctgtctccacgggccatgccaccagcctcccagttacatcgctttcatccgcaagcaccggtgacaccactccactgccagtaacctcacccagctcagcctcatccgggcacactacacccctcccagtcacagacgcgagctctgtcccaacgggacacgccaccagtcttccagtcaccgacgcctcttcagtgtctacggggcacgcaacacctctgccagtcacagatgcatccagcgtcagcactgggcatgctaccccactgcccgtaactgatacaagttcagtgagcaccggacaagccaccccactgcccgttacctcattgagttcagccagcactggagataccacccccctgccggtgacggacactagttcagcttctacaggacaagatacccccctgcccgttacctctctgtcctccgtgagcactggagatactactcccctccccgtgactaatccctcgtcagccagtacggggcacgccactccactcctggtgacagatgcttccagtataagcacggggcacgccacatctttattggtaactgatgctagctctgtgtctaccgggcacgccaccgccctgcacgatactgacgccagctccctctccaccggtgatacgacgcctttgcctgtgacaagtccaagctcaacgtcgacaggcgatacaacacccctcccagtgactgagacctccagtgtgtctaccgggcatgcaacatctttaccggttaccgacacaagttctgcatctactggccacgccacaagcctgcctgtcacagacacatccagtgcatcaactgggcacgccacccccctgcctgttactgatacaagctcagcaagcacaggacaggctacgcccctgccggtgacgagccccagcagtgcatctactggacacgcgatccccctgcttgtcaccgatacgtcatctgcctcaactggccaggccactccattgccagtgacgtctctttcatcggcctccactggggacactacccctttaccggtgacagatgcctctagcgtgagtacaggtcatgccacatcgcttcccgttaccagcctatctagcgtatccactggcgatactactcctctgcctgtgacgagtccctctagtgcgtcaactggccacgccacccctcttcatgtcaccgatgcaagcagcgcttccacagggcacgctacgcccttgccagtcacgtccctttcttcggcatcaaccggagatactactcccttaccagttacctctcccagttctgcctcaacaggtcacgcgacacctttgcatgtgactgacgcttcaagcgtgtccacaggggataccactcctttgcctgtgaccagctccagtagtgcctccagcggacacactacgccactgcccgtcacagatgcttcatctgcaagcaccggcgacacgacgcccctgcctgtgacagataccagctcagcctccacaggacatgccacccatctccctgttactggcttgtcttctgcctcgaccggggacactactaggctgcctgttactaatgtttcatctgccagcacagggcatgcaaccccccttcctgtgaccagtactagcagcgcttctaccggcgacaccacaccgctacccggaaccgatacttcctcagtgtctacgggtcacactactccacttctcgtgacagacgcctcctcagtctccacaggtgacaccacccggctgcctgtgacatccccatcatctgctagcaccgggcataccactccacttccggtgacagataccccaagcgcttccaccggcgacaccacacctctcccagtcactaatgccagtagcctttctacaagacatgccacaagcctgcacgtgactagtccttcttcggcatccaccggacatgctacgagtctcccagtcaccgacacctccgctgctagcaccggccatgctacacctctccccgtcacatcaacttcttcagcctcgaccggcgacaccactcctctgcccgtgaccgacacatactccgcgtccaccggccaagccaccccactgccggttacatcgctgtcctctgtgtctacaggggacacaaccccattgccggttacttctccaagctccgcttctactggacacgccacacccctcctcgttaccgacgcaagttctgcctctaccggtcaggctacaccactgcctgtcacctcactgtcctcagttagtaccggggataccacgcccctgcccgtgacaagcccttcttcggcttcaacggggcatgccacctccttaccggttacagataccagttccgcatccacaggggacaccactagcctacctgtgactgataccagttcagcgtataccggtgataccactagcctgcccgttaccgacacctcgtcttcctccacaggggatacaaccccactcctggttaccgaaacgagctccgtgtccacaggggataccactcccctgcccgtgaccgacacatcttccgccagcaccggacatgccacccctttgccagtgaccaatactagttcagtctcaaccgggcacgcaacccccctgcacgttacaagcccatccagcgcttctactggccacacgactccccttcctgtcaccgacgcctcttcagtgagtacaggacatgccacctcacttcccgtgactgacgcctcgagcgtgttcaccggacacgcgaccagtttacccgtcacgatcccatcatctgctagttccggccatacaacccccctgcccgtgaccgatgcctcttccgtcagcacagggcacgccacatcactgccggtgaccgacgcttcctccgtatcaaccggacatgcaacaccactgccagtgacagacgcttccagtgtgtcaacaggccatgcaacaccgcttccattgacctctctctctagcgtgtcaaccggagatacgactcctctgcccgtaacagacacaagctcagccagcacagggcaggcaacacctctgcctgtgactagtctgagctcagtatcgactggcgatacgacaccactaccggtgaccgacaccagctctgcctccactgggcatgcaacatctttgccagtgacagatacctcatccgcctctaccgggcatgccacgccgcttccagacaccgacacctccagtgcaagtacaggacacgccacactcttgccagtgactgacacttccagcgcctccataggccacgcgacatctctgccagtgaccgacacatccagcatttccacaggccacgccacccccctgcacgtaacatctccttccagtgcatctaccggacatgccacacccctgcctgtcaccgatacatctagtgctagcaccggccacgccaatcccctccatgtaacatcgcctagcagtgctagtactggccatgccacacccctccctgtgacagatactagttcggcctccaccggtcacgctactcccctgccggtcactagtctatcaagtgtgagcaccggagatacaacaccccttcctgtcacctctccttcatcggcaagcactgggcacacaacacccttgcccgtgaccgacacttcttctgcctcaacaggacaagccaccgcactgcctgtcaccagcacatctagcgcaagtacaggcgacacaacaccgctgcccgttactgatacctcctctgccagcaccggacaggcaacgcccttgccggtaacctcgctgtcctccgttagcactggcgacaccacccctctccctgtgaccagtccatcaagcgcttctaccggacatgccactcccctgctggtgaccgacgcatcttctgcttcgaccggccaggccactcccttgccagtgactagcttatcatctgtttcgaccggggacacaacgcctcttcccgtgaccagtccctccagcgcaagcacagggcacgctaccagtctgccagtgactgacacaagcagcgcaagcacgggggatacaacctcactgccagtcaccgacacgtcttccgcatacaccggggacacaacctccctgccggtgacagatacctcatcatcatccaccggagacaccacgcctctgctggtgacagagacatcctccgtctcaacggggcacgcaacccctctgctagttacagatgccagcagtgctagcaccggtcacgccacacctcttcacgtgacatctcctagctccgccagcacgggagacactacccccgttcccgttacagacacttccagtgtgagcactggccatgcaacccctttgcccgttaccgggctgtccagcgccagtacgggagacaccactagactgcccgtgacagatataagctccgccagcacaggtcaagccaccccgctccccgtgaccaatacatcctccgtgtctaccggggatacaatgccgctgcccgtcacctcacccagttccgccagcacagggcacgcgacccccctgccagtgacctctacctctagcgcgagtacggggcacgccaccccagtgcccgtgacttccacctcctcagcttcgacaggacacacaactccattacccgtgacagatactagctccgcgtctacaggggacacaaccccactgcctgtcactagcccgagttccgcctccactggacacaccactcctcttcacgttacaatcccctccagcgccagtactggggacacctccacccttccagttacaggtgcatccagtgccagtacgggacatgccacccccctccctgttacagatacatccagcgtcagtactgggcacgctacaccgcttccagttacctcattgagcagcgtctccactggtgacactactcctctgcctgtgactgatgcttcaagcgcatcaactggccaggctaccccacttccggtgacaagtctatccagcgtcagcaccggagatacaactcccctgctggtcacagatgcttcatccgttagcactggacacgccacccctctgcctgtgacagatactagctcagcctccaccggagataccactcggctccccgtgacagacacaagttccgcctctacaggccaggccactcccctaccagtcacctcactgagctcggtatctactggggataccacacctttattggtgacagacgcgagtagtgtctccaccggacacgccacacccttacctgtgaccgatactagctccgctagcacaggagacacaactcgactccccgtgaccgacacttccagtgcaagcaccgggcaggctacgcccctgcctgtgacaattccatcttcttctagcagcgggcatactactcccctcccagttacttccacctctagcgtgagtacagggcatgtgacaccgctgcatgttacatccccgtctagcgcctcgactgggcacgtcactcctttgcccgtgacatccacgtcctccgcatccaccggccacgccactccattactcgttaccgatgcgtcctctgtttctacagggcatgccacccccttacctgtgacagacgcttcatccgccagcactggcgacacaacgcctctgccagttaccgacacttcctccgcaagcactggccaggctaccccactccccgtgacttctctcagtagtgtctctacaggcgacactactccccttcctgtgactgatgcttcttcagcttccactgggcatgctactcccctgccagttaccattcctagcagtgtaagtacgggcgacacgatgcctttacccgtgacatcccccagtagcgccagcacagggcacgcaacgccattgccagttacaggcctctccagtgctagcactggcgatactacgcccctccctgttactgacactagttctgcctcaaccaggcacgctacacctttgcccgtgacagacactagctcggcctctacggatgacacgaccagactgccagtaactgacgtatcttccgcttccacgggtcacgctacccctctcccagtgactagtacatcctcagcctccacaggggacactactcccctgcctgttactgacacttcatctgtctccaccggacacgccacatcacttccagtgacctctcgatcttccgcaagtacagggcatgcgacaccactacctgtgactgatacaagctcggtttctactggccacgccacacctctgcctgtgaccagcacctcaagcgtatccaccggtcacgccacccccttgcctgtgacctctcctagcagcgctagtaccggacatgctacgccggtcccagtgactagtaccagctcagcctccacaggtgacactacccctctaccagtgacaaatgctagctcacttagcaccgggcacgccacacctttgcacgtgacatctccctccagcgcctcgcggggagatacctccaccttgcccgttacagatgcctcctcggcatctacaggacacgcaacacctctaccactgaccagcctgtcctccgtgtcaactggcgataccacacctttacccgtgactgacacttcctcagcgtccacggggcaagctacacctctcccagtaactagtttatcttccgtgtcaaccggagatacgactcccttaccagtgactattccatcatctgcctcaagcggacatacaaccagcttacctgtgaccgacgcttcatccgtctccaccgggcatggaacccccctccctgtgacttccacctcaagcgcttccactggcgataccacaccactacccgtcactgacacttctagcgcctctactggccacgccacacctttaccagtgaccgacacatcctcagctagcaccggacatgccacacccctgcccgtcactagcctgtctagcgtttcaacggggcacgccacacctttagctgtgagctctgccacaagcgcctcaactgtgagttctgatagtcctttgaaaatggaaaccccgggtatgaccacacccagccttaagactgatgggggaaggaggaccgctacgagtccaccgcctacaacctcccaaaccataatctcaactatcccaagcaccgctatgcacacacgtagcacagcggctcctatccctattcttcctgagcgaggggtttctctcttcccttatggcgcaggagctggagatcttgaatttgtgcgtaggaccgttgacttcacctcacctctattcaagcctgccacaggcttccccttggggtccagtttgcgcgattccctgtacttcaccgataacggccagataatcttccccgagagcgactaccaaattttcagctatccaaacccactaccaacgggatttactggtagagacccagtggcactggttgctcccttctgggatgatgccgacttctcgaccggcagggggaccacattttaccaggaatatgagacattttacggtgaacactcactgttggtacagcaggccgaatcgtggattaggaaaatgaccaacaatggcggatacaaagctaggtgggccctcaaggtcacctgggtaaatgcacacgcgtaccctgcccaatggaccttggggtctaacacctaccaggccatcctctcaaccgatggctctcgctcctacgcactgtttctgtaccaatccggcggaatgcagtgggatgtggcacaacgatctggcaatcccgtgttgatgggcttctcatccggggatgggtattttgaaaatagcccactgatgagccagccggtgtgggaacggtacagaccagacaggtttctcaattcaaactccggattgcagggtctccaattctatcggctgcatcgtgaggaacggcctaactaccgccttgaatgtctccagtggctgaaaagtcaaccaaggtggccgtcatggggctggaaccaagttagctgcccatgtagttggcagcaaggaagaagggacttacggtttcagcccgtgagcattgggcgatggggactcggttcccgtcaattgtgttcctttacctcttggaggggcggtgtttgctgctcttatggcccttggggtgaattccgagagggctggcacgttcagcgaccttggcagctcgcacaagagctggaaccccagagctggtgctgccgttggaatgataagccctacctctgcgctctgtaccaacagagaagaccccacgtgggctgtgccacttaccggccaccacagcctgcttggatgttcggagacccacacatcacaacactggatggcgtgagttatacttttaacggcctcggcgattttcttcttgttggagcccaggacggcaattcctcttttttattacaaggcagaactgcccaaactggctctgcccaggcgacgaatttcattgcttttgctgcacagtaccggtcgtcctctctggggcctgtaactgtccagtggcttctggaacctcatgacgccatccgggttttattggacaaccaaacagtcacttttcagcctgatcatgaggacggaggcggacaagagaccttcaatgctaccggtgtcctgctgagcaggaatggatcagaagttagcgccagctttgacggatgggccactgtgagcgtgatcgctttgtcaaacattctgcacgcttccgccagcttacccccagaatatcagaaccggacggagggccttctgggtgtctggaataacaatcccgaagacgatttcaggatgccaaatgggtcgaccatacctcctggctccccggaggaaatgctgtttcactttggcatgacctggcagatcaacggcacaggcttgctcggaaagcgtaatgaccagctcccctctaacttcacaccagttttctacagccaactgcaaaagaattccagctgggcagagcacttaattagcaattgcgatggggatagctcatgtatttacgacacacttgccttaaggaacgcctccataggtcttcatactcgagaggtcagtaagaactatgagcaggccaacgccaccctgaaccaataccctccctccatcaatgggggtcgagtgattgaagcttacaaggggcagactaccctcattcagtacacgtccaatgctgaagatgctaactttaccttgcgagacagttgtaccgatctcgaactttttgagaatggcaccctactctggacacccaagtcccttgagccatttacactggaaatcctcgcgaggtccgccaagataggtctggctagtgcattgcaaccacggactgtagtgtgtcattgcaatgccgagagtcaatgcttgtacaatcagacatcacgggtcggaaattctagcctggaggtcgccggttgtaagtgcgacggaggcactttcgggcgttattgtgagggcagcgaggatgcctgcgaagagccgtgcttcccgtctgtgcactgcgttcctggcaaagggtgtgaagcgtgtccgccaaatctcaccggagacggtagacactgtgcagcgttaggttcatcatttttgtgtcagaaccagtcttgtccggtgaactactgttataatcagggccactgttatatttcccagacactgggttgtcagccaatgtgtacctgccccccagcctttacagactcccgttgcttcctggctggaaataatttcagcccaaccgtgaatcttgagcttccattaagggtgatccagctgctcctttccgaagaagagaacgcctctatggccgaagtgaatgcctctgtagcttaccgtctggggaccctcgatatgcgggcattcttacgcaattctcaggtggaacgaatagacagcgccgctccagctagcggatcgcccatccaacactggatggttatctctgaattccaataccgcccaagaggccctgttatcgatttcttgaataatcaactgctcgcggcagttgtggaggcgttcctttatcacgtgcctagaaggagtgaggaacctagaaacgacgtggtcttccagcccattagcggagaggatgtgcgggacgtgactgcactgaatgtgtcgacattgaaggcctacttcagatgtgacgggtacaagggctacgacctcgtttactccccacagtccgggttcacctgcgtgtccccctgttcgagaggctactgtgaccacggcggacaatgtcagcacttgcctagcggcccacgctgcagctgtgttagcttcagcatttacactgcctggggcgagcactgcgagcatctttcaatgaaactggatgccttctttggaatcttcttcggcgctctgggaggtctcttgttactgggcgtaggaaccttcgtggttctgcgcttttggggctgttcgggagctcgattcagctacttcctgaactcggcggaggctttaccctag

SEQ ID NO: 231127 - DNA, 16083 bp, synthetic construct
  misc_feature 1..16083: note = Description of Artificial Sequence: Synthetic coding sequence
  source 1..16083: mol_type = other DNA
atgaagggcgctcggtggcggagggtgccttgggtgtccctctcttgtctctgcctgtgtttgctcccacacgttgtgccgggtacaactgaggataccttgatcactgggtctaaaacagccgctcctgtgacgtccactgggagtactaccgccactctcgaagggcaatccaccgctgcgagctcccggacctccaaccaggacattagtgcctcttcgcagaatcaccagaccaaaagtactgagacgacctcaaaggcccagactgatacgctcactcaaatgatgacaagtactctgtttagcagcccgagcgtgcacaacgtgatggaaacagcccctcctgacgagatgacaacgagcttccccagctctgtaaccaataccctcatgatgaccagcaagaccattacaatgacgaccagcaccgatagtactctggggaatactgaggaaactagcacagcagggactgagtcctccacccccgttacaagcgcagtatccattacagcaggccaggaaggccagagcagaaccacatcttggcgaacttcaatccaggacacgtcagcctcctcccagaaccactggacccgctcgacccaaaccacacgcgagagtcaaacctccactcttacccatcggacaacctcaactccctccttcagcccatccgtacacaatgtgaccggaacggtcagtcagaagacgagtccatccggcgagacagcaacctcaagcctctgttcagtaacaaacacatcaatgatgacatccgaaaagattacagtgacgacttccacagggtcaacactcggcaaccctggggagactagttctgtcccagtgacgggatccttgatgcccgtgacgtctgccgcactcgtgacctttgatccagagggccaatcacctgcgacattcagtaggaccagtacacaggacacaaccgccttttctaagaatcaccagacacaaagtgtggaaacgacaagagtgtcgcaaattaacaccctgaacaccctcacaccggtgacaacgtccacagtgctgagtagcccttccggcttcaacccaagcggcactgtttctcaggaaacctttccaagcggagaaacaaccacatctagtccctcctccgtgtcaaacacattcctcgtgaccagtaaggtgttccggatgcctacatctagggacagcaccctcgggaatacggaagagacgagcctgtctgtaagcgggaccatatccgcaataaccagcaaagtgtctacaatttggtggtctgatactctgtcaaccgctctgtccccatccagtctcccgccaaagattagcaccgcattccacactcagcagtccgaaggggctgagacaacaggaagaccacacgagaggtcatctttctctcccggtgtgtctcaggagatattcacactccacgagaccacaacatggccatcatcgttcagctcaaaggggcacaccacctggagtcaaacagaactaccgtccacttccaccggtgccgctacccggctggtgaccggtaatccttccacaggtacagccggaactatccctcgagtcccatctaaggtgagtgccataggcgagcctggcgaaccgaccacttatagctcccattctacgacgctcccaaagaccacgggcgcaggggcacaaactcagtggactcaggagacaggaactacaggtgaagctcttctgtccagtccttcttactctgtaacgcagatgataaagactgcgacttctcctagcagctctcctatgttggaccggcatacatctcagcaaatcacgactgcgccttcaaccaatcattcaaccatccactcaacaagcaccagtccgcaagagtctcccgctgtgagtcagagggggcatacgcaagctccccagactacccaggaatctcagacaactaggagcgtatctcccatgaccgacacaaaaacagtgaccaccccaggctcatccttcacagcatccggacattcaccaagtgagatagtgccccaggatgcgcctacgattagcgctgccactaccttcgcaccggctccaaccggcgacggtcatactacgcaggcaccaaccaccgctctgcaggctgcccctagttctcatgacgccacccttggcccatccggcggtacgagcttgtccaaaaccggagcactgaccctggcgaatagtgttgtaagcacgcccggaggcccagaaggacagtggaccagcgccagcgccagcacttcccccgacaccgcagcggcaatgacccacacacaccaagccgaaagcacagaagccagtgggcagacccagaccagcgagccagcctcatctggctctaggactacctccgccggaacagcaaccccgtccagttctggggcatctggaaccacaccttcaggtagcgaaggaatcagcacctccggcgagacaaccagattttcctctaacccgtcgcgtgactcccacactacccagagcactaccgagttactttccgcaagcgcttctcacggtgctattcccgttagcacaggtatggcatcatccatcgtgccaggaacgtttcatcctacacttagcgaagccagtaccgctgggaggcccacagggcaatcaagccctacctctccctccgccagtccccaggagaccgcggcaatcagcaggatggcccagacccagagaactcgaacatctcgcggatcagacactatcagcctggctagtcaagcaactgacaccttttccaccgtgcctccaacaccacccagtatcacaagcactggccttaccagcccacagacggaaacccatacactgtccccgtctggcagtggaaaaacttttaccacggcccttattagtaatgccactccactgcccgtcacgtacgccagttctgcttcaacgggccataccacccccttgcacgtgacagatgcatcttctgtgtccactgggcatgccacccctctccccgtgacatccccgtctagtgtgagtacggggcacaccactcccctgccggttaccgatacctcatcagagtccaccggacacgtgaccccgctgcccgtgactagtttcagttcggcgtcaacgggagactccacaccactgcctgtgactgatacctcatcagcaagtaccggccacgtgactcctctcccggtaactagcctaagctcagccagcaccggcgatacgacacctctgcctgtgaccgatacctcatccgccagcaccggccacgccacaagcctgccggtcactgatacatcatccgtcagtaccggacatactactcccctcccagtgacagatactagcagtgcctctacaggccacgctacctcactgccagtaactgatacttcatctgtgagcaccggccacaccactcccctacacgtcaccgatgcttcatcagcctccaccggccaggctacccccttacccgtgacgtcacttagctctgtctcaaccggtgacacaactcctctccctgtgaccagcccttcttcagcttcaactggtcatgccacacccttgctcgttacggacacatccagcgcaagtacaggccacgccactccactccccgtaacagacgccagttccgtttctacggatcacgctacgtccctcccggtgaccattcctagcgccgcaagtacaggacacacgacacccctccccgttacagatacatccagcgcgtcaactggtcaggctaccagcttgctggttaccgatactagctccgtgagcaccggcgatactacacccctgcccgtaacctccacttcgtctgcaagtaccggacatgtgacccctttacacgtgacttctccaagcagtgccagtacaggccatgcaacaccgttgcctgttacgagcctctcatctgcttccactggtgatactatgcctctgccagtcactagtccgtcaagcgcaagtactggcgataccacgccattgcccgtgacagacgcatccagcgtaagcacgggccatacgacaccccttcacgttaccgacgcctcctcagcaagcaccggacaggctacaccccttccagtgactagcctatcctctgtctctaccggagacactacccctctgcccgtcacctccccctcatctgccagtacagggcatgcaacgcccctgctggtcacagatacaagctccgcttccactggccacgccacacccctgcccgtgaccgatgcgtcatctgtttcgaccgatcacgccacttctctccccgtgacaatccctagcgccgcatccacaggacacacaactccattgcctgttactgacactagttccgcgagtacaggccaggccaccagcctcttggtcactgatacctcatcagtttctaccggggacaccacgccgctgcctgtgacgtcaacaagcagcgcttccacaggccatgttactcctctacatgtgacatctcccagttccgcttctactggccacgctacgcccctgcccgtgacttccctgtcatcggcatcaactggagataccatgcccctgcccgtgacatccccaagctcggcctcaaccggtgataccacccccctgcctgtgaccgatgcctcctctgttagtacggggcacactactcctctgccggtgaccagcccttccagtgcttcaaccggccacactactccactgcctgtcacagacacttcctccgcctccaaaggagataccactccactgcccgttacatcccccagctccgcttctaccggacatacaacacccctgccagtcaccgacacaagtagcgcgtctaccggagacaccacaccactgcctgtgactaacgcctcttcgctctcgacagggcacgcaacacccttgcatgttaccagcccgagctccgctagcaccggacatgctacccccctgccagttacttcaacttcctctgcctcaaccgggcacgctacccctttgcccgtgacgggcctgagctctgcgaccaccgacgataccacacggctccctgtcaccgatgtgtctagcgcgagcaccggacaagccacacccctgcctgtaacaagcctgtcatccgtgtcaaccggagacactactccacttccggtgaccagccccagctcagcctccaccggccacgcttctccactcctagtgacagatgcttctagcgccagcaccggccaggccacaccgctcccagtcacggatacatcaagcgtgagcaccgcccacgctaccccattgcctgtgacaggcctctcttcagcatcaacagatgataccacccgtctgcctgtcaccgacgtgtcatccgccagcacgggccaggctattccactccctgtaacatcccctagtagcgctagtacaggcgacacaacccccttgcctgtgacagatgcgtctagtgctagtacaggagacaccacgtctctgccagtaacgatacctagttcggcctcatccggacacaccacatcgctgcccgtcaccgacgcatcgagtgtgagtaccggccatgccaccagccttctggtaacagacgcctcttccgtgtccaccggagacaccactccactgccggtaacagataccaactccgctagcaccggggacacaacgcctctccatgtgacggacgctagcagcgtttccacaggccacgctacctccttgcccgtcacttcgttgtctagcgcctctactggcgacacaactccactgccggtcacaagcccatcctcagcaagctccggccacaccacaccactgcccgtaacagacgcctctagtgtcccaacaggacatgcaacgtctctacccgtgacagacgcctcaagtgtgagcacgggccacgccacacctctgccagtcactgatgcttcatcggtcagcaccggccacgccacccccctccccgtgacagatacttcctcggtaagcaccggtcaggccacccctctcccggtaacctcccttagcagcgcgtcaaccggagataccaccccgttgcctgttactgacacgagctctgctagtactggtcaggatactccgctcccggtgacgtcgctatcctcagtgtcaaccggcgacaccaccccactccccgtgactaacccgtcttccgccagtaccggacacgccaccccattgcttgttacagacgcctccagtatctcaaccggccacgccacttcactcctggttacggacgcatcctccgtctccaccggccatgccactgcactgcacgacactgatgcctctagtctgagcacaggcgacacaacccccctgcctgtaacaagcccatcctcaacctccaccggcgataccactcccctgcccgtgaccgagacctcatcagtgagcaccggtcacgctaccagcctgcccgtgaccgacacctcaagtgcatcaaccggacatgcgacttctttgcctgtgaccgatacatccagtgcctccacagggcatgcaacgccgttaccagtgaccgacactagtagcgcttccacaggccaagccaccccgctccccgtaacatcccccagtagtgcctccactggccacgccattccacttctggtaaccgatacaagcagcgctagcaccgggcaggctactccattacccgtcaccagcttatcatctgcctctactggagatacgacgccgctgccggtgaccgacgcatcttcggtatcaacggggcacgcaacctcattgcctgtcacatctttaagctccgtgtcgacgggggacaccacaccattgcccgtcacatccccctcctctgccagtaccggtcatgccaccccactgcatgtgactgatgcttccagtgccagtactggacatgccaccccactccccgttacgtctctttcatcagcctcgactggcgacaccacccctttgcctgttacgtccccgagcagcgcgtccacgggccacgccacaccgctccacgtaaccgacgcatccagcgttagtacaggagataccacccccttgcccgtcacatcctcgagcagcgcttctagtggtcatacaacgccactccccgtgactgatgccagttcagccagcaccggggacacaacccctctgcccgttacagacacaagctccgcaagcaccgggcatgccacccacctccctgttactggtctgtcatctgccagcaccggggataccacgcgacttcccgtgactaatgtatcgagtgccagcaccggtcacgcaacacccttgcctgtgacgagtaccagttccgccagtactggcgataccactcccttaccaggaacagatacctccagtgtcagtaccggccataccacccctctgctcgtgaccgatgcctcatcagtctctactggggacactaccaggctccctgtgacttctccctcctccgcttcgacaggccacacaaccccactacccgtgaccgacaccccatctgctagcacaggggacacgacgccactgccggttacgaacgcatctagtctttctacgcgacacgccaccagcctccatgtgacgagcccttcctctgccagcacgggtcatgcaacttccctgccagtgaccgacactagtgctgcttccaccggccacgccacaccgctgcccgttacatctacaagctctgcctcaacgggagacaccacgccactgcccgtgacggacacttactccgcaagtaccgggcaggctactccactacctgttacgtcgctttcttctgtgtcaacgggcgacaccacccccttaccagtaaccagccctagttccgccagcaccggccatgcaactccactcttggttactgacgcctcatcagccagcactggccaggccaccccattgcctgtgacatctttaagttccgtctccaccggagacacaaccccgttgcccgtgactagtccctcctcagcatcaaccggtcacgccacatcactacccgtaaccgacacctcgagtgctagcacgggagataccactagcctcccagttacggataccagctctgcctacacaggcgacactacctccctgcccgtcacagatacaagcagcagcagtacgggtgatacaacacctctgttggttactgagactagcagtgtcagtaccggcgatactacgccactgcctgttaccgatacctcgtcggcgtctaccggtcatgccacacccttgccggtgaccaatacatctagtgtctcaaccgggcatgccacacctctccacgtcacatctccttcatctgccagcacgggacacaccaccccgttgcctgtaaccgacgcctcttccgtgtcaacaggacacgctacttccttgcctgtgaccgacgcttcctccgtttttaccggccacgcaacctctctgcccgtgacaattccgagttcggcatcctctgggcacaccacccccctccccgttaccgacgccagctctgtgtctacaggacacgcgacctcgctgcctgtcaccgatgcgagtagtgtaagtacaggccatgcaactcctctaccagtcaccgatgcttcttccgtgtccaccggccacgccaccccactgcccctgacctctctaagctcagtgtccaccggagatacgacccccctgcccgtcactgatacaagctccgcatcaacaggtcaagctacccccctccctgtgacaagcctctccagcgtgagtaccggcgatacaacgcccctgccagtgacggacacatcgtccgcttccaccggacacgcgaccagcctgccagtaactgatacgagctccgcttcaacaggccacgccactcctttacctgacactgataccagcagcgcttccactggtcatgcgaccctgctgcctgtcactgacacctcctctgcatccatcgggcacgcaactagcctcccagtcacagacacatcttcgatatctacagggcatgccacacccctgcatgtgactagcccatcatccgcatccaccggtcatgcaacacccctgcccgtcaccgatacgtccagcgctagtaccggccacgctaatcccttgcatgtcactagtccttcatctgcgagcaccggacacgcaacacctctgccggtgacggataccagcagcgcgtccacaggacacgctactcctctccccgtgacaagtctaagttccgttagtaccggcgataccacaccactgcctgttacttccccttcctctgcaagtaccggccacaccactccacttcccgtcaccgatacttctagcgcatcgaccggtcaagccaccgccctaccagtgacgagcacgagctccgcctcaaccggtgacacaacacccttgccagtcactgatacctcaagcgccagcacgggacaggccacgcccctgcctgttacgtcattgtcttccgtgtctactggcgacaccacacctttgcccgtgacaagcccctcctcagcttcgaccggccacgcgacacccctgctggtaaccgatgcttcgtcggctagtacaggccaagccacgcccctgcctgtgactagcctgtcaagcgtgtctacaggcgacactacgccactacctgtgacctccccttcatcggcctccacggggcatgcaacgtccctccctgtgacagacaccagtagcgcctccactggtgatacaacaagtctcccagttactgacacctcgagtgcatataccggggacacaacatccctgccagtcactgataccagttcttcctctaccggggataccacaccactgctagttacagagactagctctgtgtctactgggcacgccacgccacttctggttacagatgcgtcctcagcctcaactggtcacgctacgccactgcacgtgacatccccatcaagcgcctcgaccggcgataccaccccagttccagtcactgacacgtcttccgtaagtacgggacacgctactcctctacctgtgacggggctctcttccgcctctactggggataccacccgcttacctgtgacagacatcagctccgcttctacgggtcaagcaacgcccctgcccgtaaccaataccagtagtgtgagtaccggcgacacaatgccgttaccagtaacctcacccagttctgccagtaccggccatgctacacccctgcctgtgacaagcacaagcagtgcttcaacgggacacgctactccagtccccgtgacatctactagctctgcctcaaccggacatactaccccattgccagtcactgatacatccagtgcgagtacgggcgacactacacccttgccggtcacctccccaagtagcgccagcacaggtcacactaccccactgcacgtgacaatccccagcagcgccagcacaggtgatacttccacacttccagtgacgggcgctagctccgcaagcacggggcacgccacccctcttccagtaactgacactagcagcgtatctaccggccatgctacaccgctccctgtcacgtccctgagttctgtgagtactggggacaccacaccactgcccgtgactgacgcctcctccgcttccactggccaagccactccactgcctgtgacttcactgagcagcgtgtcaacaggggatacaacccccctgctggtcaccgatgcctcatccgtatccacgggccacgcaacccctctccctgttaccgatacgagctctgcctctactggagacacgaccagactgccagtgacggacacaagcagtgcttccacaggccaggctacgccactgcccgtgacatctctgtccagtgtgagcaccggcgatacaactccactgttggtcaccgacgcctcttctgtgagcactggtcatgcgacaccactgccagtgactgacacttccagcgcaagcaccggagacacgacacgactgccagttacggacacctcttccgcaagtacaggccaggcgacaccactgcctgtgacgatccctagcagttcaagtagtggacatactactcctctccccgttacatccacatcaagtgtctctaccggccatgtcactcctctgcacgttacctctccctcctctgcaagcactggccatgtgacccccctccccgtgacctcgacaagcagtgcttctacgggtcatgccacacccttactggtgaccgacgcaagttccgtgtcgaccgggcacgccactcccctgcccgtgaccgacgccagtagcgcatccacaggagacacaaccccactccctgtcacagacacatcatcagcatctacaggccaagccacaccgttgccagtgaccagtctgagttccgtgagtaccggagacaccaccccgttgcccgtgaccgacgccagcagcgctagcactggtcatgcaacaccattgcctgtgactattcctagctcagtctcaacaggcgacacaatgcctctgccagtgacatctccaagctccgccagcacggggcatgctacccccctgcctgtgaccggcctatcctctgcctccacaggggacacgacacctctccccgttaccgacactagctcggcatccacccggcacgccacacccctgcctgtgactgacacaagctccgcctctacggatgacacaacaagactccccgtaacggatgtttcatccgcaagcaccgggcatgccactccacttccagtaactagtacatcatccgcatctacaggagatacgactcccctgccagtcacggacacttctagcgtaagcaccggccatgctacatcccttccagtgacttcaagatcctcggctagcactggccacgccaccccattacccgtcacagacacttcttctgtctcgacgggacacgcaacccccctgccagtcaccagcacttccagcgtttctacgggccacgctacacctctccccgtgacctctccctcatctgcttctacaggacacgcgactcctgtgccggtcacaagtactagctcagccagtaccggcgacaccactcccctgcccgtgaccaatgcaagcagcctatctactggacatgctactcccttgcacgttacttccccctcatctgcctcccgtggcgacaccagtactttgcccgttacggatgccagttcagcttctacaggtcatgcaacccccctgcccctgacttccctatccagcgtctcgaccggggatactactccccttcccgtgaccgatacctcatccgcaagtacagggcaggcaaccccactccctgtcacaagcctgtctagtgtttcaacaggtgataccacccccttgccagtaacaattccctcgagcgcctcaagtggtcacactacaagcctcccagttactgatgccagctctgtttcaaccggacacgggacgcctcttcccgttacaagcacttcatcagcctcgactggcgacaccacaccactgccagtgacggatacatcatcagctagtaccggtcatgctactccattgcctgtcaccgacacttcctctgcttctactggccatgctacccccctgcctgtcactagcctcagttccgtgtctactggtcatgcaacccccctggctgtttcatctgccacttcggctagcacagttagctccgactcccccctgaagatggaaacccccggaatgacaacaccatccctcaagactgacggcggaaggagaactgcaactagccccccacccaccaccagccaaacaattatttccaccatcccatctaccgcaatgcatacccgcagtactgcagctcctattcccatccttcccgagaggggtgtctccctcttcccctatggagctggcgcaggcgatttggagtttgtgagacggacagtcgactttacttcacccctgttcaagcctgctacaggattccctttgggcagctccttgcgcgactctctatacttcaccgataacggtcagatcattttcccagagtcagactaccaaatcttctcctatcctaaccctctgccaaccggttttacgggcagagaccctgtcgccttagtggcacctttctgggatgatgctgatttctctaccggcaggggtacgacattctatcaaagcaacacgtatcaggctatccttagtaccgatggaagccgctcatacgcgctctttctctaccagtcaggtggcatgcaatgggacgttgctcagaggtctggaaatcccgtattgatgggtttctcttccggtgacggctactttgagaactcaccgctaatgtctcagccagtctgggaaaggtatcgcccagataggtttctgaactctaactcaggacttcagggactccagttctatagactgcacagggaagagagacctaattaccggctcgaatgcttgcagtggctcaaaagccagccgagatggccaagctgggggtggaaccaggtgtcctgtccgtgctcttggcaacaggggcgtagagacctacggtttcagccagtttcaattggcagatggggcctgggatctagacagctctgcagcttcacctcctggagaggcggagtctgctgctcttatggtccctggggagaattccgcgaaggctggcatgtgcagaggccctggcagctggctcaagaactggaaccccagtcatggtgttgccgttggaacgacaaaccttatctgtgtgccctgtatcagcagaggcgaccccatgtcggatgtgctacatatcgcccacctcagcccgcttggatgtttggtgacccacacattactacgcttgacggggtgtcatatactttcaatggacttggagactttctgctggtaggcgcacaggacggaaattcttccttcttacttcaggggcgtactgcgcagactggatctgctcaagcaaccaattttatagctttcgctgcccagtatagatcctcttctctgggtcccgtaaccgtacaatggctattagagccccatgacgctatccgagtgctactggataaccagaccgtgaccttccagcctgaccatgaggacggaggaggtcaggagacattcaacgctacaggtgtgttgctgtcaagaaatggctccgaagtgtcagcatcattcgacggttgggccaccgtgtcagtcatcgccctgtccaacatattgcatgcttcagccagtctgcccccagagtaccagaaccgcacggagggtctgctgggggtgtggaataacaaccccgaggatgactttcgcatgccgaatggcagcaccattcccccaggcagccctgaggagatgcttttccatttcggaatgacatggcagattaatggcactggtctcctcggcaagcggaacgatcagctcccatccaatttcacaccagtcttttattcccagctgcaaaaaaattcaagttgggcagagcacttgatcagcaattgtgatggcgattcaagctgtatttacgataccttggcactaagaaatgcaagcattggcctgcacaccagggaagtgtcgaaaaattatgagcaggccaacgctaccctcaatcaatatccgccaagcataaacgggggaagagtgattgaagcatacaaggggcagactaccctgattcagtatactagcaacgcagaggacgctaactttacactaagagactcgtgcacagaccttgaactgtttgagaacggaacgttgctgtggacccccaaaagccttgaacccttcacattggagattcttgcccgatctgccaagattggccttgcgagcgccctgcagccacggacggtcgtttgccactgtaatgccgagagtcagtgtttatacaaccaaactagcagggtgggtaattcttccttagaggttgctgggtgtaagtgcgacggaggaacgttcgggagatattgtgagggctcagaagacgcgtgtgaggaaccatgctttcctagtgttcattgcgtgccgggtaaagggtgcgaggcatgccctcccaatctcaccggggatggcaggcactgtgcagcattgggtagcagtttcttatgtcagaaccaaagctgcccggttaactactgctacaatcaggggcattgctatatctcgcagacacttggttgccagcccatgtgcacttgccctccagcatttactgacagcagatgcttcctcgccggtaataactttagccccacagtcaacctggagttgccactgcgagtgattcaacttctgctcagcgaggaagagaacgccagcatggcagaggtaaatgctagtgtggcctacagactcggcaccctggacatgcgggcatttctgcgaaattcccaagtggaaagaatagactccgccgctcctgccagtggtagtcccattcagcattggatggtgatcagtgaattccagtacaggcctcggggtcctgtcattgacttccttaataaccagctattggccgctgtggtggaggccttcctgtaccatgtgccaaggcgatccgaggagccacggaatgacgttgtgttccagccaatctctggcgaggatgttagggatgtgacagccctgaacgtttcgaccctgaaagcatacttcaggtgcgacggctacaaaggttatgatctggtgtatagccctcagagtggcttcacatgtgtgtctccttgcagtcggggatactgtgatcatggaggacagtgccagcacctgcccagcggcccacgatgcagttgcgtctctttttcaatttacacagcctggggcgagcattgcgagcacctgtcaatgaaactggatgcattctttggtattttctttggggctcttggcggattgcttctgcttggggtcgggacattcgtggttctccgcttttggggttgcagtggcgcaagattctcctactttctcaattctgccgaggccttaccctac

SEQ ID NO: 231128 - DNA, 1863 bp, synthetic construct
  misc_feature 1..1863: note = Description of Artificial Sequence: Synthetic coding sequence
  source 1..1863: mol_type = other DNA
atgagtgtgggaagacggaaacttgccttgctgtgggccctcgccctggcgctagcttgcacacgccacaccgggcatgcgcaggatggtagctccgagagcagttacaaacatcatcccgctttgagccctatagccagaggcccatcaggggtgccactccggggtgccaccgtttttccaagccttaggaccattcctgtggtcagagcatcaaatccggcacataacggccgagtgtgctccacctggggttcattccactacaagaccttcgatggtgacgtgttccgattccccggtttgtgtaattatgttttttccgagcattgtggggcagcctacgaagactttaaccccgctactcctcagccaggcgtaagcgggccacacgccgagcagggccctcatgaaggtggctggcgcggacatccagcagaccagggacttaggcccggacaaaggcctcccggacccgctgccctgcagcctgtttgggggccacattctagggcagctgccaccccccgatggaggcccggatgggcgcttagtagctgtggtaccacgatgaccgcatgctgctggctggacacaaaatatgcaaacaaactctgggctttatggggccttcaacgggatgcacgcggacaaagggccccactgcctcagcatcaggccgacacacacggtatacgggagccggcacggtggaccaccccaaggtcctctgttcggacgttgtccctcaatccacggggaaccgccccactggcgttagggatttgcgaagaactgcttcacggacagctgttctcaggttgcgtggcgttggtcgatgttggcagctacttagaggcttgcagacaggatctttgtttctgtgaggataccgacctattatcctgcgtttgccatactcttgcggagtacagtagacaatgcacccatgcaggtggactaccccaggattggcgcggtccggacttctgccctcagaaatgtcccaataatatgcagtaccatgaatgcagatctccctgcgcagacacatgtagcaatcaggagcactcgagggcttgcgaagaccactgcgtggccggttgtttctgccccgagggcaccgtcctggacgacatcggacagacaggctgtgtgcctgtgagcaagtgcgcctgcgtgtataatggggctgcttacgcaccaggtgcaacttactcgactgattgtacaaactgcacatgtagcgggggacgctggagttgccaggaggtgccctgccccggaacctgcagcgtgctgggcggagcacacttctccaccttcgatggcaagcagtacacggtacacggagattgctcctacgtcctgactaaaccttgtgactcatccgcgtttacagttttagctgagctccggagatgcggattgactgattctgagacctgcctcaaatctgtcacactctcactagacggggttcaaaccgtcgttgtgatcaaggcatcgggtgaggtgtttctgaaccaaatatatactcaattgcccatctccgcagctaatgtgacaatcttcagaccctccactttcttcattattgctcagacctcactgggactgcagcttaacctacaactcgtacctacgatgcaattatttatgcagctcgcacctaagctgaggggtcaaacatgcggcctgtgtggcaattttaactcaatccaggcagacgactttaggactctgtctggtgttgtggaagccaccgctgccgcttttttcaataccttcaagacacaggccgcttgtcccaacatccgcaatagctttgaggatccctgctctttgtcagtggagaattag

SEQ ID NO: 231129 - DNA, 1872 bp, synthetic construct
  misc_feature 1..1872: note = Description of Artificial Sequence: Synthetic coding sequence
  source 1..1872: mol_type = other DNA
atgagtgtgggtcgccgaaagctggccctgctgtgggctcttgccctcgctctggcttgtacgcgccacaccggacatgcccaggatggttcttcggaatcttcctacaagcaccaccccgctctgtccccaattgcccgaggcccatcgggggtcccattgcggggtgccaccgtttttccgtcccttcggactatcccagtggtgcgtgcctcaaatccagcccataatgggcgtgtctgctctacatggggctcctttcactacaaaacatttgatggcgacgtcttcagatttcctggcctatgcaactacgtgtttagcgagcactgtggcgctgcgtacgaggatttcaatattcagttacggcgatctcaggagagcgctgcacccactctctcccgggtgttgatgaaggtagacggcgtggtgatccagctgaccaaaggtagtgttctggtcaatgggcaccccgttctcctacctttttcgcagagtggggtccttattcaacagtcatcaagttacacaaaagtcgaggcccgtctgggactggtgctgatgtggaatcacgacgactcactgctgctcgaattggacacaaagtacgcaaacaagacttgtggtctgtgcggcgatttcaacgggatgcctgtggtgtccgaacttctctctcacaacacaaagcttacaccaatggagttcggtaatctgcagaagatggacgaccctactgaacagtgccaagatccagtgcctgaacctccacggaattgcagcacgggctttgggatatgtgaagaactccttcacggacagctgttttcaggatgtgtagccctggttgatgtcggcagctatctcgaggcttgtaggcaggatctgtgtttctgtgaggacactgacctgctgtcctgcgtgtgtcacacgttggctgagtattcccgacagtgcacccatgcaggcggtttacctcaagactggcgaggtcctgacttttgccctcaaaagtgtcccaacaacatgcaatatcatgagtgtagatctccatgcgccgacacttgcagcaaccaggaacattccagagcttgcgaggaccactgtgtggccggatgcttttgtccggaaggtaccgtgcttgacgatatcggccagaccgggtgcgtgcccgtttctaagtgtgcctgtgtatataatggagccgcatacgcccctggagccacgtacagcaccgactgcactaattgtacatgcagcggcggtcgctggtcgtgtcaggaggtaccgtgtcccggtacctgctctgtcctcggtggcgctcacttcagcaccttcgacggcaagcagtacactgtccacggggattgttcttacgtgctgacaaaaccatgcgatagctccgccttcactgtactggcagagctgaggagatgtgggctgacagactcagaaacatgtctgaagtccgtgactttgtctcttgatggggtgcaaaccgtggttgtgatcaaagccagcggtgaagtctttttaaatcagatatatacacagctgccaatctctgcggcaaatgtcacgatatttcggcctagtacattttttattatcgcacaaacaagtcttggattgcagctcaatctgcagctagtccccactatgcagctctttatgcagttggcaccaaaactccgcggacaaacatgcggtttatgcgggaactttaattctattcaggctgatgatttccggactcttagcggggtggtggaggccactgcagccgcattctttaatacctttaaaacacaggctgcatgcccaaacatccgaaactctttcgaggatccttgtagcctgtctgtggagaactag

SEQ ID NO: 231130 - DNA, 17120 bp, synthetic construct
  misc_feature 1..17120: note = Description of Artificial Sequence: Synthetic coding sequence
  source 1..17120: mol_type = other DNA
atgggagccccaagcgcatgcagaaccctcgttctggccctcgcagctatgctggtggtcccccaggccgagacacaggggccagtcgagcctagctgggagaatgctggccacacaatggatgggggagcgcctacctctagccccacacgacgagttagctttgtaccaccagtgactgtttttccaagcctctctcctttaaatccggctcacaatggtcgcgtgtgtagtacatggggagacttccactacaagacgttcgacggcgatgttttcagattcccaggactgtgtaactacgtattctccgagcattgtcgcgcagcttacgaggatttcaacgtgcagttgcgcagaggacttgtgggttcacgaccggtcgtgacgcgggtggtgatcaaagctcaaggactggttttggaggccagcaacggctctgtcttgattaacggtcagcgggaggagctgccctactcacggacaggactcctcgtggaacagagtggcgattacatcaaagtgagcatccgactcgttctgacatttctgtggaacggcgaggattctgcccttttggagctggatccaaaatacgcaaaccagacttgtggcctgtgcggtgattttaacggtcttccggctttcaatgaattctacgcacacaacgctcggctcactcctctgcaatttggtaacctccagaaattggatggacccacagagcaatgccctgaccctcttccgctgcctgctggcaactgtactgatgaggaggggatttgccaccgcactctcttgggaccagctttcgctgaatgccacgcccttgtagattccaccgcatatctggccgcatgtgcccaggacctgtgccggtgccccacatgcccttgcgctactttcgtggagtactcgcgccaatgcgcccacgcaggcggacaaccccgtaattggaggtgtccggaactgtgtcccaggacatgtccccttaatatgcagcaccaagagtgtggcagcccatgtacagatacctgtagcaatcctcagagagcacagctgtgtgaggaccactgcgtcgacggatgcttctgtcctcccggaagcactgtcctggacgatattactcattctggatgtctccccctaggacagtgcccctgcacccacggcggtcgcacctatagtcccggaacttcgttcaacacaacctgctccagttgcacctgcagcggcggactttggcagtgtcaggatctcccttgcccaggtacatgcagtgtgcagggcggtgcgcacatctccacttacgatgaaaagctgtacgatctccacggtgactgttcttacgtcctgtcgaaaaaatgtgccgacagtagctttacagtgttagccgagctacgcaaatgtggcctgacggataacgagaactgcctcaaagctgtgaccctctccctggacggaggagacaccgctataagagtgcaggccgatggaggcgtcttccttaacagtatatacacccaactgccactgtccgccgctaatatcacattattcacgccctcatctttctttatagttgtccagacaggcctgggcctgcaactcctcgtgcaacttgtgcccctgatgcaagtcttcgtgcgcctggacccggcacaccaagggcaaatgtgcggactgtgcggaaactttaatcaaaaccaggctgatgattttaccgctcttagtggggtcgtggaggctacaggagctgccttcgcaaacacctggaaagcacaggccgcatgcgcaaatgctcgcaattcatttgaagatccatgcagcctctctgtcgagaacgagaactacgcccgacactggtgttcacgactgacagaccctaattccgctttttcccgctgtcactccatcatcaatccaaaaccattccactccaactgcatgtttgacacttgcaattgtgaaagaagcgaagactgtttatgtgctgccctcagttcctacgtgcatgcttgcgcagccaagggcgtccagctttccgactggcgagatggcgtgtgtactaagtacatgcagaactgccccaaaagccaaagatatgcatacgttgtcgacgcttgccaacccacttgtagaggcctgtcagaggctgacgtgacttgcagtgtgtcattcgtccctgtagatgggtgtacctgtcccgcaggcacattcttaaacgacgccggagcatgcgtccccgcacaagagtgtccgtgctacgctcatgggacagtgttagctcccggtgaagtggtgcacgatgagggggcagtctgcagctgcacgggcggaaagctgtcgtgcttgggcgcatccctccagaagtctacgggatgtgccgcaccgatggtgtatttagactgttcaaattcaagtgctggaacccccggagcagagtgtctccgctcatgccacacccttgatgtgggctgcttttccacacattgcgtgagcggctgtgtgtgccccccagggctcgtttccgatggaagcggcggatgcatcgctgaggaagactgcccctgtgtgcataatgaggccacatacaagcccggagaaaccatcagagtagattgcaacacttgtacctgtaggaaccgcaggtgggagtgttctcacagactgtgcctcgggacgtgcgttgcctacggggacggacacttcataacctttgacggcgaccgatactccttcgaggggtcctgcgagtatatattagcacaagattattgcggcgataatacaacccatgggaccttccggatcgtcaccgagaacattccctgcggaaccacaggcaccacatgtagcaaggcaatcaaactgtttgtcgagagttacgagttgatcctccaggaaggaactttcaaggcagtggccagaggtccgggtggagaccctccttataagatccgctatatgggcatatttctggttatcgaaacgcacggcatggctgtgagctgggatcgaaagacctcagtgtttattagactacatcaggactataaaggaagagtctgtgggctctgcgggaatttcgatgataatgcaattaatgacttcgccactagatcccggagcgtagttggcgatgcattagaatttggaaattcatggaagctatccccttcgtgtcctgacgctctggccccaaaggacccgtgtaccgctaatcccttccgcaagtcatgggctcagaaacagtgctcgatacttcacggacctactttcgccgcatgtcggtcacaggtggatagtaccaaatattacgaagcctgcgtaaatgacgcctgcgcctgcgatagtggcggtgactgtgagtgtttctgcactgccgttgccgcttatgcacaggcctgtcatgacgccggactgtgcgtgagctggagaacccccgatacttgtcccctgttttgtgatttctacaacccccatggtgggtgtgagtggcattatcagccttgcggcgcaccctgccttaagacctgtaggaacccatccggacactgtctcgttgacctgcctggtctggaaggatgctatccgaaatgccccccaagccagcccttctttaacgaagaccagatgaagtgtgtagctcagtgtgggtgttacgacaaggatggaaattattatgacgtgggtgcgcgagtcccgacagctgagaattgtcagtcctgcaattgtacaccctcaggcatccaatgcgctcactctttagaagcctgcacatgtacttacgaggaccgcacatattcctatcaggacgtcatttacaatacgaccgatggacttggtgcctgcctgattgccatatgcggaagcaacggcaccattattagaaaggcggttgcctgtccaggtactcctgccaccacaccctttacctttaccacggcatgggtcccacattcaaccacgagtcccgctttgccagtgtccactgtgtgtgtgagggaagtctgtagatggagctcttggtacaatggtcatcggccagaacccggtctcgggggtggtgattttgaaaccttcgaaaacctgcggcagcgaggatatcaggtttgcccagtgttagcggacatcgagtgtagagcggctcagctgccagacatgcctttagaggagctgggccagcaggtggactgcgatcggatgcgcggactgatgtgcgcaaattcacagcaaagcccccctctttgtcatgactatgaattgagggtgctctgctgcgagtacgtcccttgtggcccaagccctgccccaggaactagcccacaaccctcactctccgcatccacagagccagcagtccccactcctacccagactaccgcaaccgaaaagaccaccctctgggtgacacccagtatcaggtctaccgctgccctgaccagtcaaacaggttccagcagtggtcctgtgacagtgacgccctccgcacccggtacaaccacatgtcaacctagatgccaatggacagagtggttcgacgaggactaccctaagagcgagcagctgggcggagacgttgagagttatgacaagatccgggctgctggagggcacctgtgtcagcagcctaaagacatcgagtgccaagctgaatcctttcccaactggactctggcacaggtcgggcagaaggtgcactgcgatgtgcatttcggactggtctgcaggaactgggaacaggagggggtgttcaagatgtgttataactatcggattcgggtgctgtgttgctccgatgaccattgcaggggaagagcgacaacaccaccacccactactgaacttgagactgctacgactaccaccactcaggcgttgttcagcacgccccagccaaccagcagccccggtctgacccgtgcaccgcctgcctctacaaccgcggtgcctacgctttctgagggactgacctcacctaggtacacgtccacccttgggacagcaactacagggggacccaccactcctgccggaagcacagagcccacagtcccaggcgtggcaacgtctactttacctacccgtagcgcattgcccggaaccactggctccttgggaacatggcggccaagccagccccctacgctggctccgacgactatggcaacaagtcgtgccaggcctacaggaaccgccagcacagccagtaaagagcctctcaccacaagtctcgcccctaccctaacaagcgagctgagcacttctcaggccgagactagtacccctcgtaccgaaaccactatgtctcccctcacgaacactaccacttcccaaggcaccacccgctgtcagcctaagtgcgaatggacggaatggttcgacgtggacttccctacctctggagtggcagggggagacatggagactttcgaaaacattcgggctgccggaggaaagatgtgctgggctcccaaatctatcgaatgtcgggctgaaaattatccagaagttagtatcgaccaggtgggacaggtgctgacctgtagcctggagaccggtttgacctgtaaaaacgaagatcagacaggacggtttaacatgtgtttcaactacaacgtgcgggtgctttgttgtgatgattacagccattgcccttctactcctgcaactagcagcactgcaacacccagctcaacccccggaacaacctggatcttgacaaaacccaccaccactgccactacaactgctagcactgggagtactgccaccccaaccagtacactgcggaccgctccaccaccaaaggtactgacaaccaccgctaccacaccaactgtaacaagctcaaaggctactccaagtagttcccccggaacagcaacagctttgccagccctgcggagcacagctacaacgcccaccgccacgagcgttactcccatcccatcttcatctctgggcaccacttggactagattatctcagaccaccactccaaccgctacgatgagcactgctacaccttctagcaccccagaaacagcccacacgtccacagtcctaaccgcgactgcgacaaccaccggggctactgggtctgtagcaactccttccagcacacccggaactgcacataccacaaaggtgccgaccaccactacaaccggattcacggccaccccatcaagcagccctggaactgcactgacaccccctgtgtggatctcaaccacaactactccaactacccggggaagcacagtcactccctccagcattcccggtacaactcacaccgccaccgtgctgactaccacaacaacgacagtggccaccggctctatggctacacccagttctagcactcagactagcggcacgcctccttctttgacaaccaccgcgactaccattacagccacagggagtaccacaaacccctctagtactccaggcacaaccccaatcccgcctgttctcaccactaccgccactacaccggcagctacctcaaatacagtcaccccaagttccgcgttaggcactactcacactccgcctgtaccaaacacaatggcaaccacgcacgggcgatctctcccaccctcctctccccataccgtcagaactgcctggacgagcgcaacttcaggaattctggggacgacacacatcacagaaccatccaccgttacctcgcatacactagctgccacgacgggaactactcagcactcgactcctgccctgagttctcctcatccctcatcaagaacgaccgagtcgccgccatcacccggaactacaaccccagggcacaccactgccaccagccgaactaccgcaacagctactcctagcaagacccgcactagcaccctcctgccgtcgtcaccaacctcagcgcctattacaaccgtagtcacaatgggatgtgaaccccagtgtgcatggagtgagtggctggattacagctaccccatgcctggaccctctggaggcgacttcgacacttactcaaatatcagggccgcagggggtgctgtgtgtgagcagcctctgggccttgaatgccgggctcaggcacagcctggagtacctctgcgcgaactgggtcaagtagtcgagtgctctctcgattttgggctcgtttgccgcaatcgggaacaggtgggtaagtttaagatgtgctttaattacgagatacgcgttttttgttgcaattatggtcattgcccctctacgcctgccacaagcagtactgcaatgccctcatcaacccctggtacaacttggatccttaccgagttgactacaacagcaacaaccactgaatctaccggttcgaccgccactccctcctctactccagccacagccggaactcctcacgtctcaacaactgctactacgcctacagtgacttcctccaaggccacgcccttctccagtcccggaaccgccaccgcactgccagccctccgttccacagctacaacgcccaccgctacctcatttactgctatcccctccagctccctggggacaacctggacgcgactcagccaaacaaccacacctaccgctaccatgtctacagccacaccctcctcaacccccgagacagtccatacttcaaccgtactaacaaccaccgccacaaccacaggcgcaacagggtccgttgcgaccccatcatctactccaggaactgcacacaccacaaaggtgctgaccacaaccaccacagggttcaccgccacaccatccagcagcccaggcactgctcgcaccctgccagtgtggattagcacaaccacaactcctaccacaaggggctctaccgtgaccccttcttctattccaggaaccacccacacccccacggtcctgaccacaaccacgacaactgttgcaacaggttctatggctaccccttcttcctccactcagaccagtggcactccaccgtccttgaccactaccgccactactataaccgctactgggtccaccaccaatccctccagcacccccggtaccaccccaatcccccctgtacttactacaacagccaccacgcccgcagccacaagctcaaccgtgacacccagttctgctcttggaacgacgcatacccctcccgtgcctaatacgaccgctactactcatggcagaagtttgtctccctcttccccacacacagtgcggacggcatggactagcgctacttctggcactttgggtacaacccatatcactgaaccctctaccggcacgtcacatacccccgctgctaccactggtaccacacagcactccaccccggcactcagctccccacacccttccagcaggactacagaaagccccccttcacccggtaccaccacaccgggtcacacaagggctacttctcgtaccacagctactgcgacgccctcaaagacgcgcacctctactcttctcccaagcagccccacgtccgcccctattactaccgtggtgacaatgggctgcgagcctcaatgcgcctggtccgagtggctggattactcttatcccatgcctggtccttcaggcggagattttgatacgtactctaacatcagggccgctgggggtgctgtgtgtgaacagcccctgggactcgagtgtcgggctcaagcccagcccggagtgcccctgcgggagttggggcaagtggtggaatgctccctcgacttcgggttagtgtgtaggaacagagagcaagtcggcaagttcaaaatgtgcttcaattatgagatccgggttttttgctgcaactatggccattgtccatcaaccccagccacgtcctcgactgctactccatcttctacgcccggtactacctggatcctgactgagcagacaactgccgcaactacaaccgcgaccaccggcagcaccgccatcccctccagtactcccggtacagccccaccacctaaagtactaaccagcacagccacaacaccaaccgcaacgtcatctaaggccacttctagttcctccccacgcaccgcaacgactctacccgtcctgacctccaccgccactaaaagcactgctactagcttcactcctatcccatcctttacgctgggtacaacgggaaccctgcccgagcagacaacaacgccaatggctaccatgtcaactatccacccatcttcaactccagagactacacatacatctaccgtgcttacaacaaaagcaacgaccactcgggctacaagctcaatgtctacaccttcatccaccccgggaaccacgtggatcctcaccgagctcaccaccgcggcaacaactacagccgcaactggcccaaccgccaccccatctagcacccctggtaccacctggatcctcaccgagcccagcacgaccgccaccgtgacagtgcctacggggtctacggccactgcctcatcgaccagagctaccgccggtacattaaaggtcctcactagtactgctaccactcccactgtgatctcgagtagagccaccccaagctccagcccagggaccgccactgccctgcctgccctaagatctaccgccactaccccaacagcaacaagtgtgaccgctatcccttcatcttccctcggtactgcgtggacccggctgtctcagactactactcccacagccacaatgtccaccgctacaccctcctcaactccagagaccgtacatacatctacggttctgactaccacaaccacaacgactcgggcaacaggctccgtggctactcctagtagcacacccggaactgcccacacaactaaggtgcccacaacgaccacaaccgggtttaccgccacaccgagttccagccccggtactgcgctcacgccccctgtttggatctctactaccaccacacccactacaaggggcagtaccgtcaccccaagctcaatccccggaaccactcacacagccacagtgttgactaccacgacaaccacggtcgcaacaggctcgatggctactccatccagcagtacccagaccagcgggactcctccttccctcacaaccacagccacaacaatcacagctaccggctcgacaacaaatccatcctctacacctggtacaactccaatacctcctgtgcttaccacgactgccactacgcctgcagcaacaagtagtactgtgacacctagctcagctctgggtaccacccataccccacccgtgccaaacactactgccactacccatgggaggagtctccctccatcatccccacacactgtgaggacagcctggacatcagcgacttctggcattttggggaccacacacatcaccgagcccagcacagtgaccagccatacacccgcagctaccacgtcaacgacccagcactcaaccccagcactcagtagccctcacccatcgagtagaaccactgagtcccctccatccccgggaactacaacccctggtcacaccaggggaacctcacgcactacagctaccgccacgcccagtaaaacacgcacctccaccctgctgcccagtagccctacttctgcacccataacaaccgtcgttacaacgggatgcgagcctcagtgcgcctggtctgagtggcttgattactcatatcccatgcccggacccagtgggggagacttcgacacctactccaatatcagggctgccggaggagccgtatgcgagcagccattgggtctcgaatgcagagcccaggcacaacccggtgtcccactgcgtgagctggggcaggtggtagaatgtagtttagactttgggttggtctgtcggaacagagagcaggtgggaaagttcaaaatgtgctttaattatgagattcgagtattttgttgtaactatggacattgccccagcaccccagccacatcttccactgcgactccaagcagtaccccagggaccacatggatcttgaccaaacttactacaacagcaactaccacagaatccacaggttcaacagccacaccatcgagcacccccggagcaacagcaggtacaccacacgttagtacaactgcaacaactccaactgtcacgtctagcaaggccacacctttttcctccccagggaccgccacggcgctgccggcattgaggtcaactgctacgactcccaccgctactagcttcacagccatcccatcttcctcactgggtacaacgtggacccgtctcagtcaaactacaaccccaacagcaactatgtccaccgccacaccttcgtccacacccgaaaccgctcacacgtccacggtccttacaactaccgcaacaactaccagggctacggggtccgtcgcgaccccaagctcaactcccggaacagctcatacgaccaaggtgcctactacaaccaccaccggatttaccgttacgccttcctcctctccaggcaccgccagaactcccccagtctggatttctacgactaccacccccaccacaagtggcagtacagtgacccccagctcagtgcccggaactactcatacccctactgtgctgactaccacaacgactaccgttgctaccgggtcaatggcgaccccatcttccagcacccaaacctcgggaacgcctccctctttgataaccacagcaactactatcacagccacgggctcaactaccaacccatcttccaccccaggaacaactcctatacctccagtgctcactaccaccgctactacgccagccgcaacgagctcgactgtgacccccagcagcgcactgggaactactcatacgcccccagtccctaatactacagccactactcacggtcgctctctgtccccgagttctccccacaccgtgaggaccgcatggaccagcgctacgtcaggtacattggggaccacacacatcacagagccgagcacaggtacatctcacacccccgcagcaactaccggaacgactcagcatagtacaccagctctctccagcccccacccttcatcaagaactacggagtccccaccctcgccaggcacgacaactccaggacacacaaccgccacgtcacgcacaactgccaccgcgaccccaagtaagacgcgtacatccactctgctgccttctagccccacctctgcccctatcaccacagtggtgaccactggatgcgaaccccagtgcgcatggagcgagtggcttgactatagctaccccatgcccggtccttctggaggtgacttcgatacttatagtaatatcagagcagccggaggagccgtttgtgaacagccgctcggactggagtgtagggcacaggctcagcctggcgttcccctgggagagctgggtcaggtggtggagtgctccctggacttcgggttggtttgcaggaatagagaacaggtgggaaaattcaaaatgtgctttaattatgaaattagggtcttctgctgcaactacggacactgtccttccacgcccgctaccagtagcactgcaatgcctagctctacaccaggaacaacctggatcctgacggaattgactacaacagctactaccacagcttctaccggtagcacggctactccttctagcacccccggtactgcgcctcctcctaaggtgcttacgtccccggctactactcccactgcgactagtagcaaggcgacttcctcctcaagcccgcgaacggccacaacgctacccgtcttaacctcaacggccaccaaaagtactgccacgtccgtgactccaatcccctcttctactttgggcacgactggaaccctacctgaacagactacaacccctgtcgcaaccatgtctacaattcacccttctagtactcccgaaactacccacacctctaccgtgctgaccacaaaagctaccaccaccagagccacctcgtctacctcaacccctagctcaacaccagggacaacatggattctgacagaactaactaccgctgctacaactacagccgcaacgggacctactgccacacctagtagtactcccggaaccacatggatattgaccgaattaacgacaacagctaccaccaccgcttccactgggtctactgcaaccccgtcgagcacccccggaactacatggatcttgactgaaccctctaccacggcaaccgtgaccgtgccaacaggttccacagctaccgccagtagtacccaggctacagcaggaacaccacacgtaagcactacagctacgacccccaccgtcaccagctccaaagctaccccctcaagttctccaggaaccgccactgccctgcccgctctccgaagtacagcaaccacacctaccgcaacctcatttactgccatcccatctagtagcttgggaacgacatggactagactgtctcagacaacaacaccaaccgccaccatgtcaactgccacgccatcatcaaccccagaaacagtccatacatctaccgtactgactgctaccgcgaccacaactggcgcaactggatctgtggccactccgagttccacccccggtacagctcacactaccaaagtacctacaactaccacaacaggctttacagctactcctagcagtagtcctgggaccgccttgacaccacccgtttggatttccacaaccactactccaacgactacaaccccaacaaccagtggctcaactgtgacccccagttccatcccgggtaccactcacacagcacgggtcctgaccacaactacgacaaccgtggcgaccggatccatggcaacaccctcctctagcacccagacctccggcacccctccatcactgacaacaaccgctaccactattaccgcaactgggagcacaactaacccttcctctacacctggaactacacccatcactccggtcctgacctctaccgccaccacaccagcggcaaccagctccaaggccacctcttcatctagccctcggaccgccaccacgttgccagtcctgacctctacggctaccaaaagcaccgccacttccttcaccccaattccctccagtacactgtggactacgtggacagtccctgcacagacaacaacacctatgtctactatgtcaactatccacaccagctctacacctgagactacccatacttccaccgttctgaccacaaccgccaccatgactagagctaccaattctaccgcgacaccctctagcacactgggcacaactcgaatcctgactgaactcaccactacagcaaccactaccgctgccaccggatcaacagccactcttagctccactccaggcacaacctggattctgactgaacctagtaccattgcaacagtcatggtgcccacaggtagtactgccactgccagcagcaccctgggaaccgcgcatactccaaaagtggtgacgacaatggcaacaatgccgacagccaccgcctcaacagtcccctcctcttccaccgttggaacgacacggactcctgccgtccttccctcatctctgccaacattcagcgtcagtaccgtttcaagctctgtcctgaccacattgcgtcccacgggctttccttcaagtcatttctctaccccgtgtttttgccgagcctttgggcagttttttagtccaggggaggtaatttataataagacagatcgcgcagggtgtcacttctatgccgtttgcaaccagcactgtgacatcgatcgattccagggtgcatgcccaacttccccaccacctgtgtctagcgcccctctttcctccccgtcccccgctccgggttgtgacaatgctatccccctccggcaggtaaacgagacgtggaccttggagaactgtactgtggccagatgtgtcggagacaacagagtggtgctcctggatcctaaaccagtggccaacgtgacgtgtgtaaacaagcaccttcctattaaagtgtcagacccttctcagccctgtgatttccactatgagtgtgagtgcatttgcagtatgtggggcggttcacactattctactttcgacggaaccagctacacgttccgcggtaattgtacatacgtattgatgcgagaaatacacgcacggtttggcaacctctccctgtaccttgataaccactactgtaccgcttctgccaccgccgctgccgctcgatgccccagggcactctctatccattacaagagtatggatattgttctaacagtgacgatggtgcacggcaaagaagaaggcctgattctgtttgaccaaataccggtgtccagcgggttctcgaaaaatggcgtcctcgtctctgtgctgggaaccactactatgcgggtggacatccccgcactcggcgtgtctgtgaccttcaacgggcaggttttccaggccaggctcccctatagtttgttccacaataatacagagggccagtgtggaacctgtacgaacaatcaaagggacgattgcctgcaacgggacggcactaccgccgcaagctgcaaggacatggccaagacttggttagtgccagacagtcggaaggacgggtgttgggcaccgactggtaccccgcctactgcaagtcctgcggctcccgtttcatctacacctactccaacgccctgtcctccgcagcccctgtgcgacttgatgttgagccaggtctttgccgaatgtcacaatctagtgccacccggtccattttttaacgcctgcatcagcgaccattgcagaggtcggcttgaagtcccttgccagtctctggaagcttatgccgagctctgtcgagcacgcggagtgtgctcagattggaggggagccacaggcggactgtgtgatttgacttgtcccccaacaaaagtgtacaagccgtgtggacctatccagcccgctacttgcaactctcgtaaccaatccccacagctggaaggcatggcggagggatgtttctgtcccgaagatcagattttatttaatgcccatatgggcatttgtgtccaggcgtgcccctgcgtaggcccagatggcttccctaaatttcccggtgagagatgggtgagcaattgccagagctgtgtgtgcgacgaggggagcgttagcgtccagtgcaagcctttgccctgtgacgcacaggggcagccccctccttgcaatcgacctgggttcgttactgtgacccggccacgggcagaaaacccttgttgccccgaaaccgtctgcgtgtgtaacaccactacttgtccccagagcctcccagtgtgtccgcctggccaagagtctatttgcacccaggaggaaggcgattgttgcccaactttccgttgccgcccacaactgtgctcctacaacggcaccttttatggcgtcggagcaaccttccccggagccttgccatgccacatgtgcacgtgcctcagtggagatacacaagacccaacggtgcaatgtcaggaagacgcatgcaacaacaccacctgtcctcaggggttcgagtataagcgcgtggccggacagtgctgtggggagtgcgtgcagacagcctgcctcacacctgacggacagccagttcagctgaacgagacatgggttaattcccatgtcgataactgcacggtttatctctgtgaagcagagggaggagtgcacttgttaaccccgcagcccgcaagctgcccagacgtctctagctgtcgtggctccctgcgcaagactggatgctgctacagctgtgaggaagacagttgccaggtcagaattaataccacaatcctttggcatcaggggtgcgagacagaagttaatatcaccttctgcgaagggagctgtccaggggcttcaaaatatagcgctgaagctcaagctatgcagcaccagtgcacatgttgccaagagcgcagagtgcatgaagagacagttccgcttcactgtcccaatggatccgctatcctccacacatatacccacgtggacgaatgcggttgtaccccattttgcgtacccgctcccatggcaccaccacatacacggggattccccgctcaggaggcaacagctgttta

SEQ ID NO: 231131 - DNA, 16586 bp, synthetic construct
  misc_feature 1..16586: note = Description of Artificial Sequence: Synthetic coding sequence
  source 1..16586: mol_type = other DNA
gcgccacgtatgggggcacctagtgcctgtaggaccttggtccttgcactcgcagccatgctggtggtaccacaggccggtaaatcacccccattgcgacccctgagtcgcaattccggggctgggctggacgggggtgcgcctaccagctcacctactcgaagggtgtcctttgtcccccctgtcaccgtgttcccatccctgtcaagaaagcagatgctcccgctgccagccggtaaaggagttttcgctagtcctaaagggggaggcccagatttaggcgttcagctgccacctgctctgaatccagctcacaatggcagggtgtgctcgacttggggggacttccactataagacatttgatggagatgtgttcaggtttccaggcctttgcaactatgttttctcggaacactgtagagccgcttatgaggactttaacgtccagctcaggagggggctagtggggtccaggcccgtggtcacacgtgtcgtgattaaggcccagggcttggtgttggaggccagtaatgggtctgtccttatcaacgggcaaagagaggagctaccttattcgcgcacaggcttattggttgaacagtccggagattatatcaaggtgtccattagactcgtgctgactttcttgtggaatggggaggacagcgccctcttagagttggatcctaaatatgcaaatcagacctgcggcctctgtggtgattttaatggcctgcctgcctttaacgagttctatgcccacaacgcgcgtttaacacccctgcagttcggaaatcttcaaaagcttgacgggcctaccgaacagtgtccagaccctcttcctcttcccgcaggaaactgtactgatgaggaaggcatttgccatcgaaccttgctgggccctgcattcgccgagtgccacgccctggttgatagcaccgcatacctcgccgcttgtgcccaggatctttgcagatgtcccacctgtccatgtgcaactttcgtggaatatagccggcaatgcgcccacgctggcggtcagccaaggaattggcgatgtccagaactgtgtcccagaacgtgtcctctgaacatgcagcaccaagagtgtgggagtccttgcactgacacctgctctaacccccaaagagcacagctgtgcgaggaccattgcgttgacggttgtttctgcccgcctgggaggagctgtacagtgctcgatgatattacccattctggttgtctgcccttgggtcagtgcccatgcacgcacggaggtcgaacgtacagtcccggaacgagcttcaacacgacgtgcagtagctgtacgtgctctggaggtttgtggcaatgccaggacctaccctgccctggaacatgttcagtgcaaggcggagcccacatctcaacatatgacgagaaactatatgaccttcacggagactgtagttacgtccttagtaagaagtgcgctgatagttcctttacagtgttggccgaactgcggaaatgcggtctcaccgataacgagaattgcctgaaggcggtgacactatctctggacggcggagatacagccatccgcgtgcaggccgacggcggtgtgtttcttaactcaatttatacccagttgccacttagcgctgcgaacatcaccctgttcacaccttcatcattctttattgtcgtgcagactggtcttggcttgcagttgcttgttcagctcgtgcccctgatgcaggtgttcgttcggttggacccggctcaccagggccagatgtgtggcttgtgcggtaatttcaaccaaaatcaggccgacgattttacggctctgagcggcgttgttgaagccacaggcgcagctttcgctaatacctggaaagcacaggcagcctgcgccaacgcacgtaactccttcgaggacccctgcagcttgtctgtcgagaacgaaaactacgctcggcattggtgcagccggctaaccgaccctaactctgccttttcacgctgtcactctataattaacccaaaaccttttcactccaattgcatgttcgacacatgcaactgtgagcggtctgaggactgcctgtgcgcggcactctcctcatatgtgcacgcttgtgctgctaagggcgtgcagctgagtgattggagagatggcgtgtgcacaaaatacatgcaaaattgccccaaaagccaacgctatgcatatgtagttgacgcgtgtcaacccacttgcaggggcctgagtgaggcggacgtgacatgttcagtgtccttcgtgcccgtggatgggtgcacttgcccagcaggcacattccttaacgacgctggagcatgtgtcccggcacaggagtgcccctgttatgcccacggcactgtgttggcccctggcgaagtggtccatgacgagggagccgtctgtagttgtacaggcggaaaattgtcttgtctgggcgcaagccttcagaaaagcactgggtgtgcagcccctatggtgtacctcgattgctcaaactcatctgccggaacacctggtgcagaatgcctccgctcttgtcacacgcttgatgtgggttgtttttccactcactgtgtgtcagggtgtgtttgccctcccggactggtatcggacgggtccggcggatgtattgccgaggaggactgtccctgcgtccacaatgaggccacctacaagccaggggagaccatcagagttgattgtaacacatgcacttgcaggaacaggagatgggaatgttcccacaggctgtgtttgggtacctgtgtcgcatacggcgacggccacttcatcacttttgacggagatcgttactcgttcgaagggagctgcgagtatattttggctcaggattactgtggagacaacaccacccacggaaccttccgtatcgtgaccgagaatattccctgtggtacaaccggaacaacatgctcgaaagcaatcaaactgtttgtggaagtgcgcacagcccctgcagtctccacacccgatcccgctgcaaacgagcctgccccaagagaagcctcagtgggatttcgccagcgcctaccacccttgcaatcctatgagttaatcctccaagaggggaccttcaaggccgtcgctcgcggacccggtggggatccgccatacaagatacggtacatgggaatctttctggtgatcgagacgcacgggatggctgtgtcctgggacagaaagacaagcgtgttcattcggctgcaccaggattataaaggacgcgtgtgtgggttgtgcggtaatttcgatgataacgcgatcaatgattttgctactcgtagccggagcgtggtcggagatgctctcgagttcggcaactcatggaaactcagcccttcctgccccgacgccctggccccaaaggatccctgcactgccaatcctttccgaaagagctgggctcaaaagcagtgcagtattctgcatgggccaacattcgccgcatgtagatcccaggtcgattcaacaaaatactacgaggcatgtgttaatgatgcgtgtgcctgcgactccggaggagactgtgaatgcttctgtacagctgtagcagcttatgctcaggcttgtcatgatgctggcctttgcgtgagttggaggacccccgacacctgtcccctcttttgcgatttctacaacccgcatggcggatgtgagtggcactatcaaccctgtggtgcgccttgcctcaagacctgccgtaatccgtccggacactgcctggttgatctgcccggtcttgagggatgctatcccaagtgcccaccatcgcagcccttcttcaatgaggatcagatgaaatgtgtcgcccagtgtgggtgttacgataaggatggaaattattacgatgttggcgcacgggtgccaaccgccgaaaattgccagagttgcaactgtacccccagcggcatccagtgcgcccacagcctggaggcttgtacgtgcacctatgaggataggacttactcttatcaagacgtgatttacaacacaacggatggacttggggcatgtctgatagccatttgtggatctaacggtacaattataagaaaggctgttgcctgccccggaacgcctgccacaacaccctttaccttcacgacagcctgggtcccacattccaccacttcgccagctctgcccgtgtcaaccgtgtgcgtgcgggaagtctgccgatggtcttcctggtataacggccaccgcccagaaccagggctgggcggtggtgacttcgaaacttttgaaaatctacggcaaagggggtatcaggtttgccctgtcctggcagacatcgagtgcagagctgcacagcttccggacatgccactggaggagctgggccagcaagtcgattgcgacaggatgcggggactgatgtgtgcgaatagccagcaaagcccacccctgtgccatgactacgaactgagggtgctgtgttgcgagtatgtcccgtgcggaccatcccctgccccagggacgtctcctcagccctccctttccgcctcaaccgagccagccgtacctaccccgactcaaaccaccgcgactgaaaaaaccacgctgtgggtaacgccctctattcggtccaccgctgccctcaccagccagaccggtagctcatcgggccctgtaacagtaaccccatctgctcccggaaccaccacctgtcagcccaggtgccagtggaccgaatggtttgacgaagattatcctaagagcgagcagttaggaggggatgtggaatcttatgacaaaattagggctgccggtggccacctgtgtcagcagcctaaggacattgaatgccaggcagagtctttccccaactggacactggcacaggtgggccaaaaggtccattgcgacgtgcactttgggctggtgtgcaggaactgggaacaggaaggggtgtttaaaatgtgttacaactatagaatacgtgtgctctgttgctctgatgatcattgcaggggacgagcaaccacccctcctccaactactgaactcgaaactgccacgaccaccaccacacaagccctgttcagtaccccacaaccaacaagttcgcctggactcaccagagcgcctcccgcatccactacagccgtccctactctgagtgaaggcctgacctctccccgatatacaagcacactggggaccgccactacgggcggacctactacgccagccggatctacggaaccaactgttccaggcgtggccacttccaccctgcccacaaggtccgccctgcctgggacaaccggctccctgggtacttggcggccaagccagccccctacactggccccaaccacaatggctaccagtcgggcacgccctactggcaccgcatcaactgcgtcaaaagagccactgactacttctctggccccaacgcttacctcagaactttctacgtcccaggccgaaacgtccactccccgtactgaaacaaccatgtctccactgaccaacaccacgacttcacagggaactacgaggtgtcagccgaaatgtgagtggacagagtggttcgacgtagactttcccacctcaggcgtggcaggcggtgacatggaaacttttgaaaatatcagggcagctgggggtaaaatgtgttgggcacccaagagcattgagtgtcgggctgagaactaccccgaagtctctattgaccaagtggggcaggtgttgacctgcagcctggagacagggctaacctgtaaaaacgaggatcagaccggtcggtttaatatgtgtttcaactacaatgtcagggttctgtgctgtgatgattactctcattgtccgagcacacctgcaacttcttcgacagccacacccagctccacgcctggaaccacttggatccttacgaagcctacaacaaccgcaaccactacagcctctaccggatccacagcaacccctacctcaaccctgcggacagcccctccacccaaagtacttaccacaacagccaccacacccaccgtcaccagctctaaagccacgccttcctctagcccaggcacagccacggcgctgcctgcacttcggagcactgccacgacacccaccgctacctctgtgacccccattccttcctccagcctgggcaccacttggactcgtctcagtcagacaaccactccaaccgctacaatgtccacagccaccccaagcagtacacctgagaccgcgcacacaagtaccgtcctaacagctacagcaactaccacaggcgcaaccggctccgttgctacaccctcctccacacctgggaccgctcatacgaccaaggtgccaactacaactaccaccggatttactgccaccccaagtagctccccgggtaccgcattaactccccctgtgtggatctcgacaactactactcctaccacccggggatctactgtgacgccatctagtatccccggtactacacacaccgcgaccgttttgactactactaccactaccgttgccactggcagcatggctacgccctccagcagcacccagacctctggcacgacacacacccctcctgtgcccaatactatggccaccacccacggccgatccctgcccccatcatccccccacacagttaggacagcctggacgagtgcaacaagtggaattctgggtaccactcacattaccgagccaagcacagtgacaagtcacacactggcagcaacaacgggtaccacacagcactctactccagcactctcatcccctcatccatcctccagaactacagagagtcctccaagtcctggtactactacaccaggtcatactacagcgacatctaggaccaccgccacggcaaccccttccaaaacgaggactagcactctgcttcccagttccccgacatcggcacctataactactgtggtgacaatggggtgtgagcctcagtgcgcctggtcggagtggctagactactcctacccaatgccaggtccatctggcggtgattttgacacatattcgaacattagagccgcaggcggagcggtctgcgaacagcctctcggcctggagtgccgcgctcaagctcagcccggtgttcccctcagagaactgggacaggtagtggaatgcagtttggacttcgggctggtgtgtcgtaatcgcgaacaggtgggtaaattcaaaatgtgcttcaactatgagattcgtgtgttctgttgtaattatgggcattgcccatccacccctgcgacctcttccacagccatgccatcctccacacccggaactacctggatactcacagaattaaccacaactgctaccacgaccgagagcaccggctcaacagctacaccatcttcaactccaggaacgacttggattcttaccgagccgtcaaccacagctacagttacagtgccaactggatcaacagctactgccagcagtacgcaggcgaccgccggtaccccccatgtttctactaccgctacaacaccgactgtgacgtcctcaaaggcaactccttttagttcgcccggaaccgcaactgccctgccagccttacgctctaccgccacaactcctacggccacctcctttactgccattccctccagtagtctcggcaccacgtggaccaggctgagtcaaaccaccacgcccaccgccaccatgagcacagctaccccttcctccacacccgagactgttcacactagcaccgtactgactacaactgccacaaccacaggcgctaccggatccgttgctacaccttcaagtacgccagggacagcacacaccactaaagtgttaacaaccacaacaaccggattcaccgccacccctagctcttcgcctggaaccgctagaactttacccgtctggatatccacaactactacaccaactaccaggggatccaccgtcacgccaagctcaatcccgggtaccactcatacccctaccgtactcactactactaccactaccgtggcaacaggcagcatggctaccccgtcatcctcgacccagaccagtgggacgactcacacacctccagtgcctaacacgacagcaacaacacatgggagatctctcagcccctccagcccccacacagtgcgtactgcatggacctctgcgacatccggaactctgggaaccacacacatcactgaaccatccacaggcacaagccacacacctgcagctaccaccgggacgacgcagcattctacgcccgctctctcctctccacacccctcttctaggaccacggaatccccaccgagccctggtaccacaaccccagggcatacccgtgcgacttcgcgcacaaccgccacagccaccccgtcaaagactcggacaagtactctgctcccatcatcccccaccagcgctcctatcacgaccgtcgtcactatggggtgcgaaccacaatgtgcatggtccgagtggctggattactcctaccccatgcctggacccagcgggggtgacttcgacacctattctaacatcagagccgcaggcggtgccgtttgcgaacaacctttggggttggagtgtcgagcacaagcccagcccggtgttcccctgcgcgagctgggccaggtggtcgagtgctccttggacttcgggctggtatgtagaaaccgcgagcaggtgggaaaattcaagatgtgttttaattatgagatccgtgttttctgctgtaactatgggcactgccccagcactccggctaccagcagcaccgccacacctagcagcactccaggcacaacctggatactgaccgagcagactaccgccgctaccactactgcaaccaccggatctaccgctatccctagctctaccccaggtaccgctccgccacccaaggtgcttactagtaccgccaccactccgacagccacatctagcaaggctacaagtagctccagccctagaactgctaccaccttgccagtcttgaccagtactgccaccaagagcacggctaccagcttcaccccgatccccagcttcaccctcgggacgaccggcaccttacctgaacagacaacaaccccaatggcaaccatgtctactattcatccttcaagcacacctgagactacacatacgagtactgtgcttacaacaaaggcaacaacaaccagggcaacatcgtctatgagcactccatcttcaacccccggtactacatggattttaacagaactgactactgctgccactacaaccgcagcaaccggacccaccgctacgcctagtagtactcctgggacgacctggattctgacagagccttcaacaaccgccactgtgacagtacccaccggaagcacagccaccgcatccagcaccagagctactgccggaactctcaaggtcctgacatctaccgcaacaacccccacagtcatctcttcacgggctacgccttccagcagtcctggaaccgcgaccgcactgccagccctgcgtagcaccgcaacaacaccaacagccacctcggtgactgcaattccctccagcagcctggggaccgcatggacccggctcagccagaccactaccccgactgccacgatgtctaccgccacaccctcctctacacctgagacagtccatacatccacagtgctaacgacaactactaccactacccgggcaacagggagcgtcgccacaccctcctctacccccggaacagcacatacaactaaggtccccactaccacaacaacagggtttactgctacgcctagctcatcaccaggaaccgccctgactccaccagtgtggatttcgacaactacaacacccactacacggggatcgaccgttacaccatcatccattcccggtacgactcacaccgcaacagtactcacaaccacaaccacgaccgtggccacaggatctatggctaccccatcatcaagcacacagacctctggaacaactcatacaccccctgtacccaatactacagctacgacccatggccgaagtttacctccttcttccccccacacggttcgaacagcctggacctcggccacatcaggaatcctcggtacaacacacattacagagcccagtacagttaccagtcacacccccgcagcaaccacatccaccacccagcacagcaccccagcattgagctcccctcatcccagttcccgcacaacagaatcgcccccatccccagggaccactacacccggacacaccaggggcacgagtcggactacggcaacagctacacccagtaagactaggacttcgacgctgcttcccagtagcccaacctccgcccctattactaccgtggtgaccaccggctgtgagccccagtgtgcctggtcagaatggcttgattattcctatccaatgcccggtccgtccggaggagattttgatacttattcaaatattagagccgcaggcggagccgtgtgtgagcaaccccttggcttggagtgccgcgcacaagcccagcccggagtgcccctccgcgaattaggccaggtggtagagtgtagcctggatttcggactggtgtgccgaaatagggaacaagtcgggaagtttaagatgtgcttcaactacgaaattagagtcttctgctgtaattatggccactgtccgagcacacccgctaccagctcaaccgctaccccttcttcaaccccaggtacaacctggatcctcactaaactcaccaccaccgcgaccaccacagagagtactgggagtactgccacaccctcctccactccagggacaacctggattctcactgaaccaagtacaacggcgacggtgacagtgcctaccggttctacagccaccgcatcgtcaacacaagccaccgccggtacgccacacgtaagcaccacagccacaactcccactgtgacttccagcaaagctacacctttttctagccccggaacagcgactgctctgcctgccctgcgatcgacagctactacacccacagctacctcatttactgccataccatcctctagcctcggtacgacctggaccaggctatctcagactaccaccccaacagccacaatgtcaactgccacaccctcatccacacctgaaactgcccatacaagtaccgtattgaccactaccgcaaccactacgagagcaaccggctcagtggccactccgtcctctacacctggcaccgcacataccaccaaagtcccaaccactacgacaactgggttcaccgttacgcccagctcctccccagggacagccaggacgcccccagtctggatttcaacgacaaccacccccaccaccagcgggtcgacagtcactcctagctctgttcccggaaccacacacacccccacagtcctgactaccaccaccactacagtggccacgggctccatggccacaccgagttcttccacccagacgagcgggacaacacatactccaccagttccaaataccacggctactactcacggcaggagtctttcaccctccagtccgcacactgtgcgcacagcttggacttccgccacgagcggaacactggggacgacacatattacggagccatccaccggaacttcacacacacccgctgctacgactgggactacccagcactccaccccagccctgtcttctcctcaccctagcagccgcaccaccgagtctccaccctcccccggaaccactactcctggccatacaacagcaactagtcgtacgactgcaaccgccacaccctctaagactcggacttctacactgctcccctcctcaccgacaagcgcgcctattaccaccgtagttactactggatgcgagcctcagtgcgcctggtctgagtggctagactacagctatcccatgcccggaccgagcggcggagattttgatacctatagcaacatccgggcagcaggaggagccgtgtgtgaacagccactgggcctggagtgcagagcgcaggctcagccgggtgtccctctgggagagttaggtcaggtggtggagtgctctctcgactttggactagtatgtcgcaatcgcgagcaggtgggcaagtttaagatgtgctttaactatgagataagagtgttctgctgtaactacggccactgtcccagtacccccgctactagtagcacagccatgccctccagcaccccaggcactacatggattctgactgaactcaccacgaccgcaacaactacggcttcaacaggatctaccgccaccccaagctcaaccccgggaacggccccaccccctaaggtactaacttctccagctactacccccaccgctacatcgagtaaggcgacgtcttcatcaagtcctcgtactgccacaacccttcccgtcctgacatccaccgctacaaagtccaccgctacgtccgtgacacccatacctagttcaacattgggaactacgggcaccttaccggagcagaccactacccctgttgctaccatgagcactatacacccctcgtcaaccccagagaccacgcatactagtactgttctcacaacaaaagctactaccactagggcaacttccagcactagcactccttcctccacacctggcacaacatggatactaaccgagcttactacagccgcaaccactaccgccgcaaccgggccaacggccacaccatctagcacacccggtactacttggatattgacagagctgacgacaaccgccacgactactgccagcacaggttccactgcaacacccagtagcacgcctggaaccacctggatcctaacagaacctagcactacagccacagttactgtgccaacaggctccactgccacggccagttcaacccaggcaacggctggcaccccgcatgtcagtaccacggctaccactccaaccgtaacatcttcaaaagctactccttcaagttcacctgggaccgctacggccctacctgctctgcgctcgaccgctacaacaccgacagccacctcatttactgcaattccgtcttcttcactgggcacgacgtggactcgcttgagtcagacaacaactcctactgccacaatgtctacagcgaccccgtcttcaacacctgaaactgtccacaccagtacagtgctaaccgccactgccacaaccactggagccaccggatcagtggcaacaccgtcctcgactcctgggacagcccatacaaccaaggtgcccacaacaaccactacaggctttactgcgacaccctcaagttcccccggtactgccctgacacctcctacgacaacacccatgtccacaatgtctaccattcatacttcatctaccccagaaacaacacatacttctaccgttctgacaacgaccgcaaccatgactagagctactaattcaacagccactcccagcagcactctcggcacaacccggatcctgactgaactgacaacaaccgctaccaccacagccgctacggggtccactgccacacttagcagcacacccggaaccacttggatcttgactgaaccttccacgatcgcaacagtgatggtgcccactggctcgacagccactgcttcctcaaccctgggaactgcgcacacccccaaagtggtgaccactatggccacaatgcccactgctacagcctcaacagtgccttcttcctcgactgtcggtacaacacggaccccagctgtgctcccatcatccctgccaacgtttagtgtttccacagtcagtagcagtgtactaacgacccttcggcctaccggattccccagctcccacttcagtacgccctgtttctgccgagccttcggccagtttttttctcccggtgaagtcatctacaataagactgacagggccggttgccatttctacgccgtctgtaatcagcattgcgatatcgaccggtttcagggcgcatgtcccacctcaccccctcccgtgtctagcgctcctctgtcttccccttcacccgctccaggctgtgacaacgccatcccattgcgtcaggtaaacgaaacatggaccttggaaaactgcaccgttgcgcgttgtgtgggagataaccgggtcgtcctgctcgatcccaagccagtagcaaacgtcacttgcgttaataaacaccttcccattaaggtatctgatccctcccaaccctgtgatttccactatgagtgcgagtgcgaatgcgtgggtggccgagggataacccctggggctggcatatgcagcatgtggggaggatcccattactccaccttcgatgggacatcctacaccttccgcggtaactgcacttacgtgctgatgagagagattcacgctcgcttcggtaacttgtccctatacctcgacaatcactattgcacagccagcgccaccgctgcggctgcacgctgcccacgagcgctgagcattcattataagagtatggatatcgttctgacagttactatggtccacgggaaagaggaggggctgatcctgttcgaccagataccggtttcctcgggcttcagcaagaacggcgtgctcgtgtccgtcctgggcactacgacaatgcgggtggatatccccgcactgggagtcagcgtgaccttcaatggccaggtgtttcaggcacggctcccatactctctcttccacaacaacaccgaagggcaatgcggaacatgtaccaataaccagagggacgattgtctacagagggatggaacaacagcagccagctgtaaggacatggctaaaacctggcttgtacctgactcacgaaaggacggctgttgggcccctactggcacgccccctacagcgagccctgctgcgcctgtgtcttccacgcctacaccaaccccatgcccgccacagccactgtgcgacttgatgctatcgcaggtctttgcggaatgccacaatctggtcccacctgggcctttttttaacgcctgcattagcgatcactgccggggtcgcttggaagtcccctgtcagtcactcgaggcttatgcagaattatgccgggcacggggtgtttgttcggattggcggggtgccactggtggcctgtgcgacctgacatgccctcctacaaaggtgtataagccctgtggacccatccagcctgccacttgcaacagccgaaaccagtcaccacagctggagggcatggcagaaggatgcttttgtccggaagatcaaatcctcttcaatgctcacatgggcatttgtgtgcaggcttgcccttgtgttggcccagatgggtttcctaagttcccaggagagaggtgggtctccaactgccagagctgcgtgtgcgatgaaggatccgtttcagtgcaatgtaagcccctgccttgcgacgctcagggccaaccgccaccttgtaatcgcccaggcttcgtgacagtcacaagaccacgtgcggaaaacccgtgttgtcctgagacagtatgcgtgtgcaacactaccacttgtcctcaaagcctgcccgtgtgtccccctggtcaggagtcaatatgcacccaggaggaaggggactgctgtccaacctttaggtgcagaccccaactgtgctcgtataatggtaccttctacggtgtgggagcgacatttccaggtgctctcccctgccatatgtgtacatgtctgtcaggtgacacccaggacccgacagtgcaatgtcaggaagatgcttgcaacaacaccacatgcccccaggggttcgagtataagcgtgtggcaggtcaatgctgtggagagtgcgttcagactgcttgccttacaccagacggtcagccagtacaactgaatgagacttgggtgaacagccacgtggacaactgcaccgtgtacctgtgcgaggcagaagggggagttcaccttctgactccacagcccgctagctgcccggatgtgtctagttgccggggtagcctgcggaaaaccggttgctgttattcttgtgaggaagattcatgccaggtgcgtatcaatactaccatactttggcaccagggttgcgagaccgaagttaacataacgttttgcgagggtagctgcccaggagctagtaagtatagtgccgaggcacaagccatgcaacaccaatgcacctgctgtcaggaacggagggtgcacgaggagacagttcccctgcactgtcctaatggctcagcaatactccacacatacacacacgcggtgcaggtgctgtgcggactgctggcgtggggcttgcaggcaggaggacatatcagaggagccgtgcaggaccctcaacaacctctgaaagatcaggaggccagtggaaaggctcgccaaggcggaggatatcggcagacggtggcatggggcgacaagtctaatgcaagggcgtggctacaaaagcccgtcgtatgggtccagagcggagccttccctacacccggaccagccagcgccctctgtccctggta

SEQ ID NO: 231132 - DNA, 17297 bp, synthetic construct
  misc_feature 1..17297: note = Description of Artificial Sequence: Synthetic coding sequence
  source 1..17297: mol_type = other DNA
atgggagcaccaagtgcctgccggactctcgttctcgccctcgcggcaatgttggtcgtccctcaagctgagactcaggggcctgtggaacccagctgggagaatgccggtcatacgatggacggcggagcgcctacttcaagtcccactcgcagggtgtcctttgtgcccccagtaaccgtcttcccatctctaagcccacttaatcccgctcataacgggagagtgtgtagtacctggggcgatttccattacaaaacctttgacggagatgttttccgctttccaggtctgtgcaattatgttttttctgaacattgtagagccgcatatgaggacttcaatgtgcagctccggagagggctggtgggctctaggcctgtcgttacgcgggtggtgatcaaggcccaggggctcgttctggaagcctccaacgggtctgtgctgatcaatggtcagagagaagaactcccttattcccggaccggactgctggttgaacagtccggtgattacatcaaggtgagcattaggctcgtgttgacctttctctggaacggggaggattcggctcttttggaactagatccaaagtatgccaaccagacatgcggcctgtgcggcgactttaatggcctgcctgccttcaatgaattctacgctcacaatgccaggcttacgcccctgcagttcggcaatctacaaaagttggacggccctacagagcagtgtccagacccactgccgctgccggcaggaaattgcaccgatgaggaaggaatatgtcatagaacgcttctaggacctgcgtttgcggagtgtcatgccctggtggactctacggcttacctcgccgcatgcgcccaagacctatgtcggtgtccaacatgcccatgtgccacatttgttgagtactcccggcagtgtgcccacgccggagggcagccacggaactggaggtgccctgaactgtgcccacgcacatgcccgctgaacatgcagcaccaggagtgcggctccccatgtacagacacctgtagcaatccccagcgggctcaactgtgcgaggaccactgcgtcgacggatgcttttgtccacctgggaggagctgcaccgttctggacgacatcacgcatagcgggtgtcttcccttgggacagtgcccatgcacgcatgggggacgaacctactcgccaggcaccagtttcaacactacatgtagttcttgtacttgctctgggggtctctggcaatgtcaggacttgccttgccctgggacatgctctgtgcaggggggagcccacatttctacctatgacgagaaactgtacgacttacacggcgactgttcttatgttttgtctaagaagtgcgctgatagctcattcacagtcttagcagagttgcgtaagtgcggactgacagataacgagaattgcctgaaagccgttacactaagcctcgatggtggagatactgctatacgtgttcaagctgacggtggagtgttcctgaattcaatttacacacaactgcctttgtcagctgcgaacataaccctatttaccccctcttccttcttcatcgtggtgcagacgggcctgggtctgcagctgctcgtgcagttagtcccgctgatgcaagtatttgtgaggcttgatcctgctcaccagggccagatgtgtggactttgtggaaatttcaaccagaaccaagctgacgatttcaccgctttgagcggcgtagtggaggctactggagctgccttcgccaacacatggaaggcccaggccgcatgcgccaatgcaaggaactccttcgaggatccttgcagcctgtcggtggaaaatgagaactatgcccgacactggtgttccagattgaccgacccaaacagcgccttttctcgatgtcatagcatcattaacccaaaaccttttcatagcaattgcatgttcgacacatgcaactgcgagcgtagcgaggactgtctgtgtgccgcattgtctagttatgtccacgcgtgtgcagcgaagggggtgcaactatccgactggcgggatggtgtttgtaccaagtatatgcagaactgcccaaaaagccagaggtacgcatatgttgttgatgcgtgccagccaacctgcagaggcttatctgaagcagacgtgacctgtagcgtatctttcgtgcccgtggatggctgcacatgtcccgcaggcacctttcttaacgatgctggcgcatgtgttcctgctcaggagtgcccatgttacgcccatggtacggttctggctccgggagaagtagtgcacgatgagggcgcagtgtgtagctgtaccggcggaaagctcagctgcctgggcgcatctctccagaagtcaaccggctgcgcggcaccaatggtctatcttgattgtagcaactccagcgccggaactccaggggctgaatgcctgaggagctgtcacacactggatgttggctgtttttctacacattgcgtctctggctgcgtatgtcccccaggcttggtgagtgatgggagtggcggttgcatcgcagaagaagattgtccttgtgtccacaacgaagcaacttacaaacctggcgagaccatacgagtggattgtaacacttgcacttgtagaaatagacgatgggaatgctcccacagattgtgtctgggtacttgcgtcgcttacggagacggtcattttatcacgttcgatggcgacagatactctttcgaaggctcatgcgagtatatccttgcgcaggactactgcggagacaacactactcatgggacgttcagaattgtgacggagaatattccatgcggaaccactggcaccacttgctcaaaggcaattaagctgttcgtggagagttacgaactgatccttcaagagggaacattcaaggccgttgcacgcggacccggtggcgatccaccctataagattcgctatatggggattttcctggttatagaaacacacgggatggctgtaagctgggaccgcaagaccagcgtttttatacggctccatcaggactataaaggcagagtatgcggactgtgcggcaacttcgacgacaacgccataaatgatttcgcgaccaggtccaggtccgtcgtgggggacgccctagagttcggtaactcatggaagctgtctcctagttgccccgacgcactggccccaaaggacccatgtacggcaaacccatttcgaaagtcctgggcccagaagcagtgtagtatactccacggtcccacctttgccgcatgccgaagtcaggtggattctactaagtattacgaggcgtgcgtgaatgacgcatgcgcctgcgatagtggcggtgactgcgagtgtttctgtactgccgtagctgcgtatgcacaagcctgtcatgatgcaggcctgtgtgtttcttggaggactcccgacacttgccctcttttttgcgacttctacaacccccacgggggatgcgagtggcactaccaaccctgtggggctccatgtctgaagacctgtcgaaatcccagtggtcattgtctagttgacctgccaggccttgagggctgctaccccaaatgtcctccgtctcagccgttcttcaacgaagaccagatgaagtgcgtggctcaatgcgggtgctatgacaaggacggaaactactatgatgtcggggcacgcgtccccacggccgagaattgtcaatcctgtaactgtacaccttctgggatccagtgcgctcactctctcgaggcctgcacttgcacgtatgaagatagaacatactcataccaagatgtcatctataatactacggatgggctgggggcttgtctcatcgccatttgcgggtcgaacgggaccattattcgcaaggcggtcgcatgccccggtactcccgctaccacaccgtttaccttcaccacagcctgggtgccacattccactaccagtcctgccctccccgtgtcaactgtgtgcgtccgtgaggtgtgccgttggtcctcatggtataatgggcatcggcctgaacccggactgggcggtggagactttgagacattcgagaacctgagacagcgagggtatcaagtctgtcccgtgttggctgacatcgaatgccgtgctgctcagctgcctgacatgcctctggaggagcttggccagcaggtggactgtgacagaatgagaggactgatgtgtgcaaattcccaacagtcacccccactctgccacgactacgagttgcgagtcctgtgttgcgaatatgtgccatgtggtccatcgcctgcacctggcaccagcccccagcctagtcttagcgcctcgactgaaccagcagtcccgacacctacccagacgacagccacagagaaaaccaccctctgggttacgccaagcatcaggagtactgccgcactgacttcgcagactggctcctccagtggaccggtgactgtgacgccgagcgcccctggcaccacaacatgtcagcctcgctgccaatggaccgaatggtttgacgaagactaccccaaatcggagcaacttggcggagacgtggagtcttatgacaagataagggccgcaggaggacacctgtgtcaacaaccaaaagacattgagtgtcaggcagaatcttttccaaattggaccctcgcccaggttggtcaaaaggtccactgtgacgtgcacttcggcctggtttgtagaaactgggaacaggagggcgtttttaagatgtgctataactaccgcattagggtgttatgctgcagtgatgatcattgtcgcggtcgggctacgactcctccaccaaccactgagctggaaactgccacaaccacaacgacgcaagccctgttcagtaccccacagcctaccagttccccaggcctgacacgagcacctcccgctagtactacagccgtgcctacactgtctgaggggcttacatcacccagatatactagcacactcgggacagctacgactggcggaccgacgacacctgccggttctacggaacccactgttcctggagtagccaccagtaccttacctacccgaagcgcactgccagggacgacgggcagtctcgggacatggagaccaagccagccccctactttggctcccacgactatggcaacctcccgagcaaggcccactggcaccgccagcaccgcatctaaagaacccctcacaaccagcttggctccaactttaacttccgagcttagcacatcacaggccgagacctccacccctcgcactgagacgacaatgtccccgttgactaataccacaaccagccaggggacaacacgttgtcagcctaaatgtgaatggactgaatggttcgacgtcgattttcccacctcaggagtggcaggtggcgacatggagaccttcgagaatattcgggcagccggaggtaagatgtgttgggctccaaagtctattgagtgtagggccgagaattaccccgaagtgtcaatcgaccaggttgggcaggtcctgacctgttctctggagaccgggcttacctgtaaaaacgaggatcaaacagggagatttaatatgtgctttaactataacgtgcgcgtgttgtgctgcgacgattactcccactgcccctcgacccctgcaacgtcatctacagccactcctagctccacacccggaacaacatggatcctcaccaaacctacaacgacagccaccaccacggccagtaccggatccacagccaccccaaccagtaccctgagaacggcgcctcccccaaaggtgctaacgactaccgccacaacccccaccgtaacatcatccaaggccactcctagttcctcgcccggaaccgcgacggcacttccagcgttgaggtccacggccacaacacccacggcaacgagcgtgacccctatcccttcctcgagcttgggaacaacatggacaagactaagccagacaactacacccacagcgactatgtcaactgctactcccagtagcaccccagagaccgcgcatacgagcaccgttctaactgctacagccactacaactggcgctactggcagcgttgccacaccctcttccacacccggtacagcgcatacgacaaaggtgcccactacaacgaccacaggatttacagcgacaccctctagttccccaggtaccgccctgacccctccagtttggatcagtacaactactacgccaacaacacggggtagtaccgtcactccttccagcataccaggaacaacgcacacagctacagttttgacaactactaccactacagttgctaccgggagcatggccaccccttcttccagtacccagacaagtggcacaccaccctccttaactacgaccgcgacaacaatcacggcgactggcagcacgaccaacccttcttcaacacccggaacaacaccgatccccccagtgctaactaccactgccactacacctgccgctacgtcaaatacagtaaccccctcgagcgcactggggacgacgcataccccacccgtccctaataccatggccaccacacatggaaggtctctacctccgtcttccccccacactgttcggaccgcctggacgtcagctacgtctggcatactgggtaccacccatatcaccgaaccatccaccgtcaccagccacacactggcagcaaccaccggaactacgcagcactccacacccgcattgagcagtccccatccgtcatctaggacgaccgaatccccgccaagccccggaacaaccacccctggacacactacagcaaccagccgcactacagctaccgctactccatccaagacccgcacaagcactctcctgccaagttcccctacgtctgcgccaataacaaccgtcgtgactatgggctgtgagccacagtgcgcttggtccgaatggttggactattcataccctatgcccggacctagcggcggagatttcgatacgtacagcaatatccgggcagctggcggtgccgtgtgcgagcaaccattggggctcgaatgccgggctcaagcccagcctggagtgcctttacgggaactgggtcaggtcgtggagtgtagtctggactttggtctcgtctgccggaaccgagagcaggtgggaaaattcaagatgtgctttaactacgagatcagggtgttttgctgtaactacggacattgtccatccacacccgctacatcttccaccgctatgcctagctctactcctggaactacctggatcttaaccgaactaactacaacagcaacaacaaccgagagtaccggtagcaccgccacgccaagcagtacgcccggaactacttggatactaaccgagcccagtactactgctacagtgaccgtgcctaccggcagtactgcgaccgccagttctacacaagcgactgccggtactccgcacgtatccaccactgccacgactcccacggtgacatcgagcaaagctactcctttttctagccctgggacagccactgccctcccagccctgcgctccactgctactaccccaaccgccacaagtttcaccgcgattccctcttcgagcctcgggacaacgtggacaagactgtcacagacaaccacgcctacagccaccatgtcaactgctaccccgtcgtcgacacccgaaacggtccacacctcgaccgtgctcaccactacggccactacaaccggtgccaccggaagcgtggcgaccccgtcctcgaccccaggtacagcccatacaacaaaggttctaacaacgactacgactgggtttactgctactcctagctctagccctggaacagctagaactctacccgtgtggatcagcacaaccacaacacccactaccagaggctcaaccgtgactccttctagcatccccggtactacccacactcctacagtactgacgacaacaacaacgacagtggccacaggatcaatggccactcctagtagcagcacccagacatctggcactccgccttccctcacgactaccgccaccacaatcacggccaccggctctacgactaacccaagtagtacgcccggaactacccctattcctccagtccttacaaccacggctacgacccctgcggctaccagcagtaccgtcactccatcctccgctcttgggaccacccatacaccacctgtgcccaataccacagctaccactcatgggagatcgctgtcccctagctcaccccacacggtgagaaccgcctggaccagcgcgacaagcgggactcttgggaccactcatatcacagaaccttccaccgggacctcccatacaccagcggctacaacagggacgacccagcacagcaccccagcgctgtccagtcctcatccgtcttcccgtacaactgagagcccaccgagccctgggaccacaacgccgggacatacccgggctacatcaaggaccaccgccacagctactccatcaaagacgcgtacgtcaaccctgctgccatcctcgccgacctctgccccaatcaccactgtggtcaccatgggatgcgagcctcagtgtgcgtggtctgagtggctcgactacagttatcccatgcctggacctagcgggggagatttcgatacctatagcaatatccgtgcagccggtggggcagtttgcgaacagcccctcgggctggaatgccgcgcacaggcacagcccggagttccgcttagggagctgggccaggtggtcgagtgtagtctggacttcggactggtgtgccgtaatcgagagcaggtgggtaagttcaagatgtgctttaactatgaaataagagttttctgctgcaactacggccattgcccgtctacccccgctacctcctcaactgctactcccagcagcacccctggcacgacatggatcctgactgagcagaccaccgccgctactaccacagcaaccaccggaagcacagccataccctcatccacacccggtacggccccacccccaaaagtcctgacgtcgacggcaacaaccccaactgctacgtcttcgaaagccacatcttcatcaagtccaaggactgccacaaccttgcccgtgttaacgtcgaccgccacaaaatctaccgcgacctcttttacaccaattccctcctttactttgggaaccactgggacactccctgagcaaaccactaccccaatggcaacaatgtccactatccaccccagcagtactcctgagaccacacacacctcaactgtgctgacaaccaaggccacaacaacgcgcgcaaccagttctatgagtacccctagttcgacccccggaaccacctggatccttaccgaactcacgaccgcggcaaccaccactgccgcaaccggccctacggccacaccctccagtacacccggtacaacttggatcctgacagagccaagcacaacagcgaccgtgacagtgccaaccgggagtaccgctaccgcgtctagcaccagagccaccgcaggcacactcaaagtcctgactagtacggcaactacgcccaccgtgatcagcagtagagctacaccatcatctagtcccggtaccgccacagcgcttcctgccctgaggtccaccgccactactcccacagccacctcagtgactgccattccatcttcttccctagggacagcctggactagattgtcccagaccacgacacccactgccactatgtcaaccgctactcctagcagcacgcctgagacagtccatacatcaacggtgttgaccactaccacgactacgactagggctacaggctctgtagcgaccccatcaagcacgccaggaaccgcgcacacaaccaaagttcctactacaaccacaactggatttactgcaaccccaagctcttcccctggcaccgccctcaccccaccagtctggataagcacgactactactcccacgacgcggggtagcactgtcacgccatcgtcaattcctggaaccacacacactgcgaccgtactgacaacaaccactacaacagttgcaaccggctccatggcaacccctagcagcagcacccagacaagcgggactccaccttcactgacgacaacagcaaccaccattacagcaactggctccaccacaaaccctagtagcactcccggtacaacgccaattccgccagttctaacaactactgcaacaacccctgccgctactagcagtacagtgacacctagcagcgcactggggaccacacacacaccaccggtccccaatacaacagccactactcacggccgatctctacccccatcaagtccacatacagtgaggacggcctggaccagcgccacctctggtatccttggcaccacacatattacagaaccgagcacagtcactagccacacccctgccgctaccacaagtactactcagcatagcacacccgctctgtcaagtccacacccctcttcccggacaaccgaatctcccccatcacctgggacaaccacaccaggtcacacgagggggacatctcgcacaacggcgacagcaaccccttccaaaacacggacttctactctactcccgagctctccgacctccgctcctatcacaaccgtggttacaacaggatgcgaacctcagtgcgcttggtccgagtggctggattactcttatcctatgccaggaccatccggtggggacttcgacacctatagtaacatccgggctgccggtggtgccgtgtgtgaacagcctctaggcctggagtgtagagcacaggcgcaacccggtgtgccgctgcgcgagctggggcaggtcgtggaatgcagcctagacttcggcctcgtgtgccggaacagagagcaagttggcaaatttaaaatgtgctttaattatgagataagggtgttctgttgcaactatgggcactgcccttctacaccagcaacctcttccacggcaactccaagtagcacccctggaaccacttggattctgacgaagttgactacaacggccacgactacagagtctactgggagtaccgcaacccctagctcaacccccggaactacttggatcttaacggagcctagcacaaccgcaacagtgactgtgcccaccggctctacagctacggcaagttcaacacaagccactgccggtaccccacacgtgtctaccaccgcaactacaccaacagtaactagttctaaggcaacgcctttcagctcaccaggcacagctacagcactccccgctctgaggagtacagccacaacaccaaccgcgacatcatttaccgctatcccaagttcctctcttgggactacctggacgcggctctctcaaaccacaactcccacggcgacaatgtccaccgctactcctagttcaacaccggagaccgcccacacatccacagtgctaaccactaccgccacaacaactcgggctactggttctgtggccactccctccagcacccctgggactgctcatactaccaaagtgcctactaccaccaccacgggatttacagttacaccttcttccagcccagggacagccaggaccccacccgtgtggatttccaccacaacgacccccaccacgtcaggatcaaccgttacacccagttcggtccctggcactacgcacaccccgacagtgcttaccactaccactactacagtggcgaccggatccatggctactcctagttctagcacgcagacatcaggcacaccacctagtttgatcacaactgcgactacgattacagctactggatcgaccactaatccaagctccacacccggtactactccaataccgcctgtgctcaccacaacagccactactcccgctgcgacctcatcaacagttacaccttcgtcagcgctaggaactacacacactcctcctgtgcctaacacgacagctacaacccacgggcgaagcctgtctccttcgagtccacatactgtgcgaacagcatggacatctgcaacctctgggactctggggacaacgcatatcacagagccttctacggggacctcacacactcctgccgctacaaccggcactactcaacactccaccccagcgttgagttcaccccatccgtcgtctcggactactgagagtccgcctagccccggaaccaccactcctggccacaccaccgccacgtccagaactaccgcgacggcaacacccagcaagacacgcacatcgacactgctgccaagctcaccgaccagcgcacccatcaccaccgtggttacaacaggatgcgaaccccaatgcgcctggtctgagtggctggactactcttatcccatgccaggccctagcggcggagattttgacacgtatagcaatatccgagccgctggcggtgccgtctgtgaacagcctctggggctggagtgccgggctcaggcccagccgggagtgccattaggtgaacttggccaggttgtcgaatgttcgctcgatttcggtttagtgtgccggaatagagagcaagttggcaaatttaaaatgtgcttcaattatgagatcagagttttctgttgtaattacggtcactgtcccagcacgccagctactagctctacggccatgccctcgtctacgcctggaacaacctggatcctgaccgagctcaccaccactgcgacaaccaccgcgtctaccggatccactgccacccccagcagcactccaggcacagcccctccacccaaagttctgacttcccccgctacaacaccaaccgcaacttcgagcaaggctacctcctcttcttcccccaggactgcaaccacactccccgtgctgactagcaccgccactaagtcaacggcaacttctgtcactcctataccttcctccacattggggacaactggcacactgcccgagcagaccacaacccccgtcgccaccatgtctacaatacacccatcaagtacccccgaaacaactcacacaagtaccgtactgactacaaaggcaaccactacacgggctacctcttcaactagcacgccttctagtactcctgggaccacatggattttgactgagctcaccactgccgctacaactaccgccgctaccgggcctactgctactccctcaagcacaccaggtacgacctggatcctcacagagctcaccacgactgccacaactacagcctctaccgggtctacagcgacgccctcctccaccccgggtacaacctggatccttacagaaccatcaacaaccgcgacagtcaccgtccccaccggatcgaccgcgaccgccagcagcacccaggctacagccggtacgcctcatgtatcaactaccgctaccactcctacagtgaccagttctaaagccaccccgtccagttctccgggaacagcgacagccctgcccgcacttcgctctacggcaaccactccaacggccacgagctttaccgctattccgtcaagttccctgggcactacatggacacgactgtcccaaaccaccacacccactgccacaatgtctaccgcgacgcctagttccacgcctgaaacagtccacacttcaacagttctcacagctactgcaactaccacgggcgctaccgggtccgtcgcaaccccaagctctacaccaggcaccgcgcatactactaaggtgcccacaaccaccaccactggattcacagccaccccgtcatccagccctggcactgctcttacaccaccggtttggatcagcacaacaaccacacccaccaccaccacacccactactagtgggagcaccgtgaccccaagcagtattccgggtacaacccatactgcacgggtcttaacaaccactacaaccacagtcgctactgggtcgatggccacacctagtagctcgacacagacatctggaactccacccagtctgaccacgaccgcaaccacaattactgccaccggcagtacaaccaacccttcgagcacgccaggaaccacaccgattacacccgtgcttacctccacggccaccaccccggcagctacctcaagtaaagcgacatcatctagcagtccgcgaaccgcaactaccctcccggtattaacctctacagccactaagtcaacagccacaagtttcacgccaatcccttcctccacactttggacaacctggaccgttccggcacagacgaccacaccaatgtccacaatgtctacgatccatacaagttccacacccgagaccactcacacatccaccgtactgaccaccacagccacaatgacacgcgcaacaaattcaaccgctacaccatccagcacactaggaaccacgcgcattctgaccgagctcactacgaccgctactacaaccgcagcaaccggctctacggctacgctaagctctactccaggtacgacgtggatactaaccgagccctctactattgccacagtcatggtgcccactggatctacagcaacagcgtctagtacgcttggaaccgcccacactccaaaagtcgtcaccactatggccaccatgccgactgccactgcctcaactgttccttcaagttccaccgtgggcacaaccagaaccccggctgttttgccctccagtcttcctacgttcagcgtgagcacagtaagttcatctgtactgacaacactgaggcccactggattccctagctcccatttcagcacgccctgcttttgcagggccttcggacagttcttcagtcccggtgaagtaatctataacaaaactgatcgggcaggctgtcatttctacgctgtatgtaaccagcactgcgatattgatcgttttcagggtgcttgcccaacatcacctcctcctgtttcgtcggcgcctctctcctcaccaagtccagcacccggttgcgataatgccatacccctgagacaggtgaacgagacttggacgctcgagaattgcacagtggccaggtgtgtgggggataaccgcgtcgtgctgctcgatcccaagccagtggccaatgttacctgtgtgaacaaacatttgccaatcaaggtgtcagatccatcgcaaccttgtgattttcactacgaatgcgagtgtatctgtagcatgtggggtggctctcattactctacattcgacggtaccagttacacatttagaggaaactgtacatacgtgctcatgcgcgagattcacgcgagatttggcaacctgtccctctaccttgataatcactattgtaccgcctcagccaccgcagctgctgcaaggtgtccaagagccctcagcatacactataaatccatggacatcgttctgacagtgaccatggttcacggcaaagaggagggtcttatcctgttcgaccagatcccagtgtcctctggattcagtaaaaatggtgttcttgtttcggtgttaggaaccacgaccatgcgcgtggacatccccgctctcggcgtgtcagtcacctttaatggccaggtcttccaggccagactgccctactccttatttcacaataatacagaaggccagtgtggcacctgcactaataaccaacgggacgattgtctgcagcgagatggcactacagctgctagctgcaaggatatggctaaaacctggcttgtgccagatagccggaaagacggctgctgggcgcctaccgggactccgcctacagcctctcctgccgctcctgtgagctctactccaaccccaactccctgcccacctcaacctctgtgtgacctcatgctgtcacaagtctttgccgagtgtcacaacctcgttccacccggaccattctttaatgcctgtatctccgatcactgccgaggcaggttagaggtcccatgtcagtctttggaagcctacgccgaactgtgtcgcgctcgtggagtttgctcagattggagaggcgcaacagggggactgtgcgacctcacttgtccaccaaccaaagtctataaaccttgcggcccaatccagcctgccacctgcaattcacggaaccagtcccctcagctcgaagggatggcagaaggctgtttctgccctgaagatcaaatcctttttaacgcacacatggggatctgtgtgcaggcgtgcccttgcgtgggcccagacggatttccaaaatttcctggtgagagatgggtttccaactgccagagttgtgtgtgtgacgaagggagtgtatcagttcagtgcaagccactgccatgtgatgcacagggccaaccacctccatgcaacaggccagggttcgtgaccgtcacccgaccccgtgccgagaatccatgttgtccagaaactgtgtgtgtgtgtaatacaactacctgcccgcagtctctccccgtgtgccctcccggacaggagagtatctgcacacaggaagaaggggactgctgccctactttcaggtgcagacctcaactgtgcagttacaatgggactttctacggggttggggcaacttttcccggtgccctgccatgccatatgtgcacttgcctctcaggcgacacacaagatcccaccgtgcagtgccaggaagacgcttgcaataatactacatgtccacaggggttcgagtacaaacgcgtggcaggtcaatgctgtggcgaatgcgttcagacagcatgtctgacccccgatgggcaacctgtgcagttaaacgagacttgggtgaatagccacgtggacaactgtaccgtgtacctgtgcgaggccgaaggaggagtgcatctcttgaccccacaacctgcaagctgccccgatgtttcgtcctgccgaggatctctcagaaagacagggtgctgctacagctgtgaagaggattcctgtcaggtccgaatcaacacaacaattctatggcatcaaggctgtgagacggaggtcaacatcactttttgcgaagggtcctgtccaggggctagtaaatattcagctgaggcccaggccatgcagcaccagtgtacatgttgtcaagaaagacgggtgcacgaagaaaccgtgcctttgcactgtcccaacggttcagctattttacacacatatactcatgtggatgagtgcggatgcacccccttttgtgtgccagcccctatggcacctccgcatactaggggttttcctgcccaggaggccactgctgtgta

SEQ ID NO: 231133 - DNA, 17289 bp, synthetic construct
  misc_feature 1..17289: note = Description of Artificial Sequence: Synthetic coding sequence
  source 1..17289: mol_type = other DNA
atgggggcaccctccgcttgtaggaccctggttttggccctggccgcaatgttagtcgtgccccaggccgagacacaaggtcccgtggagccttcttgggagaatgcaggccacactatggacggcggagcccctacctcgtccccaactcgccgagtgagctttgtccccccagtgaccgtgttccctagtctctcacccctcaaccctgcgcacaacggacgggtgtgcagcacctggggagacttccactacaagactttcgacggagatgtgtttcgcttccccggactgtgcaactacgtgtttagtgagcactgccgcgctgcctacgaagatttcaacgtgcagttgcgacgagggctggtggggtcccgtcctgttgttacccgcgttgtgatcaaagcgcagggcttggtcctagaagccagcaatgggagtgttctgatcaatggtcaaagggaggagctgccctacagtcgaactggtctattggtggaacaaagtggagattacatcaaggtgtcaattcggcttgtcctaacctttttgtggaacggtgaggactcagccttgctagagctggaccctaagtacgccaatcagacctgtggcctgtgcggagacttcaatggcctcccagcattcaatgagttctatgcccacaacgctcggctgacaccactccaatttggaaacctccaaaaattggatggcccaaccgaacagtgcccagatccgctccctctaccggctggtaactgcaccgacgaggaaggcatttgccaccgcacacttctggggccagccttcgctgagtgccacgccctggtggattctacggcctatctagcagcttgtgctcaggatctctgccggtgcccaacatgcccgtgcgctactttcgtggagtattctcgtcagtgtgctcacgcagggggacagccccgaaactggcgatgtcctgaactatgtcccagaacatgccccctcaacatgcagcaccaagaatgcgggtccccatgcaccgatacatgctctaacccacagcgggctcagctgtgcgaagatcactgcgtggatggatgcttctgcccgccaggtaccgtgcttgatgatattacacacagcggctgtctgccgctggggcagtgcccatgtacccacggtggacggacttactctcccggtacttcttttaacactacttgttccagctgtacttgtagcggcggactgtggcagtgtcaggatcttccttgtcctggcacttgctcagtccaggggggagcgcacatcagcacctatgacgagaaactgtatgatctgcatggggattgttcatatgtcctctcaaagaagtgtgccgactcatcctttacggtgctggccgagttgcgcaaatgtggtctgactgacaacgaaaattgtctaaaagccgtgaccctctcgctcgatgggggtgacaccgcgatcagggtgcaggcggacgggggagtattcctgaactccatttacacccagctgcctctgtcagcagcaaatatcacattatttactccatcctcattttttattgtggtccagacaggccttgggcttcaactcctggtgcaactggtgcctctgatgcaagtgtttgtacgcctggaccccgctcatcagggccagatgtgcggtctgtgcgggaactttaaccaaaatcaggcggatgattttacagcgttgagcggagtggtcgaggccaccggcgctgcctttgccaacacttggaaagcccaggcagcttgcgccaatgcgagaaacagcttcgaggatccatgttccctgtcagtggaaaacgaaaactacgccaggcactggtgctcccgtctgaccgatccaaatagtgctttcagccgttgtcactccattattaatcccaagccattccactctaactgcatgtttgatacctgcaattgcgaacgaagtgaggattgcttgtgtgctgcccttagctcgtacgtccacgcttgtgcggctaaaggagtccaactttccgactggagagatggcgtgtgtacaaagtacatgcagaactgtcctaagtctcaacgctatgcctatgtggtagatgcgtgccagccgacctgcagaggactctctgaagctgacgttacttgcagcgttagcttcgtgcctgtggacgggtgtacatgtcctgctgggactttcctgaacgatgcaggcgcatgcgtgccagcacaggagtgcccttgctatgctcacggaacagtacttgctcctggcgaggtggtgcatgacgagggcgctgtgtgcagttgcactggagggaaactgtcctgtctgggggcatccctccagaagagtacgggatgcgccgctcctatggtttacttggactgtagcaatagtagtgccggaacacctggggctgagtgcctgcggagctgccatactctcgatgtgggctgcttttcaactcactgtgtttcgggttgcgtctgtcctccaggtctggtatctgacggttccggcggatgtatagctgaggaagattgtccatgtgtgcacaacgaggccacgtacaaaccgggagagaccattcgcgtggattgtaacacctgtacttgtcgaaaccgtcgatgggaatgttcacacaggctatgtttaggtacctgtgtcgcatatggagatggacattttatcacatttgatggggacagatacagctttgaaggctcttgtgagtatattttagcccaggattattgcggcgataacacgacacatggaacatttcggatcgttaccgagaacatcccctgcggaactaccggcactacgtgctccaaagcaatcaaactatttgtcgagtcctatgagctaatcctgcaggagggtaccttcaaggctgtagccaggggtccgggtggtgatcctccgtacaagatccgatatatgggaatctttctggtgattgaaacgcacgggatggcagtgtcctgggataggaagacgtccgtctttatcaggctccaccaagactataaaggtcgggtatgcggcctttgtggcaactttgacgacaatgcgattaacgatttcgccacacgctcaagaagcgtggtaggagacgccctggagtttggaaactcttggaaactcagcccaagctgccccgatgcccttgccccaaaagatccatgcaccgctaatccttttaggaagagctgggcccagaaacagtgttctatcctgcatggccctacctttgcagcctgccgctctcaggtggattcaactaaatattacgaagcatgcgttaacgacgcttgtgcatgtgactctggaggtgactgcgagtgtttttgcactgctgttgcagcctacgctcaagcttgccacgatgccggtctctgcgtgtcgtggcgcacacctgacacctgcccattattctgcgatttctacaacccccacggtgggtgcgaatggcactaccagccatgtggcgcaccctgtctgaagacctgtagaaacccatccgggcattgtctggtggatctgcccggactggaggggtgctaccctaaatgtcctccgagccagcctttttttaatgaagaccagatgaaatgtgtggcacagtgcggatgttatgacaaggatggcaattactacgacgtgggcgctagagtccctaccgccgaaaactgtcaatcgtgtaactgtactccctcaggcatacagtgtgctcattctctggaggcctgcacttgcacttacgaagatcgtacttacagctaccaggacgtaatttataatacaacagacggcctcggcgcttgccttatcgcaatttgcgggagtaatggcactatcataagaaaagcagtggcctgccccggtactcccgctaccaccccatttactttcacaaccgcttgggtcccccactccacaacatcccccgcactgccagtgagcactgtgtgtgtacgtgaagtatgccgatggtcatcctggtacaatggacacaggccagagccgggattgggaggcggagattttgagacattcgaaaatctcagacagcgtgggtatcaggtctgcccagtcctcgcagacatcgagtgccgagccgctcagctccccgatatgccactggaggaactgggtcaacaggttgattgcgatcgaatgagaggactgatgtgtgccaatagccagcagagccctccactctgtcacgactacgagctgagggtcttgtgctgcgagtatgtcccctgtggacccagtccagcacctggcacttccccccagcccagtctgagtgcgagcaccgagccagctgtccccacgcctacccagacgacagccacggaaaagaccacactgtgggtgaccccttccattaggagtactgccgctctgactagtcaaacagggagttctagcggcccagttactgtaactccatccgctcccggtactacaacgtgccagccccgatgccagtggacggaatggttcgatgaggactatccgaagtccgaacaactgggtggagacgtggaatcgtacgataaaataagggcagcaggcggacacctctgtcaacagcccaaggatatagaatgccaggcagaatcatttccaaattggaccctggcgcaggtggggcagaaagtccattgtgacgtgcatttcggtctcgtgtgtcgaaattgggaacaagaaggcgtgtttaaaatgtgctacaactacagaatccgtgtcctctgttgttcggacgaccattgccggggacgtgccactacacctccaccgacgacggaactggaaaccgccaccacaacaactacccaagccctcttttcaacaccccagccgacatctagccccggactgaccagagctcctcctgcctctaccaccgcggttccaacattaagcgaggggctcaccagccccagatataccagtacactggggacagcaactaccgggggacctacaacccccgcaggttcaaccgagccaacagtgccgggagttgctactagtacgctcccaaccagatcggccctacctggaactacgggtagtcttggaacatggaggccatcacagcctccaaccctggcgcctactactatggctacatctcgcgcaaggcccacggggactgcttcaaccgccagtaaggagcccttgaccacttcactggctcctacactgacgtccgaactgagtacttctcaagccgagacatctaccccgagaacagagacaaccatgtcaccactgacaaacaccaccacttcgcagggaactactcgatgtcagccgaagtgcgagtggaccgagtggttcgatgtcgactttccaacttctggagtggcaggaggggatatggagaccttcgagaacatccgcgctgcgggaggaaaaatgtgttgggcgcctaagtctattgagtgccgggctgagaactaccctgaggtgagcattgatcaagtcgggcaggttctgacctgcagtcttgaaacaggactaacatgcaagaacgaggatcagactggaagatttaatatgtgctttaattataacgtcagggtactgtgctgcgacgactattcacactgcccgtcgacacccgcaacaagctcaaccgctacaccaagttccacaccaggcaccacctggattctcaccaagcctaccacaaccgcaaccacaacggcatccaccggatcgacggctacaccaacctctacactccgcaccgccccaccacctaaggtgctgaccacgacagccactacaccaacagttacatcgtctaaagcgaccccctccagtagtcccggtacggcaacggcacttcctgctctgaggagtactgcgactaccccaactgccacatctgtgacccccattccatccagctccctaggcacaacatggacccgcttaagccagacaactactcccactgccaccatgtctactgccaccccaagttctacccctgagaccgcccacacttccactgttctgaccgccacagcgactaccaccggcgctacaggatctgtggcgacgccttcctctactcccggaacggctcataccactaaggttccaacaaccacaaccaccgggttcaccgcaaccccttctagtagtccaggcactgcattgactccacctgtttggatttcaacaaccacaacaccaaccacacggggttcaaccgtgaccccgtccagcattcccggaacgacacacacggcgaccgtgctcaccactaccaccacaacggttgctaccgggagtatggcaactcctagttccagtacccagacatctggcacgcctccctccttaacgactactgccaccactattaccgccacagggtccaccactaacccctctagcacccccggaaccacacctattcccccagtactgactacaaccgcaacaactccagccgcaaccagcaacactgtgacaccgagctcagccctcggtactacgcacactccgccagtgccaaatacgatggccaccacccacgggagatccctgccgccaagttctcctcatactgtaagaacagcctggaccagcgcaacttccggtatcttagggaccacgcatattaccgagcctagtacggtgacctctcacaccctcgccgctaccactggcaccacacaacactccactcctgcactatcaagtcctcaccctagcagtcgcactacagaatcccctcccagcccgggaacgactacccctgggcataccactgctacaagcaggaccaccgccaccgccacgccaagcaagaccagaacatccacgctcctgcccagtagccctacctcagctcctatcacaacggtggtgacaatggggtgcgagccccagtgtgcctggagcgagtggctagattactcctaccctatgcccggtccatctggaggagatttcgacacctattctaacataagagcagcaggaggggctgtgtgtgaacaaccactgggactcgagtgtcgagcacaggcccagccaggcgtgcctctgcgtgaactgggccaggtggtggaatgctccctcgactttggactggtatgccgcaatcgcgaacaagtgggaaagtttaagatgtgctttaactacgagatcagggtattttgttgcaactatggtcactgtccttccacccccgctacttcctcgaccgctatgccgtcttctaccccaggcactacgtggattctcacagaacttactacaactgctacaactacagaaagcacaggctccactgctactccaagcagtactccaggcacgacttggatcttaactgaaccctccacgacagccaccgtcaccgttccaaccggctccacagcgaccgcttcatctacgcaggccaccgcaggaactccacacgttagcacgactgctacaaccccgactgttaccagttccaaggcgactcccttcagctcacccggaacggctacagccctccccgcacttagatcaacagccaccacaccgactgccacatcctttactgccattccctctagctctctggggacgacctggaccagactgagccagaccaccacacctactgctaccatgtctacagccactccttcctcgactcctgagacggtgcacacttctaccgtactgacaactaccgcgaccacaaccggcgcaaccgggtcagtagcaactcccagttccaccccaggcacggcccacaccacaaaagtgctgaccacgaccaccaccggatttacagccacaccatcaagttcccctggcactgccagaacactgccggtgtggatcagtactaccaccacaccaactacgagaggatcgacggtcacgcccagcagtatacctggaactacccacacccccacagtattaaccacaactacaaccaccgtggccaccggctccatggccacccccagtagctctacacagacctccggcacccctccaagcctcaccacaaccgccacaacaattaccgctaccggaagcaccactaatcccagcagtactcccggtaccactcctatccctccggttctcacaaccacagccactacacccgctgccacaagctcaactgtcacccccagctcagcactcggcactacccacaccccgcctgttcccaatacaacagcaacaactcatggaaggagtctgagtcctagtagtcctcacaccgtgcgaacagcttggacatccgccacctctggtacacttggaacgacacacattacagaaccaagcacaggaacatcccacacacctgcagcaacgactggcaccacacagcacagcacacctgctctgagctctcctcacccgtcttctagaaccactgagtcacctccctccccaggaacaaccacaccaggccacactcgggctacatcacgtactacagccacagccactccttcaaaaactcggactagcaccctcctcccgtccagtccaacctcagcacccattacaacagtggttacgatgggctgcgaacctcagtgcgcttggagcgagtggctagactactcataccctatgccaggcccaagcggaggtgattttgatacatactcaaatataagggctgctggtggagctgtgtgcgaacagccactcggcctagagtgcagagctcaggcacagccaggtgtgccactccgcgaactgggccaggtggttgaatgttccctggactttgggctggtctgtcggaaccgggagcaggtcggtaagtttaaaatgtgcttcaactatgaaatccgcgtattttgctgcaattacggtcattgtcctagtactcctgcaaccagctcaacggcaaccccttcttccacgccgggtaccacttggatcctgacagagcaaactacagcagctaccaccacggccacgactggtagtacagcaatcccttcctctacccctggtaccgctcccccacccaaagtcctgacatccacggccacaactccaacggcgaccagttcaaaggcaaccagctctagctccccccgtaccgcaacaacactgccagttctcacctctacggcaacaaaatcaaccgcgaccagctttactcccatcccatctttcacccttggaaccacgggaaccctccccgagcaaaccactacaccaatggccaccatgagtaccattcacccatccagtacacccgaaaccacacacaccagcactgtgctgaccactaaggccaccaccactcgagcaacttcttcgatgtctacaccatcttctactcctgggacaacttggatactcacggaactgacaactgcagccacaaccacggccgcaaccgggccaactgctacacctagttccacgcccggaacgacgtggatcctgacggagccatctaccaccgcaacagtgaccgtacccaccggaagcacggcgacagctagctctacccgggcaactgccggaaccctcaaggttctcacatctaccgccaccactcctacagtgatctctagtcgtgccaccccctccagtagtccaggtacagccactgcactgccagctctgagatctaccgccactacgccgacagccacatctgtgaccgctatcccatctagcagtctcggcacagcctggacacggctgtctcagaccaccactcctacagcaactatgtccactgccactccaagctccactcccgagacagtgcatactagcaccgtgctcactaccactacgaccaccactagagccaccggaagcgtagctactccctcctcgaccccgggtacagcccacacgacaaaggtaccaacaacgaccaccactggttttactgcaaccccaagcagctcacccggaacagcccttacccccccagtgtggattagtacgaccactactccaacgactaggggaagcactgtgacgccaagtagcattcctggcacaacacataccgcgaccgtgttaaccactactaccaccacggtggccaccgggagcatggcaaccccaagcagctccacacagactagcgggacaccgccatctctgacgactaccgccacaactatcactgctaccggttccacaacaaacccctcaagtacaccaggcacaacgcccatcccgccagtgctcacaaccactgccacaactcctgcagcaacctctagcacagtcacacccagtagcgctcttggtacgacacatacgccgcctgttcctaacacaactgctacgacccacggcagaagcctgcccccttcctcgccacataccgtccgcaccgcctggacctctgccacctctgggattctgggcaccacgcacatcaccgagccctcaacagtgacatcacatacccccgcagcaactaccagtactacgcagcattcgacaccagcccttagcagcccacatcccagctcgcggactacagaatctccccctagtcctgggaccacaactccaggtcacacccggggaacatcaaggactaccgctactgccactcccagtaaaacacgaacgtccactctgctgcctagctcccctacgagtgcacctattacaacagttgtcacaaccggctgtgagcctcagtgcgcgtggagtgagtggttagattatagttatccaatgccaggcccatccggtggggatttcgatacttactccaacattcgtgcagccggaggcgcagtttgtgaacagcctctgggccttgaatgccgggcacaggcccagccaggagttcctctgcgggagctcggccaggtggtggaatgttcattagattttggcctggtgtgccgcaatcgggagcaagtcggaaaatttaaaatgtgttttaactacgagatacgcgtgttttgctgtaactacggccactgcccaagtacacctgccacttcttccacggctactccttcaagtacccctgggacgacctggatattgacaaagctgaccaccactgctacaacaacagaatccactgggtcaacagcaacaccctcgtccacgcctggaacaacctggattctgactgaacctagcacaactgccaccgtaacagtaccaaccgggtccaccgccactgcctctagcactcaagctaccgctggtactccacatgtctcaacgacagctaccacgcccaccgtgacatctagcaaggcaacccctttttcttccccaggaactgccaccgccctcccggctctaaggtcaactgccacgacccctaccgcaacatcgttcacggccataccatcttcttctctgggtaccacttggacacgactgagccagactaccaccccaactgctacaatgagcacagcaacaccctcttcaaccccagaaaccgcccacactagcacggtgctcactacaaccgccaccacgacccgcgctacaggttccgttgccacaccttcttcgaccccgggaaccgcacatacaacaaaggttccaacgacaaccaccaccggtttcaccgttacgccatcttccagcccaggaacagccagaacccctcccgtgtggatctccacgactactacccctactaccagcgggtccaccgtgacccccagtagtgtcccaggaactacccatacccctacggttctcaccaccactactactacagtcgctaccggctcaatggcaactccgagctcgagtactcaaaccagtggcactcctccctcactcatcaccacagccaccactatcacagccaccggatccacgaccaatccgtcctctactcccggaacaactccgatccctcctgttttgaccaccaccgctactacacctgctgccacaagcagcacagtgaccccctcttctgcgttgggcaccacgcataccccaccggtgcctaataccaccgcaacgacacacggaaggtccttaagccctagttctccgcatacagtgcgcacagcctggacaagcgcgactagcggaacactcgggacaacgcacattacagagccaagtacaggcacttcccacacccccgctgcgacaaccggcacgacgcagcacagcacccctgctctttcgagtccgcacccgtcaagccgaactacagagtcaccaccttcacccggtacaaccactcctggtcacacaactgctacttcacggaccacagccaccgcaacaccttcaaagacccgtacgtctaccctgctgcccagctcccctacctctgcccctattactacggttgtcactacggggtgtgagccccagtgcgcatggtctgagtggcttgactatagttaccccatgcccggaccatccggtggagactttgacacttacagcaacattcgagcggctgggggtgctgtttgcgagcaacctttggggctggaatgccgtgcacaagcccagccgggagtgccactcggagagctggggcaggtcgtcgaatgttccctggattttggcctggtgtgtcggaacagggaacaggttggtaagtttaagatgtgcttcaattatgaaatcagggtgttttgctgcaactatgggcactgcccttccaccccagccacgtcctcaactgccatgccgtccagcacacccggtacaacatggattctgaccgagctaacgaccaccgcgaccacaaccgcatcaacagggtctacagctaccccctcttctactcccggtacagccccacctccaaaggtgttaacaagccctgcgaccactcctacggcgactagtagtaaggccacctcttcctctagccctcggaccgctaccacccttcccgttctaacgagcacagcaaccaagagcacagcaacatcggttacacccatcccttcttctaccctggggactactggcacattgcccgagcaaacaaccacacccgttgccaccatgagtacaatacacccctcttcaactcccgagaccactcacacctctacagtgctcactacaaaggcaaccacaactagagcaactagttccacatctaccccatcgtcgactcctggtaccacctggatcctgaccgaactgactactgcggcaaccaccactgcagccactggaccaacggcgacgccttcttcaactcccggaaccacctggatattaaccgaactgactactactgctaccactacagcctccacaggctctacggctactccaagttctacgcctggcaccacatggatcttgacagagccatctactacagctacggtgacggtacccactggctctaccgccaccgccagttctactcaagcaacggcgggaacacctcacgtctctaccactgcaacaacccctacagtcacgtcttctaaggccaccccctcgagctctcccggaaccgccactgcattaccggctttgagaagtaccgcaactactccaactgcaacaagctttaccgcaatacccagttcttctcttgggaccacttggactcgactgtcccaaactacaaccccaactgctaccatgtcgaccgcaactcctagcagcacgccagagactgtgcataccagcacagttctaacggccacagccactaccaccggcgcaacagggtccgttgccacccccagtagcacacctgggactgcacatactaccaaggtgccgaccacaactaccacaggatttaccgccacaccatcctcctcacccggaacggcactaacaccccctgtttggatttccacaactacgactcctacgactacaacacccacaactagcggcagcacagttaccccttccagcatcccgggtacaacacataccgctcgggtgttgacgacaacaaccaccacggtggctacagggtctatggctacaccgtctagctcaactcagactagcggtactccaccgtctcttaccactactgcaacaacaattaccgcaactggcagcactactaacccgagtagcactcccggtacaactcctatcactcctgtcctgacaagtaccgccactactccagcagctaccagctccaaagccacttcatcgagcagtccacggacagctacaactttgccagtgctgacatctactgctactaagagtacagcgacctcctttacacccatcccaagcagcacactgtggactacatggaccgtacccgctcagaccacgacccccatgagcaccatgtctaccatccacacatcatccacaccagagactacacacacttcgacagtactgactaccaccgctaccatgacccgcgctaccaactctacggcaaccccatcttctacgttgggcacgactcggatccttacagaactcacaactactgctacaactaccgccgcaaccggtagtacagcaacactgtcatccactccaggcacgacctggattctaactgaacccagtactatcgcaacagtcatggtccccacaggatcaacagctacagcttccagcacgctgggaacagcacacactccaaaggttgtgacaaccatggcgaccatgcccaccgccacagcttccactgtgccaagttcctcgacagttggaactacgagaaccccagcagtccttccgtcatctctccctacgtttagcgtctcgaccgtctcgagttctgtccttaccactctacggcctacaggctttccttcctcccattttagcacaccctgcttctgtagagccttcggacaattttttagccccggtgaggtgatatacaataagacggatcgggctggctgccatttttacgccgtgtgcaaccagcactgtgacattgatcgatttcagggcgcttgtccaacgtccccaccccctgtttcttcagcgccattgagctcaccgagccccgcacccggatgcgataatgccatcccactcagacaggtaaacgagacatggacactggaaaactgcacggtggctcgttgcgtgggcgacaatcgtgttgtgcttctcgacccaaaaccagtggcaaatgttacctgtgtcaacaagcacttacccataaaagttagtgaccccagccaaccatgtgatttccactacgaatgcgagtgcatctgctctatgtggggcggaagccactactctacatttgacggcactagctacactttcagagggaattgcacttatgtgctcatgagggagatccacgcacggtttggtaacctatcactctacctcgacaatcactattgtactgcatccgccactgctgccgctgctcgctgccctcgtgctttgtccatacactataagtccatggacatcgtattaaccgtaacaatggtccacgggaaggaggagggcctgatcttatttgatcaaatacccgtctccagtggcttcagtaaaaacggtgtattagtgtcagtgctcggcacaaccacaatgcgcgtggacattcctgccctcggcgtatctgtgaccttcaacggacaggtgttccaagcccgattgccgtattctctgtttcacaacaacacagaaggacagtgcgggacctgcactaacaatcaaagagacgattgcctccagcgcgacggaacaactgctgcctcttgcaaagatatggctaaaacgtggcttgtgcctgacagcagaaaggacggctgttgggcacctaccggaactcctcctaccgctagcccagcagctcctgtttcttcaacacctacaccgaccccttgtcctcctcaacccctctgcgacctgatgttgtcccaggtgtttgctgagtgtcacaatctggtccccccaggacccttcttcaacgcttgcatttccgaccactgtcggggtagactggaagtgccgtgtcaaagtctggaggcctacgctgagctttgccgtgccagaggggtgtgtagcgattggaggggggcaactggtgggctctgtgacctgacgtgccctccaaccaaagtctacaagccctgtggccctatacagcccgcaacctgtaacagccgcaaccagtcccctcaactggagggcatggccgaaggctgtttttgccccgaggaccaaatcctcttcaatgcccacatgggaatatgcgtgcaggcgtgcccttgcgtcggccctgatgggtttccaaaattcccaggtgaacgctgggtcagcaattgccaatcctgtgtgtgcgatgaggggtcagtgtcagtacaatgtaagccactgccatgcgacgcccaggggcagccccctccatgcaataggccaggctttgttacagtgacaaggcctagggcagagaatccttgttgtcctgagacggtttgcgtctgcaacaccaccacatgccctcagtccttgccagtgtgccctccaggccaggagagcatctgtacacaagaagagggtgactgttgcccgacctttaggtgtcgtccacaactgtgcagctacaacggaacattttacggcgttggggctaccttcccaggtgccctgccctgccatatgtgcacatgtctgtctggagacactcaggatccaacagtgcagtgccaggaggacgcctgcaacaacaccacatgcccacaaggctttgaatacaagcgcgtcgcaggacagtgctgcggtgaatgtgttcagacagcatgtcttactcctgatggccagccagtacagttaaacgagacctgggtgaactcacacgtggacaactgtaccgtctacttgtgcgaggccgagggaggggtgcacctcctgactccccagccagcctcatgtcccgacgtgtcttcatgtcgtggatcactccggaaaactgggtgttgctacagctgtgaggaagactcatgccaagtgaggattaacacgacaatcctgtggcatcaggggtgcgagaccgaggtaaatattacattttgcgaaggctcatgccccggagcctctaagtactccgccgaggctcaggctatgcagcatcaatgcacgtgctgccaggaacgccgagttcacgaggagacagtacccctgcactgccccaatgggtccgccatccttcacacgtatacgcatgtggatgagtgcggatgcacacccttttgcgtccctgcccctatggctccaccacatactcgcggttttccagctcaagaagctactgctgtatac

SEQ ID NO: 231134 - DNA, 1611 bp, synthetic construct
  misc_feature 1..1611: note = Description of Artificial Sequence: Synthetic coding sequence
  source 1..1611: mol_type = other DNA
gtgttctgctgcaactacgggcactgtccccctaggcctcccgcacttaggccctgcccaccccctttacgcggacggcctggctcgaccgagcttactactaccgccacgactactgcctctacagggtcaaccgctacacctagcagcacccctggaacggctccacccccaaaggtgctcacatcccctgctaccacaccaaccgccacttcttctaaggctacaagctcctcgagcccacgtaccgctacaactctaccagtgctgacaagtacagcgactaaatctacagctacgagcgttactcctataccttcatctaccctggggacgaccggtacactgccggagcagaccacaaccccggtggccactatgagcaccattcatccttccagtacgcctgagacaacccacacatcgacagtgttgacgactaaagcgaccaccactcgcgctacttcaagcacttcgacgccctcgtctaccccaggaacaacctggatcctgacagagctcaccaccgccgctacgacgacagccgcaacagggccaactgctacccccagttccacccccggtaccacctggatcctcaccgagctgaccaccacagcaactaccaccgcaagtacgggcagtaccgccacaccctcaagcacccccggaacaacgtggatcctcaccgaacctagtaccacagcaactgtaacagtgcctaccggttcgacagcaaccgctagtagtacgcaggccacggctgggacaccccacgttagtaccacggccactacacctacagtaactagttcgaaggcaactccatcttcctcgcccggaactgcgacggccctgccagctctgaggtctaccgctaccacccattcttaccagctgtatagccaccctcttctgctgcccactacatggactaggctgtcccagacaaccactcccacagctaccatgtccaccgcaaccccctcgtccaccccggagaccgtccacacttcgacggtattgacagccaccgccacgaccacgggccctgccctatggccccctcccccacctccacaggagcaactcactctccctaagtgtcgtctgccgcagccacgacactcccatcctctcctgcaacctcgggacggtacccatgcctcgagcgtcgaccagcacaatcaccatactcacaaccatcacacgcacaaccagtggctgcacggcgaccccctacttcaccctggcgaccacccacaccggcagtcagcagaccatcaccatcacaattgtacaggatctatggcaactccatccagttccacccagacttctggcacacctccctctctgacaactactgcaacaaccataactgccactggttcaacaacaaatccctcaagtacaccaggtaccactccgatcacacctgtgctcacaagtaccgccacaacgccggcagcgactagctccaaggccacaagctctagttcccctcgcaccgctaccacgctgcctgtcctgaccagcaccgccaccaaatcgacggcaacttctttcacaccaattccctctccctgcgggccaagaggccctagctag

SEQ ID NO: 231135 - DNA, 561 bp, synthetic construct
  misc_feature 1..561: note = Description of Artificial Sequence: Synthetic coding sequence
  source 1..561: mol_type = other DNA
tccagtacccctggaacgacctggattctgacggagccttccacaacagccaccgtgaccgtgccaaccggcagtacagccacggcttctagcacacaggccactgctggtacgcctcatgtttccactacagccactacccctaccgtgacctcaagcaaggccacccccttttccagccccggtacggctaccgccttgcccgctctgagatccacggcaactacacccactgccacatctttcacggctatcccgtctagctgggcccctcccggtcccgcttaccatcggcctccacatcccagacccccatgccctcaaccacacccacccccactccagagactatctactccaccacagtgcctacctcccagaccccctagagggcaccgactgtgcgggcaccccctgctacatcccaggaatagttcccattatcagagcgcggactatcacaatcacttcaccgccacccccagttcctctccagggaccgcccgtacacttcctgtatggatcagcactactactacaccaacaaccaggggcagttag

SEQ ID NO: 231136 - DNA, 960 bp, synthetic construct
  misc_feature 1..960: note = Description of Artificial Sequence: Synthetic coding sequence
  source 1..960: mol_type = other DNA
acaaaagctaccacaaccagagccacgagctctatgagcacccctagttctacccccggtactacgtggatactaaccgagttaaccactgccgctaccaccacagccgcaacacctcatggacatcctgtactgcatccacgagaccatctggacccacaccgggcacagcattataccgtgaccgtacccacagggtccaccgccacggcctccagcacccgcgcaacagctggaacgctgaaggtgctcaccagtcaccatacacattctcatcaactacaaagtcacagcctgctccagtctcgtgactgcaatcggccttcttcgacagagaagcacagccaccatacccactcataccagcggtactcccacccacttttcctgccaacggcctggacccggctgtcgcaaacaactacaccaacagccaccatgtccaccgctacaccttccagtacccccgagactgtccatacatctactgtgctgacaacaactaccaccacaaccagggccacactctggcccccacctccaccccctcaggaacagctgaccctgccgaagtgcagactcccccaaccaaggcattctcatcccctgctgcagccacgggacggaactcacgcctccagcgtcgatcagcataaccaccacacccacaaccaacgcctgcatggggatcccctcctgcacccaacaactcacacagccacagtgctgaccacaactactactacaccgctcgtgctgtggcaacacccaccactagctcacagacctgtggttccaccaagtttaaccaccaccgcaacaaccattaccgccaccggaagtaccacaaatcccagtagtacgcccggaaccaccccaatccccccagtgctgactacgactgcccacacatgcagtcaccagcaacacagcgattctctgctctgcccaagggattag

SEQ ID NO: 231137 - DNA, 2007 bp, synthetic construct
  misc_feature 1..2007: note = Description of Artificial Sequence: Synthetic coding sequence
  source 1..2007: mol_type = other DNA
atgagagagatccacgccagattcgggaatttgagcctttatctcgacaaccactactgtaccgccagcgctaccgccgcagcggctcgctgccctcgtgctctgagcattcattataagtcaatggacattgtccttacagtgacaatggtccatgggaaggaggaggggctgatcctgttcgatcagattccagttagtagtggcttttctaagaacggcgtgctcgtctccgtcctcggaaccactactatgagagtggacatccccgctctcggggtgtccgtgactttcaacggtcaagtgtttcaagccagactcccgtactcactgtttcataataacaccgagggccagtgcgggacctgtactaataaccagcgagacgattgtttgcagcgggacggtacaaccgcagctagttgcaaggatatggccaagacatggctcgtcccagactcccgaaaggacggctgctgggctcctaccggcactccccctacagctagccctgccgctcctgtgagcagcacccctactccgaccccttgcccaccacagccactatgtgatttgatgctcagtcaggtgtttgctgaatgccataacctggttccaccagggccattttttaacgcatgtatcagtgatcactgtagaggcagactagaggtgccatgccagagcctggaggcttatgccgaattatgccgggctagaggagtgtgcagcgattggcgcggtgctaccggaggtctgtgtgacctgacctgcccccctaccaaggtatacaagccgtgtggccctatacagcctgcaacctgcaactctaggaatcagagcccacagcttgaggggatggcagaaggctgtttttgccctgaggaccagatcttgtttaatgcccacatggggatatgtgttcaggcttgtccttgcgttgggccagatgggtttccaaagttcccaggcgaacgctgggtcagcaactgtcagtcatgcgtgtgcgacgagggaagtgtgtcggtgcagtgcaagcccctaccttgcgatgcccagggacagcctcccccatgtaaccgtcctggatttgtcacggtaacccgccctcgggcagaaaacccttgctgccctgagacagtgtgtgtttgcaatactaccacctgcccgcagtctctacccgtgtgcccccctggccaggagtcaatttgcacacaggaggagggcgactgctgcccaacttttcgatgcaggccacaactatgttcatacaacgggacgttctacggagtcggggcaacctttcctggcgctctcccctgtcacatgtgcacgtgtctgtcgggcgatacccaggaccccactgttcaatgccaggaggatgcatgcaataatactacttgcccacaggggtttgaatacaaacgagttgccggacagtgctgtggcgagtgtgttcagacagcctgtctgacgccagatggccaacctgtacagctgaatgaaacatgggtgaactcccacgtcgataattgtactgtgtatctctgtgaagcagaaggcggagtccacctcctaacacctcagcctgcgtcctgtccagatgttagtagctgtcggggttctctcagaaaaacggggtgttgttactcttgcgaggaagactcctgccaggtccgtataaacacaacaatcctgtggcaccaaggatgcgaaacagaggtgaatataacattctgcgaaggaagctgccctggcgctagcaaatactccgctgaagctcaggcaatgcagcatcagtgcacttgctgtcaggagagacgggtgcacgaggagacggttccactacattgtcctaacggttctgcaatcctgcacacatatacgcacgtagacgaatgtggctgtaccccattttgtgtgcccgctcccatgagcccaccagcctgcgtttggcacccagccctgcgcgcaccggcagctcatctcgggctcgcccctccctag

SEQ ID NO: 231138 - DNA, 7319 bp, synthetic construct
  misc_feature 1..7319: note = Description of Artificial Sequence: Synthetic coding sequence
  source 1..7319: mol_type = other DNA
atggtccagcggtggttactgctcagctgctgtggcgctctgctgtctgccggattggctaacacatcatataccagccccggtctgcagcgtttaaaggacagccctcagaccgcacctgacaaaggccaatgcagtacttggggtgccggacatttcagcacatttgatcatcatgtgtacgatttttccggcacctgcaactatatctttgccgcaacctgtaaggatgcgtttccgactttctcggttcagcttaggcgcggtcccgacggttccattagtaggatcattgtagagctgggcgcaagcgtggtgaccgtctccgaggctataatttccgtgaaagacattggagtgatttctttgccctacacatccaacggcctccagattacacctttcggccaaagcgtccggctggtggccaagcagctggaattggagcttgaggtcgtgtggggccctgatagccatctgatggtactcgtggaacgtaaatacatgggccagatgtgtggactttgtggcaactttgacgggaaggttacgaatgaattcgtgtccgaagaagggaaattcctcgagcctcataagttcgccgctctccagaaactcgatgaccccggagaaatctgcacatttcaggacatcccttctacacacgtcaggcaggcccagcacgcacgcatttgcactcaacttctgacgctcgtggcacctgaatgctctgtgagcaaggaaccattcgtccttagttgtcaagctgatgttgcggctgctcctcagccagggcctcaaaactccagttgcgccacgctttctgaatatagcagacaatgttctatggtgggccaacctgtgcgccgatggcgcagccccggactttgtagcgtcggtcagtgccctgctaaccaggtgtaccaagaatgtggtagtgcctgcgttaaaacgtgtagtaatccacaacattcttgttcttcgagctgcactttcgggtgcttctgtccagaaggtactgtgctgaatgacctgagtaacaatcacacttgtgtccctgtgactcaatgcccatgcgtgcttcatggggcaatgtacgccccaggtgaagtgactatcgcagcctgccaaacctgcagatgtactctgggcaggtgggtgtgtacagagcgtccttgtcccggtcattgttcgctggagggaggatcctttgtgacaacatttgatgctcgcccataccggttccacggaacatgtacatacatactcctacagtcgcctcaacttccagaagacggggctctgatggctgtgtacgacaaatcaggagtaagccatagcgaaacttcactggtcgccgttgtctatctgtctcgacaggacaagatcgtaatctcacaggatgaagtggtaacgaataatggtgaggccaagtggctcccgtacaagacaagaaacataaccgttttcagacagacaagcacgcatctccaaatggcgactagcttcgggctagaactggtcgtccaactcaggcctatatttcaggcttatgttacggtgggtccacaatttcggggacaaacccggggtttgtgcgggaattttaacggtgacaccactgatgactttaccaccagcatgggtatcgccgaaggaacggcgagtctgtttgtggactcctggcgggctgggaactgcccggctgcactagagagggagacagacccatgtagcatgagccaactgaataaggtctgcgcggaaacacattgcagcatgctgctcaggacgggtactgtttttgagaggtgtcacgcgacagtgaaccctgcccctttctataagagatgcgtttatcaagcgtgcaattacgaagagacattcccccacatatgtgccgcacttggagattatgtgcatgcttgctctttaaggggagtcctattgtggggatggaggtcctctgtggacaactgcaccatcccctgtacaggcaacaccaccttttcatacaactcacaagcttgtgagcgaacatgcctgagcctgtccgatcgtgctacggaatgtcatcacagcgccgttcccgttgacggttgcaactgcccagatggaacttatctgaaccagaagggcgaatgcgtgagaaaagcacaatgcccctgtatccttgaaggctacaaattcatcctggctgagcagagcactgtcatcaatggcatcacttgtcactgtatcaacggcaggctgagctgtccacagaggcctcagatgtttctggcttcatgccaagcaccaaaaacttttaaatcctgtagtcagtcttctgagaataagtttggtgccgcttgcgctccaacctgccagatgctcgctacgggggttgcgtgcgttcctacgaaatgcgagcctggatgcgtgtgcgcagagggcttgtacgaaaacgctgacggccaatgcgtgccacctgaggagtgtccttgtgagttcagtggggtttcctaccccggtggcgcagagctccataccgactgcaggacctgttcatgcagcagggggcgatgggcttgtcagcaagggacccactgtccatcaacctgtacactgtacggagaggggcacgttataacctttgacggccaacgattcgtctttgatggcaattgcgagtacatcctggctaccgacgtctgtggggtgaacgacagtcagcccacatttaaaattctcactgagaacgtgatctgtggtaattcaggagttacttgtagccgcgcaatcaagatcttccttggcggtttaagcgttgtgctggccgaccgtaattatacggtcaccggagaagagcctcatgtgcagctcggagtaacgccgggagcactttcactggttgtagacatttccatccctggtcgatataatctcacattgatctggaatcgtcacatgacaattctaatccggatcgctagagcgagccaagacccgctttgcggtctgtgcgggaactttaatgggaatatgaaggacgacttcgagacaaggtcccgatacgtcgccagctcagagctagagcttgttaatagctggaaggagtctccactctgtggagacgtttccttcgtgacagatccttgctcgcttaacgcctttagacgtagttgggctgaacgcaagtgtagcgtgatcaactctcagacattcgcaacctgtcacagcaaagtttaccatctgccttattatgaggcctgcgtgcgcgatgcgtgtggctgcgactctgggggtgactgcgaatgcctgtgcgacgcagttgctgcctacgctcaggcctgcttggacaagggagtttgtgtcgattggaggacaccggcattctgccccatctactgtggcttttacaacacccacacacaggacggacacggcgagtatcagtacacccaggaggcgaactgtacgtggcactaccagccatgcttgtgcccctcacagccgcagtccgttcctgggtctaacatcgaagggtgttacaattgttcgcaagacgaatacttcgaccatgaagaaggggtgtgcgtcccttgcatgcccccaacaacccctcagcctccaacgacaccgcagctaccaacaaccgggtcaaggccaactcaggtatggcccatgactgggacttcaaccacgattgggctgctctcatcgacaggacccagtccatcgtcgaaccatactcccgcttcccccacacaaactccgctgctccccgcaactctgacctcttctaagcctacagcgagtagtggagaaccccctaggcctaccacagctgttactccccaggcaacctcaggtctgccacctacagccaccctcagatcgacagctacgaagcccacagtgacccaggcaacaacgcgggctaccgcatccactgcatctcccgctaccactagcacagctcagtctacgactaggacaacaatgacactgccaactccggctaccagcggcacatccccaacattgccaaagagcacaaatcaagagctacctggcactacggctactcaaaccaccggtccgagaccaactcctgcgagtactactggtccaactacccctcaacctggccaaccaacaagacctaccgccacagagactacccagaccagaacaaccaccgagtatacaacaccccagacaccccacaccacacattcccctccaactgctgggagcccagtgccatctactggcccagtcactgctacctcattccatgctacaactacttacccaactccgagtcatcctgagacaaccctacctactcacgtgcctcctttctctacctctctggtgacacccagcactcataccgtgatcactcctacacacgcacaaatggccactagcgccagcaaccactcagcgcctaccgggactatcccaccaccaacgacactgaaagccacagggagcactcatactgcacctccaatcacgccgaccacatcggggacaagccaggctcactcctctttcagtacaaataagacaccaacatcattgcactcccatacctcatccacccatcaccctgaggtgactcccacaagcactacgacaataaccccaaaccccacttctacacgcacacggacacctgtcgcacacaccaactccgccacgtcttctagaccgccaccgccttttacaactcacagcccacccacagggagctcccctttttcaagtacaggccctatgacagccactagcttcaagacgaccaccacctatcccacccctagccatcctcagaccactctgcccacacacgtacccccattttctaccagcctagtgacaccaagtacacacacagtgattacacccacccacgctcagatggcgacttctgctagtatccacagtatgcccacaggcacgattcccccaccgacgacactgaaggcaacagggtcaacccacaccgcacctactatgacactaactacttcaggcacaagccaggctctatcgagcctgaacacggcgaagacgtcgacttcactccactcgcacacatctagcactcatcacgccgaggcaactagcacgagtacgacaaatataacgcctaacccaacttcaactgggactcctccaatgactgtcacaacatcaggcactagccagtcacggtccagcttcagtacggcgaagacgagcacaagtctccattctcacacttcatccacccaccaccccgaagttaccagtacatccacaacttcaattaccccaaaccacactagcacaggcacacggacaccagttgcccataccactagcgccaccagcagccggttacctactccctttaccacacattcaccacccaccggcacaacccctatcagctccacaggacccgtcaccgccacctctttccagactacaacaacataccccacacctagccacccgcacactaccttgcccacgcatgtcccatctttctccacctcgctcgtaaccccatccacccacaccgtcattataccaacacacacacagatggcgacctcggcctccatccactctatgcctacaggtacgatcccacctcccactacaattaaagcaacaggttctacacacactgcaccaccaatgacccccacaacctccggaacaagtcagagcccaagttccttcagtacggccaaaacgagcacctccttaccataccacacaagcagtacacaccatcctgaggtgacaccgacctctacaaccaatatcaccccaaaacatacgagtactgggacccgcacaccagtcgctcacaccacctccgcctcctcctctagactcccaactccgttcactacacactcccccccaaccggaagtagccccttcagctctactgggcctatgactgctacatcattccagacaacaacaacttacccgactccttcccaccctcagacaacccttcctacgcacgtccctccgtttagcacaagcctggtcaccccaagtacacacactgtgatcattactacccatacacagatggcaacttccgcctctatacactctactcccacaggtacagtgccaccacctaccacactaaaagcaactggttcaacacacaccgcccctcccatgactgtgaccacttccggaacatctcagacacacagcagcttctccaccgcgaccgccagctcttcctttatctctagtagctcgtggctcccacagaatagcagcagcagaccccctagctcacctattactactcagcttcctcatctgagttccgctaccacacccgtcagtaccaccaatcagttatcttcatctttctcacctagcccgagcgctccttcaactgtatccagctacgtgccatcctcacattcgagcccccagacgtcatccccttcagtgggaacatcctccagcttcgtatcagcccctgtccatagcaccactttatcatcgggctcccattcatcactatcaacccaccccaccacagccagcgtgtccgccagtcccctgtttccctctagtccagccgctagtactacgattagggctaccctgccccacacaatctcaagcccattcactctaagtgctctgctgccaataagcaccgtgaccgtcagccctactcctagttcccacctcgccagcagcacaatcgcttttcctagcactccccgtactacagcctcgacacacactgcaccagctttttcttctcagtctaccacctctagatcaacatcacttactaccagggtgccaacgagcggattcgttagcctgaccagtggggttaccggtataccaacctctccagttacaaatttaacaactcgccacccaggacccacactctccccaacaacacggtttcttacctcttcactaactgcccatgggtccactccagcctcggcccctgtgagctccctgggaacacctacccctactagtcccggagtgtgttccgtgcgagaacaacaagaagagatcacgttcaagggctgcatggctaacgtgacagtgacacgctgcgaaggggcttgtattagcgccgcaagctttaatatcataactcaacaggtggacgcgagatgctcctgttgcaggccactccattcatacgagcagcagctagaactgccctgtcctgatccctcaacaccaggtagaagactggtcttgactctccaagtgttcagtcattgcgtgtgctcatccgttgcttgcggtgatta

SEQ ID NO: 231139 - DNA, 1134 bp, synthetic construct
  misc_feature 1..1134: note = Description of Artificial Sequence: Synthetic coding sequence
  source 1..1134: mol_type = other DNA
atgaagacactgcccctgttcgtttgcatctgcgccctctccgcctgtttcagtttttctgagggtagagagcgagaccatgagcttcgccatcggcgacaccaccaccagagtccaaagagccacttcgagttgccacactacccaggcctcctcgctcaccagaaaccattcattcgaaagagttacaagtgcctccacaagagatgccgccctaagctgcctccctccccgaataatcctccgaaattcccaaacccccaccaacctccaaaacaccccgataagaactccagcgtggtaaatccgactctggtcgctaccacgcagatcccatcagttacctttccatcagctagcaccaagatcaccacactgccgaatgttaccttcttgccacagaacgcgacaactatctcgagcagagagaacgtcaacacaagctcatccgtggcgacattagcacctgtgaactctcccgctccacaggacaccaccgccgcaccacctacacccagcgctacgacacctgcacctccaagctccagcgcacctcccgagacgacagctgcgccacccacaccttcagccaccactcaagcacccccatccagctctgctcccccagaaactactgccgcacctcccaccccgccagccacgacccctgctcctcctagctccagcgcacctcccgagacgactgcagccccacctaccccatctgcaaccactccagctcccttgtcgtctagcgctccaccagagaccactgcggtgcctccaacgccttctgccaccacgctggacccatctagtgcctcagcgcctccggagactaccgcagcccctcctacaccatcagctaccacgcccgctcctccttcttccccagcacctcaagaaacgacagctgccccaatcaccacacccaattcaagtcccactaccctggcaccagacacctcagagacttcagccgctcctactcaccagacgactacaagcgtcaccacacagacaaccaccacaaagcagccaacttctgcacctggccagaacaagatttccaggtttctcctgtacatgaaaaatctcctgaatagaattatcgatgacatggtcgagcagtag

SEQ ID NO: 231140 - DNA, 1134 bp, synthetic construct
  misc_feature 1..1134: note = Description of Artificial Sequence: Synthetic coding sequence
  source 1..1134: mol_type = other DNA
atgaagactttgccactcttcgtctgcatttgtgccctgagtgcatgcttctccttctcagagggccgtgagcgcgatcacgaactccgacaccgcagacatcaccaccagagccccaagtcccactttgaactccctcactaccccggactactggcacaccagaagccatttatccgcaagtcctacaaatgtctacacaagagatgcaggcccaaactgccaccatccccaaataatccccctaaatttcccaatccccatcagccgccaaaacatcccgacaagaattcgtccgtggtcaatcccactctggttgcaactacgcagatccctagtgtgacatttcccagcgcaagcactaaaatcacaaccctgcctaatgtgacttttttaccacagaatgccacgaccatctcctccagggagaatgtgaatacatcctcaagcgtggctaccctggctccggtcaattcccctgcccctcaagataccacagcagcccctcctacgccttctgcaacgacaccggctccgccatccagcagtgctcccccagaaacaacggcggctcctcctactccatcggccaccacccaggcgccacccagcagctctgcgccacccgagactaccgccgcacctcctaccccacccgctacaacccccgcacctccctctagttctgctcctccagaaacaaccgccgctccccctactccctctgccactacacccgcacccctatcatcatctgcacccccagagaccaccgccgtgcctcccactccttcagccactacactggaccccagtagtgcaagcgcgcctccagaaaccactgcggctcctccaactccatccgctaccactcccgcacctccctcttcccctgccccacaggagacgacggctgccccaatcaccacacccaacagttctccgaccacactggcccctgatacctctgagacctccgcagccccaacacatcagacaactacttccgttaccactcagacgacaaccacaaaacagccaactagtgccccagggcaaaacaaaatcagtcggttcttgttatacatgaagaatttgctaaacaggatcattgacgacatggtagaacaatag

SEQ ID NO: 231141 - DNA, 1134 bp, synthetic construct
  misc_feature 1..1134: note = Description of Artificial Sequence: Synthetic coding sequence
  source 1..1134: mol_type = other DNA
atgaaaaccctgcccctttttgtatgtatttgtgctctgtccgcgtgcttcagcttttccgagggaagggagcgggatcatgaactccggcacagacggcatcatcatcaatcgcccaagtcccatttcgagctaccacactacccgggacttttggcccatcagaagccattcatccgaaagtcatataaatgtctgcacaaacggtgccgcccaaaactgcctccttccccaaacaacccacctaagttccccaatccacatcagcccccaaaacaccctgacaaaaactcctccgtggtcaatccaacacttgtggctaccactcaaatcccctcggtcaccttccccagcgctagcaccaagatcacgacactcccgaacgtgaccttcctccctcagaacgcaaccactataagtagcagggagaacgtcaataccagcagctccgtggccaccctggcccctgttaattctcccgcacctcaggacaccactgctgcccctcccaccccaagtgccactactcccgcaccaccatcgagcagtgctcccccagagacaaccgcagctccccctacgccctctgccacgacccaagcccctccaagtagctctgccccacccgagaccacggcagccccacctacacctcccgctactacacccgctcccccatcatcctcagctccaccagagaccacagctgctcccccaactccaagtgccacaactcccgcacctttgagtagctctgccccacctgagactaccgcagtccctcctacacctagcgccaccaccttagacccttcaagcgcctccgctccaccggaaaccaccgcagcgccaccaaccccctctgctacaacccctgctcctccctcaagtcccgcacctcaggagacgacggcagccccaattaccaccccaaactctagccccaccacacttgcgcctgacacttctgagacatccgcggctccaacacaccagaccacaacctccgtcactacacaaacaaccacgacaaagcagcctacctccgctcctgggcagaacaaaataagccggttcctcctctacatgaagaacttattaaatagaataatagatgacatggtcgagcaatag

SEQ ID NO: 231142 - DNA, 411 bp, synthetic construct
  misc_feature 1..411: note = Description of Artificial Sequence: Synthetic coding sequence
  source 1..411: mol_type = other DNA
atgaagacactgcccctttttgtgtgtatctgcgccttgagcgcttgcttcagcttttctgaagggagagagagagatcacgagttacgacatcgtcggcatcaccaccaaagccctaagtcgcacttcgaactgccgcactatcccggtttactggctcatcagaaaccttttatccgtaaatcatacaagtgcttgcacaaaagatgtcgacccaagttgcccccatctcctaacaatccacccaaatttcctaacccgcaccagcctccaaaacatcctgataaaaattcaagcgttgtgaatccaacactggtggccacaacccagatcccctcagtgacatttccttccgcttcaactaaaatcacaacacttccgaacgtgacgtttctcccacagaatgcctag

SEQ ID NO: 231143 - DNA, 1743 bp, synthetic construct
  misc_feature 1..1743: note = Description of Artificial Sequence: Synthetic coding sequence
  source 1..1743: mol_type = other DNA
atgacagcacccgcaggtccccgtggctctgaaacagaaagactcctgacccccaaccccggttatggaacccaagccggaccatcccctgccccacccacccctcccgaggaggaagatttaaggcggagactgaagtatttctttatgtcaccttgcgataagtttagagccaagggtcggaaaccctgtaagctcatgcttcaggtcgttaaaattcttgtggttacagtgcagcttatcctttttggtctcagcaaccagcttgcagttaccttccgggaggagaatacaatcgcattccgccacttatttcttctgggctatagtgacggcgctgatgatacctttgccgcatacactcgcgagcagctgtatcaagccatattccatgcagtggaccagtacttagcacttccagacgtgtccctggggcgttacgcctacgtcaggggcggtggagatccatggactaacggctcagggctcgctctttgccagcggtactatcatcgcggacatgtcgaccccgctaatgatacattcgacatcgatcctatggtggttacggattgcattcaggttgatccacctgagcggccacctcctccaccctccgacgacctgacactgttggagagttcgtccagttacaaaaatctgactcttaagttccacaagctggttaatgtgaccatacactttagacttaaaactatcaatcttcagtccctgattaataacgaaatccccgattgttacacattctctgtactgatcaccttcgataacaaagcacacagcggtagaatacccataagtctggaaacgcaagctcacatacaggagtgtaagcacccttctgtgtttcagcatggcgacaatagcttcaggctcctctttgatgtggtcgttattctgacctgctcactgtcattccttctatgtgccagatcacttctgaggggatttctgctgcaaaacgaattcgttgggttcatgtggcgtcagcgcggaagggtgatttctttatgggaacgattagagttcgtcaatgggtggtatatcctcctggtcacttctgacgtcctgaccatctccgggactataatgaaaattggaattgaggccaagaacctggcctcctatgatgtatgttcgattttgctgggaacttcgacactgctggtgtgggtaggggttataaggtacctaacttttttccacaattataatatcctgattgcaactttacgggtggcactcccttccgtgatgagattctgctgttgcgttgccgtgatctaccttggttattgtttctgtggatggatcgttctgggcccttatcacgttaagtttcggagcctctctatggtgtcagaatgcctgtttagtcttatcaacggcgatgatatgtttgtcacattcgcagccatgcaagcccagcagggacggagctcacttgtatggctcttctcccagctttacctgtacagtttcatctctctctttatttatatggttttgagcctgtttatcgcattaataaccggtgcgtacgacacgataaaacatcccggtggagccggagccgaagagagtgaattgcaggcctacatcgcccagtgtcaggattcaccaaccagtggcaaatttcgaagagggtcaggctcagcctgcagtctactgtgttgttgtgggcgtgatccaagcgaagagcactctctgttggtgaattag

SEQ ID NO: 231144 - DNA, 1638 bp, synthetic construct
  misc_feature 1..1638: note = Description of Artificial Sequence: Synthetic coding sequence
  source 1..1638: mol_type = other DNA
atgactccaagccagcccactagaggatctagctgcaccagaccaagctctatgctttggacaagcacttggcgatgccttacatgccactgggccggaatgcgtatgtccgttgtaggcgtcacacttggtcccatggctcagggtctcctctcagcctccggtactacaaccgaggccacatggacacggcctaccacccatttgacactgattaggtggtggctgctcaccgcatctagatggatccctccaagtggcccactgcgtccgcctgccacgatttctccttcctggaaagcagccccagtgactagaactagcaggtctaattcaacctcaacagcatgctccctggagggaggtcctggctggggaagacagcatacccgacactcccatccttcaaattactttcctaaggtagggactgggcctccccgaccacgctggtgtctgctcggcgaacactttccttgtcagcttcagagccagcacgtcgccggtgacgcaggcacctggggacgaaaaggccctgaggatgctccagatccccacccgagtctcctccctcggctcgtcaacgtcaccatccacttccgacttaagacgataaacctgcagtccttgatcaacaacgaaatccctgactgttatacattttcagtgcttataacttttgacaacaaggcacactcagggaggattccgatttccttggaaacacaagcccatatacaggagtgtaagcatccctcagtcttccagcatggagataacagtttcaggcttctgttcgacgttgtcgtgatactgacatgtagcttaagtttcttgctatgcgctcgcagtctgctgcggggattcttgctgcagaatgagtttgtcggcttcatgtggcgccagcggggacgcgtgatctctctgtgggaacggctggaatttgtgaatggttggtatatcctcctcgtgacctccgatgttctcacaatcagcgggactataatgaagatcggcatcgaggccaagaatctggcatcctatgacgtgtgttccattctccttggtactagcactctcctcgtgtgggtcggcgtcattcgttatttgactttctttcacaattacaatatattgatcgccaccttgcgcgtggccctcccatccgtgatgaggttttgttgctgcgtggcggtgatttacctcggatactgcttctgcggttggatcgtactgggaccttaccacgtaaagtttcggtcgctaagcatggtgtccgaatgtctgttttctcttataaacggtgatgatatgtttgtgacttttgccgcaatgcaagcacaacaggggcgaagcagcctcgtgtggctgttttcgcagctgtatttgtatagttttatctctctgtttatctatatggtgctctctttgttcatcgcactgatcacgggcgcttacgatactataaaacatccgggtggcgcaggcgcagaggaaagtgagctccaggcctacattgcccagtgccaggactctcccacgtccggtaagttcaggcggggatcggggtctgcatgcagcttgctttgctgctgtggtcgggacccttccgaggaacatagccttctggtgaactag

SEQ ID NO: 231145 - DNA, 1701 bp, synthetic construct
  misc_feature 1..1701: note = Description of Artificial Sequence: Synthetic coding sequence
  source 1..1701: mol_type = other DNA
atggccaggcagccataccggttcccgcaggcaaggatccctgaaagaggcagtggggtgtttcggctgaccgtgcggaacgccatggcgcatcgggactcagagatgaaggaagaatgcttgcgggaggacctaaaattctattttatgagcccttgtgagaagtatcgtgcgagacgacagatcccatggaagctgggcttacagattcttaagattgttatggtgactacgcaactggtgcgattcggattgtccaatcaactggtcgtggcgtttaaggaggacaatacagtggcgttcaagcatctctttcttaaaggatattcaggaaccgacgaggacgactattcgtgctcggtttacacacaggaggatgcctatgagtcaatcttcttcgccattaatcagtaccatcagctgaaggatattactctgggcacattaggttacggagagaacgaggacaataggatcggactgaaagtctgtaaacagcactataagaaaggcacaatgttcccttccaacgagaccctgaatatcgataatgacgttgagctggactgcgtgcagctggatctacaggatctgagcaaaaagccacccgactggaaaaacagcagcttttttcgcttggagttttacaggctgcttcaggtcgagatttccttccacctcaagggcattgatttgcagactattcactccagggagcttcctgattgctatgtgtttcagaacacaattatttttgacaataaagcccattctggtaagattaaaatttactttgactcagacgccaagatagaagagtgtaaggaccttaacatttttggttccactcagaagaacgctcagtacgtactggtgtttgacgctttcgtgattgtaatctgtctggcatccctgattctgtgtaccagaagcatcgtgctagcattaaggctgcggaaacggtttcttaacttcttcttagagaaatataagcgaccggtgtgcgatacagaccaatgggaattcattaacgggtggtacgtcctggtcatcattagtgatctcatgacaattataggctccattctgaagatggagatcaaggctaagaatctgaccaactacgacctctgctctatcttcttaggcacttctactcttctggtctgggttggcgtgatccgatatctgggttattttcaagcttacaacgtattgatattaacaatgcaagcctccctaccaaaggttctacgattctgcgcctgcgccggaatgatttatcttggatatacattctgcggctggatcgtgctcggaccgtatcacgataaattcgagaaccttaacactgtcgccgagtgcctgttctcattggtgaacggcgacgacatgtttgccacttttgctcagatccagcagaaaagcatactggtttggctgtttagccgcctgtacctgtactcatttatcagcctgtttatctatatgattttgtccctgtttatcgctcttatcacggactcatacgatacaatcaaaaagttccagcagaatggcttccctgagaccgacctgcaagaattcctgaaggaatgctcctccaaagaggaataccagaaggaatcctccgcctttctttcctgcatctgttgcagacggaggaaaaggtctgacgaccatctcatcccaatctcatag

SEQ ID NO: 231146 - DNA, 1662 bp, synthetic construct
  misc_feature 1..1662: note = Description of Artificial Sequence: Synthetic coding sequence
  source 1..1662: mol_type = other DNA
atggccgaccctgaggtggtcgtatccagctgctcctctcatgaagaggagaatcggtgcaatttcaatcaacagacgagtcctagcgaggaacttctgttggaggaccaaatgaggcgcaaattaaagttcttctttatgaacccatgtgagaagttctgggcaagggggagaaaaccctggaaattggccattcagattcttaaaattgccatggtgactatccagctggtgctttttgggctgagtaaccaaatggtggtggcgtttaaagaggagaacacgattgcattcaaacacttgttcctcaagggatatatggacagaatggatgacacatatgcagtgtacactcagagtgacgtgtatgaccagctgatcttcgcggtcaaccagtatctgcagctgtacaatgtcagtgtgggtaatcacgcatatgagaataagggcaccaagcagtccgcgatggccatctgtcagcacttctacaaaaggggcaatatctaccctggaaacgacaccttcgatatcgatcccgagattgaaacggaatgcttcttcgtggaacccgatgagccattccacattgggacgccagccgagaataaactgaaccttacactcgactttcacaggctccttaccgttgagctgcaatttaagctaaaggccatcaacctccaaacggttcgccaccaggagctgcccgactgttatgacttcaccctcaccatcaccttcgataacaaagcacattccggacggattaagatcagcctcgataatgacatttccattcgcgaatgcaaggactggcacgtatctggaagtattcagaagaacactcactacatgatgattttcgatgctttcgtaattctcacgtgtttagtaagtcttatattatgcattcgcagcgttattcgtggcctccaactgcagcaagagttcgttaactttttcctcttacattataagaaggaggtgtccgtatctgatcagatggaatttgtcaatggctggtacattatgataattatttctgacatactaacaatcatcggatccattctgaaaatggaaatacaagccaagtcactgacaagttatgatgtctgctctattttgctcggaacatctactatgttggtctggctgggcgtgatccgatatctgggattcttcgctaagtacaatctcctgattctaaccctgcaagctgccctgcccaatgtgatacggttttgttgctgtgctgccatgatttacctgggctattgcttctgtggatggattgtcctgggtccgtaccatgataaatttcggtccctgaatatggtgtccgagtgtcttttctctttgatcaatggcgatgacatgtttgctacattcgccaagatgcaacagaagtcataccttgtgtggctgtttagccgcatatacttgtactcctttatatcactgttcatatatatgatcctaagtctgttcattgctctcattacagatacctacgaaactattaagcagtaccaacaggacgggtttcctgaaaccgaactcaggacctttatatccgagtgcaaggatctacctaattccggcaaatacaggctggaagacgacccacccgtatctctgttctgctgctgtaaaaagtag

SEQ ID NO: 231147 - DNA, 1494 bp, synthetic construct
  misc_feature 1..1494: note = Description of Artificial Sequence: Synthetic coding sequence
  source 1..1494: mol_type = other DNA
atggctgacccagaagtagtggtaagctcctgcagctcccatgaagaagagaacagatgcaacttcaaccagcaaacttcaccttcggaggaactgctgctggaggaccagatgaggagaaagttgaagttcttcttcatgaacccttgcgaaaagttttgggcacggggtcgaaagccatggaaactggccattcagatacttaagatcgcaatggtaacaatccagtatttgcaactctacaacgtgtcagtcgggaaccatgcctacgaaaataaaggcaccaagcagtctgcgatggctatttgccaacacttttacaaacgtggaaatatataccccggtaatgataccttcgacattgatcccgaaatcgagactgagtgtttttttgtggagcccgacgagccatttcatataggaactccggcagagaacaaattgaaccttacccttgactttcacaggctgctaacagttgaattgcagtttaaactgaaggcaatcaatttgcagactgttcgacaccaggagctgcccgactgttatgacttcacccttaccattacctttgataacaaggcacattctggacgaatcaaaattagtctggataatgacatctcaatccgggagtgtaaggactggcatgtatccgggagcatacagaagaatactcattatatgatgatttttgacgcgtttgtgattcttacttgtctggtcagcttaattttgtgtattcgatctgtgattaggggcctgcaattgcaacaggagtttgtaaacttctttctacttcactacaaaaaggaagtatccgtgagtgaccaaatggaatttgttaacggctggtacatcatgattattatctcggacattctcacaatcatcggctccattctaaagatggaaattcaagccaaatctctgacatcctacgacgtgtgttccattctgctgggaacgagtacgatgcttgtctggttaggagtcatcagatacctagggtttttcgccaaatacaatctcctaattttgacccttcaagccgcattacccaatgtgatacggttctgctgttgtgcagctatgatctacctgggctattgcttctgcggttggattgttctcggcccttaccatgataagttccgctccctcaacatggtatctgaatgcctattttctctcataaacggagatgacatgttcgccaccttcgcaaaaatgcagcagaagtcctaccttgtctggctcttctccagaatttacctatattcgtttatcagcttatttatatatatgatacttagcctgttcattgctctgatcactgacacctacgaaaccatcaaacagtatcagcaggatggattccccgagaccgagctcagaaccttcatctctgaatgtaaggacctcccgaattcaggaaagtatcggctagaagacgaccccccagttagtcttttctgctgctgtaagaagtag

SEQ ID NO: 231148 - DNA, 966 bp, synthetic construct
  misc_feature 1..966: note = Description of Artificial Sequence: Synthetic coding sequence
  source 1..966: mol_type = other DNA
atggcggatccagaagtggtggtgtcttcgtgcagtagccacgaggaggagaatcggtgtaactttaaccagcagacaagtccaagcgaagaactgctgctggaagatcagatgcggaggaagctcaaattcttctttatgaacccttgcgagaagttctgggctcggggacgcaaaccatggaaactggccattcagatcctgaagatcgccatggtgacaatccagcttgtcctctttggcctttcaaatcagatggtcgtggcgtttaaagaagaaaatactatcgccttcaagcaccttttcctgaaaggctatatggatcgcatggacgatacctatgcggtgtacactcagagtgatgtgtacgaccagttaatcttcgcggttaatcagtatctgcagctgtacaatgttagcgtcgggaatcatgcatacgagaacaaaggcacgaagcaatctgccatggctatttgccagcatttttacaaaaggggcaatatttatcctggaaacgatacttttgacatcgatcctgaaattgagacggagtgcttcttcgtcgagcccgatgaacccttccacattggcacacctgccgaaaacaaacttaatctgactctggacttccataggctgttaaccgtcgagctccagttcaaactgaaggccatcaacttacagaccgtgcggcatcaagaactgcccgattgttacgattttactctgacgatcactttcgacaataaggctcactcaggacgtatcaagatctccttagataacgatatctctattcgagagtgcaaagactggcacgtctctggttctattcagaaaaacacacactatatgatgattttcgatgccttcgtgatccttacctgtctggtttctctgatcttatgcatcaggagtgtgattagaggcctgcagctacagcaggtgggcaatgtcgccttctag

SEQ ID NO: 231149 - DNA, 1494 bp, synthetic construct
  misc_feature 1..1494: note = Description of Artificial Sequence: Synthetic coding sequence
  source 1..1494: mol_type = other DNA
atggcagatccagaagtcgtggtgtcgagttgctctagccacgaggaggagaacaggtgcaactttaaccaacaaacttccccgagcgaggagctcctactggaggaccagatgaggagaaaactgaaatttttctttatgaacccttgtgagaaattttgggcacgcggaagaaagccctggaagttggcaatccaaatccttaaaatcgccatggttaccatacagtacctccaactgtataatgttagtgtgggaaatcatgcatacgagaataaaggaacgaagcagtccgctatggccatctgccagcacttttataagcggggtaacatctacccaggaaacgatacgtttgacattgatccggagattgaaacagagtgcttttttgtcgagcctgacgagccgttccatattggcacccccgcagagaataagctcaatcttaccctggattttcatagactgctcaccgtagaactgcagtttaaactgaaggccataaatttgcaaactgtgagacaccaagagttgcctgactgttacgatttcaccctcacaatcacatttgacaataaggcccattccggtcgaataaagatcagtttggacaatgacattagtataagagagtgcaaagactggcatgtttcagggtctattcagaagaatacacactacatgatgatttttgatgcattcgttatcttaacttgtctggtctcactgattctctgcatcaggagcgtcatcagaggactgcaactccagcaggagtttgttaacttttttctcctgcactataagaaggaagtcagcgtgtctgatcagatggagttcgtgaatggatggtatatcatgattattatctccgacatcctgacgatcattggctctatcttgaagatggaaatccaagcaaaatccctcacgtcatacgacgtgtgctcgatcctgttgggaaccagcaccatgcttgtgtggctgggcgtcattagatacctcgggttctttgcaaaatacaatctgttaattctgacacttcaagccgctttgccaaatgttatccggttttgctgctgcgctgcgatgatatatctagggtattgtttctgtggctggattgtactgggcccttatcatgataagttccgctcattaaacatggtgtcagaatgcctcttttcactgatcaatggtgatgatatgttcgccacattcgcgaaaatgcagcagaaaagttatctggtgtggctgtttagccgaatttatctgtattccttcatctcgctattcatctatatgattctttccctattcatagctctgataacagacacctatgagactatcaaacaatatcagcaggatggatttcccgaaacagaactgcgcactttcatcagcgaatgcaaggatttacctaacagcggcaaataccgcttggaggacgaccctcccgtgagcttattttgctgttgtaagaagtag

SEQ ID NO: 231150 - DNA, 1662 bp, synthetic construct
  misc_feature 1..1662: note = Description of Artificial Sequence: Synthetic coding sequence
  source 1..1662: mol_type = other DNA
atggccgaccctgaagtggtggttagcagctgttcatctcacgaggaggagaataggtgcaattttaaccagcaaacaagcccttccgaggagctgctattggaagaccaaatgcgacgcaaacttaaatttttcttcatgaacccatgtgaaaaattttgggcccgagggaggaaaccatggaagctggcgatccaaatcctgaaaatagccatggttacaatccagctggtcctgttcggcctttccaaccagatggtggtcgcttttaaagaggaaaacacgatcgctttcaagcacctgtttctcaaaggttatatggacaggatggatgacacctatgccgtgtacacgcagtcagatgtgtacgatcagctgatttttgctgtgaatcagtatttgcagttatacaacgtctcagttggcaatcatgcctacgaaaataaaggcacgaaacaaagcgccatggcgatatgtcaacatttttacaaaaggggtaatatctacccaggcaatgacacattcgatatcgatccagagatcgagaccgagtgtttcttcgtggagcccgacgagccctttcacatcggaacccccgcagaaaacaagctgaaccttaccctggacttccacaggcttttaacagtcgaactgcagttcaaactcaaggccattaatctccaaactgtcaggcaccaggaacttcctgattgttacgactttacactgaccatcacattcgataacaaggctcattccgggaggatcaagatcagccttgacaacgacatcagcatacgggaatgtaaagactggcacgtgtccggttctatacagaagaatacacactacatgatgattttcgatgcctttgtgatcttgacttgtctggtgagtctcattttgtgcatcaggtccgttatcaggggactgcagttgcaacaagagtttgtgaatttctttctgcttcactataaaaaggaggtatccgtgtctgatcagatggaattcgttaacggatggtatatcatgattattatcagtgatattctgacaattatcgggtccatactgaagatggaaattcaggctaagagtttgacatcctatgacgtttgctcaattttgctcgggacatccacgatgctagtttggcttggagtgatacggtacctgggcttctttgcaaaatacaacttgttgatccttaccctgcaagctgctttgcctaatgttatccggttttgttgctgtgccgcaatgatttatctgggctattgtttctgcggatggatcgtgctgggcccttaccacgacaaatttcgaagcctcaatatggtgagcgaatgtctattttcacttatcaatggcgacgatatgttcgctactttcgctaagatgcagcaaaagtcctacctggtttggctcttcagtagaatttatctttattctttcatctcattatttatctacatgatcttatccctctttattgcactgatcaccgacacctacgagaccataaaacaataccagcaggatgggttccctgaaactgagctgaggaccttcatctcagaatgcaaggatctgcccaactctggtaagtataggctcgaggacgatcctccggttagtctcttttgttgctgtaagaagtag

SEQ ID NO: 231151 - DNA, 2442 bp, synthetic construct
  misc_feature 1..2442: note = Description of Artificial Sequence: Synthetic coding sequence
  source 1..2442: mol_type = other DNA
atgagtctgttgggtgatcccctccaggcactcccaccgtccgctgctcccacaggccctcttctcgcgccaccagctggagccactttgaatagattaagggagcccttgctcagacggctctcagagctcctggaccaggcaccagagggtaggggctggaggcgactggctgaactggccggttcccgcggaagactccggctgtcttgtctagacttggaacagtgctccttgaaagtcttggaaccagaaggaagccctagcctgtgtctactgaagctcatgggcgaaaaggggtgtaccgtcaccgaactgtccgattttctgcaggccatggagcatactgaggtgttacagttactgtcacctccgggtatcaaaatcactgttaacccggagtcgaaggccgtcctggcaggacaattcgtcaagttatgttgccgggcaacagggcaccctttcgtccagtaccaatggtttaagatgaataaagaaatccccaacggaaacacaagcgagctgatttttaatgcagtccacgtgaaagatgccggattttatgtgtgcagggtcaataataatttcaccttcgagttcagtcagtggagccagttggacgtttgtgatatacccgagagctttcagcgatcagttgatggggtgtcggaaagcaagctgcaaatctgtgtggagcctacaagtcagaaactgatgccagggtccactttggttctgcagtgtgttgcagtgggatcccctatcccacactaccagtggtttaaaaatgagctgcccctgacccatgagaccaaaaagctctacatggtgccctatgttgacctagagcatcagggaacttactggtgccatgtatataatgatagagatagtcaggactctaagaaagtggaaataataatcgatgaactgaacaatctggggcaccctgataacaaggaacagaccacagatcaaccacttgccaaggacaaggtggctttgttgatcggcaacatgaattaccgcgagcatcctaagcttaaggctcctcttgtggacgtatatgagctgacgaacttgctccgacagttagactttaaggtcgtgtcccttcttgacctcacagaatacgaaatgagaaatgccgtggatgaattcttattactcctggacaagggagtctacggcctcctatactatgctgggcatggttacgaaaactttggtaatagctttatggtgccagtcgacgcccctaacccctaccggtcggagaactgcctatgcgttcagaatattctgaaactgatgcaggagaaggaaaccggcctgaatgtgtttttacttgacatgtgtagaaaacgcaatgactatgacgatactattcccattcttgatgctttgaaggtcaccgcaaacattgtgttcgggtacgcgacctgtcagggcgctgaagcttttgaaattcagcactcaggactagcgaatgggatcttcatgaaatttctgaaggaccgcctgctggaggataaaaagatcaccgtgctccttgatgaggtcgcggaggatatgggaaagtgtcacctgacaaagggcaagcaggctctggaaattcgtagctccctctctgagaaacgggcacttactgacccaattcagggtactgagtactccgccgaaagtctagtcaggaatctccaatgggcgaaagcccacgaactgccagaatcgatgtgtttgaagtttgactgcggcgtgcagattcagctgggttttgccgctgaattcagcaacgtgatgataatttacactagcatcgtatataagccaccggaaataataatgtgtgacgcctacgtgacggacttcccccttgacctcgacatagatcctaaggacgctaataagggaacaccagaggagacaggctcgtacctcgtctccaaggatcttccaaagcactgcttgtacacaagattgtcttcgctgcagaagctgaaggaacatttggtattcacagtgtgtctgagttatcagtattctggacttgaggacacagtggaagataagcaggaggtgaatgtagggaagccgttaatcgctaagttagacatgcaccgcggacttggccgtaagacctgttttcagacgtgcttgatgtccaacgggccatatcaaagttctgccgctacttccggtggcgctggccattatcactcactccaagaccccttccatggcgtgtaccattctcatccgggaaatccatctaatgtgacaccagccgactcttgccattgcagtaggacacccgatgcctttatcagttcatttgcacatcacgcttcgtgccatttctctagaagcaatgtgcctgtggagacaaccgacgagattccgtttagtttctctgacaggttacgtatctctgagaagtag

SEQ ID NO: 231152 - DNA, 2475 bp, synthetic construct
  misc_feature 1..2475: note = Description of Artificial Sequence: Synthetic coding sequence
  source 1..2475: mol_type = other DNA
atgtccctgttaggagaccctctgcaagcactccctccctccgccgctcctaccggaccactgctggcccctcctgccggagccaccttgaatcgattgcgcgaaccgctcctcagaaggctcagcgaactcctggaccaagcccctgaggggcgaggatggaggcgattggctgagttagccggaagtagaggaaggcttaggctgagctgcttggatctggaacaatgtagcctcaaggtcttggagccagaagggtcaccgtctctgtgtctgctgaaactaatgggggaaaagggttgtacagtgaccgaactctctgacttcctgcaggctatggagcacaccgaggtcctgcaattactctctccacccggtattaagattaccgtgaaccccgaatctaaggcagtgctagccggtcaattcgtcaagctgtgttgcagggcaaccggacacccgtttgttcagtaccaatggttcaagatgaacaaggagataccgaatggcaatacttcagagttgatcttcaacgcagtgcacgtcaaggatgcagggttctacgtgtgccgcgtgaacaacaatttcacatttgagttttcccagtggtctcaactggacgtgtgcgacattcctgaatcattccagagaagcgtggacggagtgagcgagagcaaattacagatctgtgtggagcccacatcacaaaagctaatgcctggctctactctggtgctgcagtgtgtggcagtggggtctcccattcctcactaccagtggttcaagaacgagttaccgcttacccacgagacgaagaagctctatatggtgccttatgtggaccttgagcatcaagggacatactggtgtcacgtgtataacgaccgggacagccaggacagcaaaaaggtggagataattatcggacggactgacgaggctgtcgagtgcaccgaagatgaactcaataacctgggccatcctgacaataaggaacaaactaccgaccagccactggccaaagataaggtggccttgttaatcggaaatatgaactaccgcgaacacccgaaactgaaggctccgctcgtagacgtgtacgagctcaccaatctgttgcggcagttagattttaaagtcgtctccctgctggacctcacagaatacgaaatgagaaatgccgtcgatgagttcctgctcttgctagacaaaggtgtgtatggactgctttactacgccggtcacgggtacgaaaactttgggaactccttcatggtgcccgtcgacgcccctaacccctaccgttctgagaattgtctctgcgtgcaaaatatcctgaaactcatgcaagaaaaagagacagggctgaatgtgtttttgctggacatgtgccggaagcgaaacgattatgacgacacaattccaatcttggatgccctgaaggtgactgccaacattgtgtttggttacgccacctgtcagggagctgaggcttttgagatacagcactcgggcctggctaacgggattttcatgaaatttctcaaggatcggctccttgaagacaagaagatcaccgtgttgctcgatgaggtagccgaggacatgggcaagtgccacctgaccaaaggtaagcaggcattggagatcagatctagcttgtccgaaaagcgggctctcacagatccaatccagggaaccgagtattccgcagagtcactggtgcgcaaccttcagtgggccaaagcccacgaacttcctgagtcaatgtgccttaagtttgattgtggcgttcagatacagctgggtttcgctgctgaattttcaaacgttatgatcatctatacgagtatcgtgtataaaccccctgaaatcattatgtgtgatgcctacgtgacagacttccccctggacctggatattgaccctaaggacgcaaataaggggactcccgaagagacaggatcctacctggtgtcgaaggacctgcccaaacattgtctttacacacgcctaagttccctccaaaagcttaaggagcaccttgtatttactgtgtgtttaagttaccagtacagtggcctcgaagacacagtggaagacaagcaggaggtaaacgttgggaagcccctgatagctaagcttgacatgcacagaggtctggggagaaaaacgtgttttcagacatgcctgatgtccaacggcccttatcagtcatctgccgctacttcaggaggtgccggtcactaccacagcctccaggatccctttcacggagtctaccatagccatccaggcaacccttcaaacgtgacccccgctgactcttgtcactgttctaggactcccgatgcatttattagctcgtttgctcaccatgcatcgtgccacttctcccggtctaatgtgccagtcgaaacaaccgatgagattccatttagtttctccgaccgccttaggattagcgaaaaatag

SEQ ID NO: 231153 - DNA, 441 bp, synthetic construct
  misc_feature 1..441: note = Description of Artificial Sequence: Synthetic coding sequence
  source 1..441: mol_type = other DNA
atgacaatgcgcagtctgctgcgcaccccatttttatgcggcctgctttgggctttttgcgctcctggtgccagagcagaggagcccgctgcctcttttagtcagccgggtagcatgggattggataaaaacacggtgcatgatcaagagcatattatggaacatttggaaggcgtgattaacaagcccgaagcggagatgtcccctcaggaactgcagctgcactacttcaagatgcacgattatgacggtaacaatctcctcgatggcctggaactctccacagccataacccacgtgcacaaggaagaagggtccgaacaggctcccctgatgtccgaggatgagttgatcaacattatcgacggagtgctgcgcgatgatgacaaaaataatgacggatacatcgactacgccgagttcgccaagtcactgcaatag

SEQ ID NO: 231154 - DNA, 441 bp, synthetic construct
  misc_feature 1..441: note = Description of Artificial Sequence: Synthetic coding sequence
  source 1..441: mol_type = other DNA
atgaccatgcgtagcctgctgcggactccctttctctgtggtctcttatgggcgttctgtgcccctggtgccagagcagaggaaccagcagcgtctttctctcagcctggtagcatgggcctggataaaaacaccgtgcacgaccaggaacacatcatggaacacctcgaaggtgttattaataagcctgaagcggagatgtcccctcaagagctccagctgcactacttcaagatgcacgattacgacggcaataaccttctagatggcctggagttgtcaacagccatcacacatgttcacaaggaggaaggctctgagcaagcccctcttatgtcagaagacgagttgatcaatatcatcgacggcgttcttcgggacgatgacaaaaataacgatggctacatcgattatgctgaattcgctaaatctctacagtag

SEQ ID NO: 231155 - DNA, 285 bp, synthetic construct
  misc_feature 1..285: note = Description of Artificial Sequence: Synthetic coding sequence
  source 1..285: mol_type = other DNA
atggagcaccttgaaggcgtcatcaacaagcccgaggccgaaatgtcaccacaggagctgcagctccactactttaagatgcatgactacgacgggaacaatcttttggacggactagagttaagcacagccataacgcacgttcacaaagaggagggatccgagcaggctccactaatgtcagaggatgaactcattaacattatagacggtgtgctccgcgatgatgataaaaacaacgatggctacattgattatgccgaatttgctaagtcgcttcagtag

SEQ ID NO: 231156 - DNA, 441 bp, synthetic construct
  misc_feature 1..441: note = Description of Artificial Sequence: Synthetic coding sequence
  source 1..441: mol_type = other DNA
atgactatgcgtagcctcttacgcacacctttcctttgcgggttactttgggccttctgcgctcccggagctagagccgaagagcccgctgcgagcttcagccagcctggatctatgggcctggacaaaaataccgtgcacgatcaggagcacatcatggagcacttagagggtgtgatcaacaaacccgaggccgagatgagcccccaggaactgcagttgcactattttaaaatgcatgactatgacggtaataacctgctggacggcttagaactgagcaccgctatcacccacgtacacaaggaagagggctcagagcaggctccccttatgtcagaagatgaattgataaacatcattgatggagttctgagggatgacgacaagaacaatgacggctacatagattatgcggagttcgccaagtctctgcagtag

SEQ ID NO: 231157 - DNA, 441 bp, synthetic construct
  misc_feature 1..441: note = Description of Artificial Sequence: Synthetic coding sequence
  source 1..441: mol_type = other DNA
atgacgatgcgatcattactgagaacccctttcctgtgcggcctgctgtgggcgttctgcgccccaggcgctcgagccgaagagcccgctgccagcttctcacagccaggcagtatgggactcgataaaaacaccgtgcacgatcaggagcatatcatggagcacctcgagggcgtgattaacaagccggaggccgagatgtcacctcaggaactccagctgcattacttcaagatgcatgattacgacgggaataatctgctcgacgggttggagctgtcaaccgccatcacgcacgttcacaaagaggagggcagtgaacaggcgcctctgatgagtgaagatgaattaatcaacataatcgatggcgttttgagagatgatgacaagaataacgacgggtacatcgattatgctgagttcgcgaagtctcttcaatag

SEQ ID NO: 231158 - DNA, 285 bp, synthetic construct
  misc_feature 1..285: note = Description of Artificial Sequence: Synthetic coding sequence
  source 1..285: mol_type = other DNA
atggagcacctggagggtgtgattaacaaacctgaggctgagatgtcaccccaagaactgcaacttcactatttcaagatgcacgactatgacggcaacaacttgctggatgggctcgagctgtcaaccgccattacccacgttcacaaagaagaagggagtgagcaggctcctctgatgtccgaagacgaactgattaacatcatcgacggggtactcagagatgacgacaaaaataacgatggctatattgactatgccgagttcgcaaagtccctgcaatag

SEQ ID NO: 231159 - DNA, 285 bp, synthetic construct
  misc_feature 1..285: note = Description of Artificial Sequence: Synthetic coding sequence
  source 1..285: mol_type = other DNA
atggagcacttagagggagtgattaacaaacccgaggcagaaatgtcacctcaggagctccagttacattacttcaagatgcacgattatgacgggaacaatctcctggacggcctggaactgagcactgcaatcactcacgtgcataaggaggaaggctcggaacaggcaccactgatgagtgaggatgagctaatcaatatcattgacggggttctgcgagacgatgataagaataacgatggctacatcgattatgccgaattcgcaaagtcgcttcagtag

SEQ ID NO: 231160 - DNA, 441 bp, synthetic construct
  misc_feature 1..441: note = Description of Artificial Sequence: Synthetic coding sequence
  source 1..441: mol_type = other DNA
atgacaatgcgcagcttgttgcgcaccccctttctgtgtggtctgctgtgggcattttgcgcgccaggggctcgggctgaggagcctgccgcttcattttcacagcctggttccatgggtttggacaagaacactgtccacgatcaggagcacattatggaacatttggagggcgttataaataagccagaagctgagatgagccctcaagaactccagctccactactttaagatgcacgactatgacggaaataacctgcttgacggattggagctgagcacagcgatcacacacgtgcataaagaagagggctccgagcaggcacctctgatgtctgaggatgaactgatcaacattatcgacggggttttgagggacgatgacaagaacaatgacgggtacatcgattacgccgagtttgcaaagtcactccagtag

SEQ ID NO: 231161 - DNA, 441 bp, synthetic construct
  misc_feature 1..441: note = Description of Artificial Sequence: Synthetic coding sequence
  source 1..441: mol_type = other DNA
atgaccatgagatctctcctccgcacccctttcttatgtggactgctttgggctttctgcgcgccaggggctcgcgctgaagaaccggctgcatcttttagccagcccggaagcatggggttggacaagaataccgttcatgatcaagaacacatcatggagcacctggagggggtgatcaataagcccgaagccgagatgtcaccccaagagctacaattgcattacttcaagatgcacgattatgacggtaacaacttacttgacgggcttgaactttctactgccatcacacacgtccataaggaagaaggctctgagcaggctcccttgatgtccgaagatgagttaatcaatatcatagatggggtattgcgggatgatgataaaaacaatgacggatatattgattatgctgagttcgcgaagtccttgcagtag

SEQ ID NO: 231162 - DNA, 186 bp, synthetic construct
  misc_feature 1..186: note = Description of Artificial Sequence: Synthetic coding sequence
  source 1..186: mol_type = other DNA
atgactatgcggtccctgctcaggacaccctttttgtgtggcctgctttgggccttttgtgctcccggagcccgagccgaagaacctgccgctagcttctctcagcccggtagcatgggactggacaaaaacaccgtgcacgaccaggaacacattatggagcacctagagggcgtgattaactag

SEQ ID NO: 231163 - DNA, 384 bp, synthetic construct
  misc_feature 1..384: note = Description of Artificial Sequence: Synthetic coding sequence
  source 1..384: mol_type = other DNA
atgctgagcgtgtgctcatgcagaaccagctcaggaatgagatctcagtggccatccgctcggcaacgctcctcctccttgagtacgttccgtcacataatggagcacttagagggagtcattaacaagcccgaagcagagatgagccctcaggaactgcaactgcactacttcaaaatgcatgattacgatgggaataatctgctcgatggtttggagctatccaccgcaataactcacgtccataaggaggagggttccgagcaggctccccttatgtcagaggacgaactgatcaatattatcgacggcgtgctgcgggacgatgacaagaacaacgacggctacatcgactacgccgagttcgccaaatctttacagtag

SEQ ID NO: 231164 - DNA, 3423 bp, synthetic construct
  misc_feature 1..3423: note = Description of Artificial Sequence: Synthetic coding sequence
  source 1..3423: mol_type = other DNA
atggtaatttctttgaactcatgcctaagttttatatgcctcctgctctgccactggattggaaccgcctcacctcttaatctggaggatcccaacgtgtgttctcactgggagagctattccgtgactgttcaggaaagttatccccaccccttcgatcagatctattatacaagctgcacggacattcttaattggttcaagtgtactcgccaccgggtgagttatcggactgcttatcgtcacggtgagaaaacaatgtatcgacggaagtcccagtgttgcccgggattctacgagtccggggaaatgtgcgttccacattgtgcagataaatgcgtccacggtcggtgtatagcacccaatacctgccagtgcgaacctgggtgggggggaaccaattgtagcagcgcctgtgacggagatcactggggcccacactgtaccagtaggtgccagtgcaagaatggcgctttgtgtaatccgatcacaggagcctgccattgcgccgctggatttagagggtggcggtgcgaggaccgctgcgagcaggggacctacggcaatgattgccaccagagatgtcaatgccagaatggcgctacctgcgatcatgttaccggcgaatgccgctgccccccagggtataccggagccttctgcgaagacctgtgtcctccgggaaagcacggtccccaatgcgaacagcgatgtccctgtcagaatggcggagtgtgccatcacgtaacaggagaatgctcttgtccatcaggatggatgggcaccgtctgtgggcagccatgccccgagggccgatttgggaagaactgctcacaggagtgtcagtgtcacaatggtggaacctgtgacgcggcaacaggccagtgccactgttctccaggctatacaggggagaggtgtcaagatgagtgcccagtaggcacatacggggtcctctgcgcagagacttgtcagtgtgtgaacggaggaaaatgctatcacgtttctggcgcatgcctgtgtgaggccggatttgcgggagagaggtgcgaggctagactctgtcctgagggcctttacggaattaagtgcgataagagatgtccgtgccacctcgaaaacacacattcctgtcatcccatgagcggcgagtgcgcatgtaaaccaggttggagtggactgtattgcaatgaaacttgcagccccggtttttacggcgaagcttgccagcaaatctgttcatgtcaaaacggcgctgattgtgactccgtgactgggaaatgtacatgtgccccagggttcaaaggtatcgattgctctaccccctgcccacttgggacctacgggataaactgctcaagtcggtgcggttgtaagaatgacgccgtttgcagccctgttgacggctcttgtacttgcaaagctggatggcatggcgtggactgctccataagatgtcccagcggtacatggggattcgggtgcaatctcacttgtcaatgcctaaatgggggagcgtgcaacaccttagacggcacatgcacgtgcgcacctggctggagaggcgagaagtgcgagctcccctgccaggacggcacctacggcctcaattgcgctgagcgttgcgattgctctcacgctgatggctgccatcccaccacaggccattgtagatgcctcccagggtggtccggtgtgcactgcgatagtgtgtgcgctgaagggagatggggacccaactgctctctcccctgctactgtaaaaatggcgcatcttgttcccccgatgatggaatctgtgagtgcgcgccaggcttccggggtacgacttgccagcgcatttgctctcctggattctacggtcaccgatgctcacaaacctgcccccaatgcgttcactcatctggcccttgccaccacataactggcctctgtgattgtctccccggattcaccggcgctctctgtaacgaggtttgcccctccggcagattcgggaagaactgcgctgggatttgtacatgtactaacaatggaacatgcaatcctattgacagaagctgtcagtgttacccgggatggattggtagtgattgctcccagccctgccctcctgctcattgggggcctaactgcattcacacatgcaattgtcataatggcgcattctgttcagcatatgacggtgagtgcaagtgtactcctggttggacaggtctctactgtactcagagatgccccctcggcttctatggcaaggattgtgccctgatctgtcagtgccagaatggtgcagactgcgatcacatctccggccagtgcacgtgccggacaggatttatggggaggcactgcgaacagaaatgtccctcagggacatacgggtatggatgtcggcagatctgcgactgcttgaacaactcgacctgcgaccacatcaccggaacttgttattgttcaccaggctggaaaggcgcaagatgcgatcaggcaggcgtgatcattgtgggcaacctaaattcgctgtcccgaaccagcacagccctccccgcagatagctaccagattggggcaatcgccggtataattatcctcgtgctggtcgtcctcttcctgttagcactgtttattatttaccgacataaacagaagggcaaagaatcctctatgcctgccgttacctatactccagctatgcgggtggtgaatgcagactataccataagcggaacgctcccccacagcaacggaggcaatgcgaattctcactattttaccaacccctcatatcatacgttgacacagtgcgctacctccccgcacgttaacaacagggatcggatgactgtaaccaagtcgaagaacaaccaactgttcgtcaatctaaaaaacgtgaatccgggtaagagagggcctgtcggtgactgcaccgggactctgcctgccgactggaagcatggcggttacttgaacgagttgggcgctttcggactagaccggagttacatggggaaaagtctgaaagacctaggaaaaaatagtgaatacaacagcagcaactgcagtttaagctctagcgagaatccatacgctacaattaaagatccgcctgtcttaatacctaaaagtagcgaatgtggatatgtcgaaatgaagtctccagcacgcagagattcgccctacgccgagataaataacagcacaagcgccaatcgtaatgtctacgaagtcgagccaacggtgagtgtggtgcagggcgtcttcagtaacaacggaaggctatcacaggacccgtacgatctgcccaagaattctcacatcccttgccactacgatcttctgcctgttagagattccagctcttcccccaagcaagaagatagcggaggctcatcgtccaattcgtcctcctcctccgaatag

SEQ ID NO: 231165 - DNA, 1704 bp, synthetic construct
  misc_feature 1..1704: note = Description of Artificial Sequence: Synthetic coding sequence
  source 1..1704: mol_type = other DNA
atggtcatcagcctcaattcttgtctgtcgttcatttgcttattgctttgtcactggatcggtaccgcttctccactgaatctggaagaccctaacgtctgttcacactgggaatcatattccgttacagtgcaggagtcttacccacacccctttgatcagatctactatacaagttgcacagacatcctgaattggttcaaatgtacaaggcaccgcgtctcttatcgcaccgcataccggcacggagaaaaaacaatgtaccggaggaaatcccagtgctgtccaggcttttacgagagcggggaaatgtgtgtcccacactgtgccgacaagtgcgttcatggcagatgcatcgctcccaacacatgtcagtgtgagcctggatggggcggaacgaactgcagctccgcctgcgacggggatcattgggggccacactgcacctcgcgctgccaatgtaaaaatggtgcactctgcaacccaataacaggcgcttgccattgtgctgctgggttcagagggtggcgttgtgaggaccgatgcgagcagggaacctacggaaatgactgtcatcaacgatgtcagtgtcagaatggagccacatgcgaccacgtgacaggagagtgcaggtgtcctcccggttacactggggctttttgcgaggatctatgcccccctggaaaacacggtccgcagtgtgagcagcgttgtccatgccagaatggcggtgtctgtcatcacgtcactggcgagtgttcttgtccctccggttggatggggaccgtctgtggtcagccttgccccgaagggaggttcggtaagaactgttcgcaggagtgtcagtgccataacgggggtacctgtgacgctgctactggacaatgtcactgcagccctggctataccggtgagagatgtcaggatgaatgccctgtgggcacttacggagttctgtgcgccgaaacctgtcagtgcgtgaatggagggaagtgctatcatgtgtcgggggcttgcctgtgtgaggccggatttgcgggtgagagatgcgaagcccgtctctgcccggagggcctgtacgggatcaaatgtgataagaggtgtccatgccatctggaaaacacgcacagttgccatcctatgtccggcgagtgtgcatgcaaaccagggtggtccggactgtattgcaatgaaacttgctcacccggattctatggggaggcttgccagcagatttgcagctgtcagaacggggctgattgtgactccgtgacaggtaaatgtacgtgtgcaccgggattcaaagggatcgattgctctacaccatgtccactcggaacttatggaatcaattgttccagcaggtgcgggtgtaaaaatgatgccgtgtgctctccagtggatggctcttgtacctgcaaagccggttggcacggagttgactgctccattaggtgcccttccggaacttggggctttggctgcaatctgacgtgccagtgcctcaatggcggtgcttgcaacactctcgatggaacttgtacctgtgccccaggatggcgcggtgaaaagtgcgaactcccctgtcaagacgggacttacggtctcaactgcgccgagaggtgtgattgctcccacgccgatggatgtcatcccacaactgggcattgtagatgcctgccagggtggagtggcttgttctag

SEQ ID NO: 231166 - DNA, 3423 bp, synthetic construct
  misc_feature 1..3423: note = Description of Artificial Sequence: Synthetic coding sequence
  source 1..3423: mol_type = other DNA
atggtaatttctctgaactcatgtctgagttttatttgcctcctgctgtgccactggattggcacggctagccctttgaacttggaagacccgaatgtgtgctctcactgggagtcgtactcagtaacagtacaagagagttatccgcatccttttgaccaaatttactacacctcgtgtacagatattctgaactggtttaagtgcacacggcatcgggtttcatacaggaccgcatatcggcacggcgaaaagacaatgtacaggagaaagagccaatgctgtcccggtttctatgagtccggcgagatgtgcgtgccacattgtgctgacaagtgcgtccatgggagatgcattgccccaaatacatgtcagtgtgaacctggatgggggggaactaattgtagctctgcatgcgatggggatcattggggcccacactgcacttcccggtgccagtgcaagaacggcgctctctgcaaccccattacaggtgcttgtcactgcgccgctggttttaggggctggagatgcgaggaccggtgcgaacagggaacctacggaaacgactgccatcagaggtgccagtgtcagaacggtgccacctgtgatcatgtcaccggcgaatgcagatgccctccaggctatactggggcattttgtgaggacttgtgcccaccagggaagcatgggccacagtgcgagcaaaggtgtccatgccagaatgggggagtctgtcaccacgtgacgggcgaatgctcttgtccaagcggttggatgggcacagtttgcgggcagccttgccccgaggggcgattcgggaagaattgctcgcaggagtgtcaatgtcataacggaggcacttgtgatgcagccacaggccaatgccattgttcaccgggatatactggcgaaagatgccaagacgaatgtccagttggtacctacggcgtgttgtgtgcagaaacttgtcaatgtgttaacgggggaaagtgctatcacgtctccggagcgtgtctctgtgaggcaggctttgcaggagagcggtgcgaagccaggctttgtcccgaagggctatatggcatcaaatgcgataagcggtgtccttgtcaccttgaaaatacccactcctgtcaccccatgagtggggaatgtgcctgcaagccagggtggtcaggtttatattgtaatgaaacctgctcaccaggattctatggagaggcttgtcagcagatttgctcatgccagaacggagcagattgtgattctgtaacaggcaagtgtacttgcgctccagggttcaagggaatcgattgttccaccccgtgcccactgggcacttacggaatcaactgctcatccaggtgcggctgcaagaatgatgcagtgtgctcaccagtagacgggtcttgtacctgcaaagctggatggcacggcgtggactgtagtatacgctgcccctcaggtacctggggcttcggatgtaacctgacctgtcagtgtctcaacggtggagcatgcaataccttggacggcacatgcacttgtgcccctgggtggcgcggagaaaaatgcgagctgccgtgtcaggatggcacatatgggcttaattgtgcggagagatgcgactgcagtcatgctgacggatgtcatcccaccacagggcattgtaggtgcctccctggctggtccggtgtgcactgcgacagcgtgtgtgctgaaggtcgatggggacctaactgtagcctgccgtgctattgcaaaaatggcgcttcttgtagccctgatgatggaatctgcgagtgtgctcccggttttagggggaccacatgtcagcgtatctgcagtccgggtttctatggacaccgctgtagccagacttgcccacagtgcgtacatagctcagggccatgtcatcatattaccggactgtgcgattgtcttcctggttttactggtgccctatgtaacgaggtgtgtccctctggacgcttcggaaagaattgtgccggaatctgcacatgtaccaataacggaacttgcaaccccatcgatagatcctgccaatgctaccccggttggatcggttctgactgttcccagccttgccctccagcccactggggcccaaattgtattcacacctgcaattgtcataatggtgctttctgctctgcatatgacggcgaatgtaaatgcactccgggttggacaggactgtactgcacacaacgatgtccactcggattctatggtaaagattgcgcactgatttgccagtgccagaatggcgcagactgtgatcacatcagtggccagtgcacttgcagaacaggatttatgggacgtcattgcgagcagaaatgtcctagcggaacatacgggtacgggtgtcggcagatatgcgattgcctgaacaatagtacgtgcgatcacattaccggcacatgttattgctcccctgggtggaagggcgcacgctgcgatcaggcaggcgtcatcatagttggcaatctcaattccctgagtcgcaccagcacggccttgcccgcagacagctatcagattggcgctattgcaggcatcatcatcctggtactggtagtcttgttcttgctggccctatttattatttacaggcataaacaaaagggcaaagaatcatctatgcctgccgtcacctacactccggctatgagggtcgtgaacgctgattatacaatatcgggtacccttcctcatagcaatggcggtaatgcgaattctcactacttcactaatccatcttaccacaccttgacccaatgtgccacgagtcctcacgttaataaccgcgataggatgactgttactaagagcaagaacaatcagttgttcgttaatcttaaaaatgtcaatcccggaaaaaggggcccagtgggcgattgtactgggacgctgccagcagactggaagcatggcggttaccttaacgaactgggcgcattcggactggatcggagctatatgggcaagtctctgaaagacctgggcaaaaatagcgagtataacagttctaattgcagtttatcaagctctgaaaatccatatgccacaatcaaggacccccctgttctgattcccaagtcttctgaatgtggatacgtggagatgaagagccccgctcgacgggattctccgtacgctgagattaataactccacttctgccaaccgtaacgtgtacgaagtggagccgactgtgtccgtcgtgcagggggtgttttctaacaatgggagactgtcccaggatccctatgaccttcctaagaactcccatatcccgtgccattatgacctactacccgtgcgggacagctcttcttcacctaaacaagaggattccggtggcagttctagcaactcttcaagtagcagtgaatag

SEQ ID NO: 231167 - DNA, 2910 bp, synthetic construct
  misc_feature 1..2910: note = Description of Artificial Sequence: Synthetic coding sequence
  source 1..2910: mol_type = other DNA
atgcacacgccttctatcagatcgatcacccatgacgcacaaacctcttcaaccggcagttccgcccctggtaccgcactgtgcactgaagagtgtgtccacggacggtgtgttagccccgatacatgtcactgtgagccgggatggggaggcccagactgctcatccggatgtgacagcgatcactggggcccacactgcagtaacagatgtcagtgtcagaatggagcattgtgtaacccgattaccggagcgtgtgtgtgcgctgcgggattccgcggatggcgctgcgaggaactctgtgcccctggaacccacggaaagggctgccagttgccttgtcagtgccgccatggcgcaagttgtgaccctcgcgctggcgaatgtctgtgcgccccaggctataccggcgtctattgcgaagaattgtgtcctcccggtagccatggagcccactgcgagctacgctgcccttgtcagaatggaggcacctgccaccatatcactggagagtgtgcctgtccccctggatggaccggggctgtctgcgcccagccatgtccaccgggaacatttggtcagaattgttcccaggattgcccctgtcaccatggtggccagtgcgaccatgtcacaggccagtgccactgtaccgccggttacatgggcgataggtgccaggaggagtgcccatttggctccttcggctttcagtgctcccagcactgcgactgtcacaacggagggcagtgcagtccaactactggggcttgtgaatgcgaaccaggctacaaaggcccacgatgccaagagaggctgtgcccggagggtttgcacgggccagggtgcacactcccgtgtccttgcgacgctgacaatacgataagctgccaccccgttacaggggcatgtacatgtcaacccggatggagtggccaccattgtaatgagtcatgccctgttggctattatggtgatggctgtcagctgccctgtacatgccaaaacggggctgactgccattccatcacaggcggatgtacttgcgcacctgggttcatgggggaagtttgtgcagtgtcctgtgctgcaggcacttacggtccaaattgcagcagcatttgtagttgcaacaacggtggaacttgttcacccgtcgatggctcctgtacatgtaaagagggatggcaggggctggactgcacgctgccatgcccgagtgggacctgggggctcaattgcaatgaatcttgcacttgcgccaacggggctgcctgttctcccatcgacgggtcatgtagctgtacaccgggatggttgggagatacatgtgagctgccttgtccagatggcacgtttgggctgaattgctctgagcactgcgactgctcccacgctgatggctgtgaccccgtgacaggacattgttgttgcctcgccggatggacaggcatccgctgtgattccacatgtcctcctgggcgatggggccctaattgttctgtgtcttgttcatgcgagaatggtgggtcctgctctccagaagacggaagctgcgaatgtgccccaggtttccggggacccctgtgccagcgcatctgtcccccaggattctatggacatggttgtgcacaaccatgcccactctgcgtgcattcttcacggccttgtcaccatattagcggcatctgcgaatgcttgcccggtttctccggcgcactgtgtaaccaggtctgtgcaggcggttacttcggacaggattgtgcccagctgtgttcctgtgctaacaacgggacctgttcccctatcgatggctcctgccaatgcttcccaggttggatcgggaaggattgctcccaggcatgtccccctggattttggggccctgcatgctttcacgcatgcagctgtcacaatggagccagttgttctgctgaagatggagcatgccattgtacgccgggatggactggtcttttctgtacccagcggtgccccgctgccttctttggtaaagattgtggccgagtgtgtcagtgccaaaatggggcttcttgtgaccacatatctggtaagtgtacatgcagaacaggtttcacaggtcagcattgtgaacagagatgcgctcccggaaccttcggttatgggtgccagcagttatgtgaatgtatgaacaatagcacctgcgatcatgtgacagggacctgctattgtagccccggatttaaggggatacgatgcgatcaagccgctctaatgatggaggaactcaatccttataccaaaataagtccagccctcggagctgaaaggcactcagtaggtgccgttactggcatcatgctgctcctgttcctgatcgtggttctgctcgggctatttgcctggcaccggaggaggcaaaaggagaaaggtcgcgacctcgccccacgagtcagctacacacccgctatgaggatgacgtccacggactattcactatccggggcttgcggtatggatagacggcaaaatacatacatcatggacaaggggttcaaagattacatgaaagagagtgtctgcagctcctcaacttgctctctcaacagcagtgagaatccctacgctaccattaaggatcccccaatcctgacttgcaaactcccagaatcttcctacgtcgaaatgaaaagccctgtccacatgggttctccatatacagacgtccccagtctttccacatctaacaaaaatatttatgaggtagagcctaccgtttcggtggtacaggagggatgtggccacaacagctcctacatacaaaacgcatacgatctgccacgaaatagtcacattcctggacactacgatcttttgccagtgcggcagtcccctgctaatggcccttcgcaggacaagcaaagctag

SEQ ID NO: 231168 - DNA, 2628 bp, synthetic construct
  misc_feature 1..2628: note = Description of Artificial Sequence: Synthetic coding sequence
  source 1..2628: mol_type = other DNA
atggtgctgagccttactgggctcattgcgttttcatttctgcaagctaccctggcattgaatcccgaggatccaaatgtctgctctcattgggaatcatatgccgtaacagttcaggagtcctacgcccaccctttcgaccagatttattatacccgatgtactgatattctcaattggttcaaatgcacacgccaccgaatttcttacaaaactgcttaccggagaggcctcaggactatgtatagacgcaggagtcagtgttgtccgggatattacgagtccggggatttttgcatccccctctgcacggaagaatgtgtccacggtagatgtgtctcccctgatacatgtcactgcgaaccgggatggggtgggcctgattgcagctcaggttgcgacagcgaccactgggggccacattgctccaacagatgccagtgtcagaacggcgcactgtgcaatcctataacaggggcttgcgtatgcgccgctggcttcagggggtggcgttgcgaagagctctgcgctccaggaacccacggaaagggttgccagcttccttgccagtgtagacatggcgctagttgtgacccacgagcgggagaatgcctctgcgcgccaggatacacaggcgtgtactgtgaggagttgtgccccccaggatctcacggagctcactgcgagctacgctgcccctgccagaatggaggcacttgtcaccatattaccggagagtgcgcgtgccccccaggctggactggagcagtatgcgcacagccttgcccaccagggactttcggtcaaaattgttctcaggattgcccatgccaccacggaggccagtgtgaccatgtaacagggcaatgccattgcaccgcagggtacatgggcgatagatgtcaggaggaatgccccttcgggtcattcggttttcagtgtagccaacattgcgactgccacaatggcggacagtgctcgcccacaactggtgcttgtgagtgcgaacctggatataagggccctcgttgccaggagcgcctgtgtccagaggggctgcatggtcccggatgtacattaccatgtccctgcgatgccgacaatactatttcttgccacccggtgacaggcgcttgcacgtgccagccaggatggagtggccatcactgcaacgagtcctgccctgtcggctattacggagatggctgtcagctcccctgcacgtgccagaatggagccgattgccacagcataacagggggttgtacatgcgccccagggttcatgggggaggtgtgtgcagttagctgtgcagcaggtacctatgggcctaactgcagttctatctgcagttgcaacaacggcggaacttgctcacccgtggatggatcctgtacttgtaaggaagggtggcagggactggattgtacactcccctgcccatccggaacatggggactaaattgcaatgaatcctgcacttgcgcaaatggcgctgcctgcagtccaatcgacggcagctgtagctgcactccaggatggcttggggatacctgtgagctgccttgtccagacggcacattcggcctgaactgctccgaacactgtgactgtagccacgcggacggatgtgatcccgtcactggccattgttgctgtctggccggatggactggaatcaggtgcgactctacttgtccgcctgggaggtggggtcccaactgtagcgtttcctgttcctgtgaaaatggcggttcctgctcccctgaggacgggtcctgcgagtgtgcccctgggttcaggggtcccctttgtcagcgcatctgtcctccaggtttttatggacatggttgcgcccagccatgtccgctttgtgtacactcttctcgcccatgtcatcacatatctggaatctgtgagtgcctccccggattcagcggggcactctgcaatcaggtctgtgccggaggatactttggtcaggactgtgcccagctgtgctcctgcgccaataacggaacctgttctccaattgatggaagctgtcaatgcttcccaggctggatcggaaaggactgctcacaagcttgccctcccggattttggggcccagcttgctttcacgcctgttcctgccacaacggtgcatcttgttccgccgaagatggagcctgtcattgcaccccaggctggaccggccttttctgcacgcagagaaagccgcacttgctcgcctcgcaaccactgcgtatcccatgctgcggactcctcgctacagtgggcatcgtacaaacttcgcgcgagggtggaatgcaggccgctcctggactggtggtgcctgattcctgtcctacccgcaccgaggagctctgtagagggtccagcaggcctgattggatccagggaatcgacaaacccaaggtccttgaaggccagggctgtaaggctgcgcagcagcactttctgggaaggacagtaggcgcatacgcctcagtgcggatggctcctgccgtcaccacctctgtggcttccgcccctgcagcccaggcttctcccggaaacaccgtgagccgggacgtgccacaggagccgttggccatgggagtttcctcttatgtgtcagcatag

SEQ ID NO: 231169 - DNA, 414 bp, synthetic construct
  misc_feature 1..414: note = Description of Artificial Sequence: Synthetic coding sequence
  source 1..414: mol_type = other DNA
atgatggaggagctcaatccatatacgaagatctcccccgctctgggagcagagcgccattccgtcggagctgtgacaggcattatgctgctgctgttcctgatcgtggtgctgcttggtctgtttgcgtggcacagacgtcgccagaaggagaaaggcagagacctggctccgcgagtgtcctacacacctgccatgaggatgacctccaccgattattccctttccgcctccaccactccgtggtggccggttatggaacatttggccaggccattttctcaacgtcctcgaacccaattaagtaataaaagtctcgacagagataccgcagggtggacaccatacagctacgtgaatgtgttagaccagtgtcccggaggccaagttcctgctagaggcctcctgcactag

SEQ ID NO: 231170 - DNA, 2910 bp, synthetic construct
  misc_feature 1..2910: note = Description of Artificial Sequence: Synthetic coding sequence
  source 1..2910: mol_type = other DNA
atgcacaccccttccattagatccatcactcatgacgcacagacatccagcaccggctccagcgccccagggacagcactttgcacggaggagtgcgtccatggcagatgcgtgtccccagatacctgtcactgcgaacccggatggggcggtccagattgctcttctggatgtgactcggaccactggggacctcattgctccaaccgatgtcaatgccagaatggagccctgtgcaatccaattactggcgcttgtgtctgtgcagccggattccgcggttggcggtgtgaagaactgtgtgccccaggcacccatggcaaaggatgtcagctgccctgccagtgcagacacggtgcatcttgcgacccacgtgctggggagtgcttatgcgctccaggatacacaggcgtgtactgcgaggagctgtgcccccctggatcccatggagcgcactgtgaactgcgttgcccctgtcagaacgggggtacctgccaccacattaccggcgagtgtgcatgcccaccaggttggaccggggctgtgtgcgctcagccttgcccccctggtacattcggccagaattgctcccaggactgtccctgtcaccatgggggacaatgtgaccatgttactggtcaatgtcattgtacagccggttatatgggcgacaggtgccaagaagagtgtcctttcggctcctttgggttccagtgctcccaacactgcgactgccataacggcggacagtgtagtccaacgacaggagcctgcgaatgtgaacccggatataaaggcccaaggtgccaggaacgcctctgcccagaaggcctccatgggcctggatgtactttgccttgtccctgcgacgccgacaatactatcagctgtcatcccgtgaccggcgcttgcacttgtcaaccaggctggtccgggcaccactgcaatgagtcgtgcccagtggggtattacggggacggatgtcagttgccctgtacctgtcagaacggagcagactgccactccataaccggcggatgcacctgtgcgcctgggttcatgggagaggtctgtgccgtgagctgcgccgctggtacgtacggccctaattgcagcagtatctgtagttgcaataacggcggtacctgcagtccggttgacggttcttgtacctgtaaggagggatggcagggattggattgtactttaccctgcccctcgggcacctggggactgaattgcaacgagagctgcacctgtgctaacggcgctgcctgctcacccatcgacggctcatgctcctgtaccccaggttggctgggggacacctgcgagctgccttgcccagacggaacatttggacttaactgttccgaacactgtgattgttctcacgcagacgggtgtgaccctgtcacaggacactgttgttgcctggccggttggactggcattagatgtgactctacttgtcctcctggtcgatgggggcctaactgcagtgtgagttgttcctgcgaaaacggcggaagctgctctccggaggacggatcgtgcgagtgtgcgccaggtttcagggggcctctgtgccaacgcatctgccctcctggcttctacgggcacggctgtgctcagccatgtcccctgtgtgtgcatagttctagaccatgccaccatatcagtggaatatgcgagtgtctacccggattttcgggagctctttgtaaccaggtttgcgccggaggatactttggccaggattgtgctcaactgtgtagctgcgcaaacaatggcacatgttcccccatagacggcagctgccagtgctttccaggatggatagggaaggactgctctcaggcttgtcctcccggattctgggggcctgcatgcttccacgcatgcagctgtcataatggggcatcttgttcggccgaggacggtgcctgccactgtacaccgggatggacaggtctgttctgtactcagagatgccccgcagctttcttcggcaaggactgtggacgtgtctgtcagtgccagaatggcgcttcttgcgatcacatttcaggcaagtgtacttgccgcacaggcttcaccggccagcattgtgaacagagatgcgcacctggaacttttggatacggttgtcaacagctttgtgagtgcatgaataattcaacttgtgaccacgtcacagggacctgttattgttccccagggttcaaagggattagatgcgaccaggctgctctgatgatggaagagctaaatccatatacgaagatcagtcccgcactgggggctgagaggcactccgttggcgcagttacagggatcatgctgctcctgttcttgatagttgtgctcctgggtctgttcgcatggcaccggagacgtcagaaggagaagggcagagacctggccccaagggtaagctacactcctgccatgagaatgactagcaccgattattccctcagtggcgcatgtgggatggacaggagacagaatacgtacattatggacaaaggattcaaggattacatgaaagagagcgtttgcagttcttcaacgtgtagtctgaactcctccgaaaacccatatgccacgattaaggacccccctattctcacctgtaagttgccagaatcgtcctatgtggaaatgaagtccccagtgcacatggggtccccgtatacggatgtgccatcattgagcacaagtaataaaaacatctatgaggtggagcctactgtgagtgtggtccaagaggggtgtggccataatagctcatacattcagaacgcctatgatcttcccagaaattctcatatacctggtcattacgacctgctccctgtgagacagagtcctgcgaatggacctagtcaggacaagcagagttag

SEQ ID NO: 231171 - DNA, 3135 bp, synthetic construct
  misc_feature 1..3135: note = Description of Artificial Sequence: Synthetic coding sequence
  source 1..3135: mol_type = other DNA
atggtactaagtctcactggcctgattgccttctcttttctgcaggccactttggccctgaaccctgaggatccaaacgtttgtagccactgggagagctacgcggtcaccgtgcaagagtcctacgcacatcccttcgatcagatctactatacacgctgtaccgatatccttaactggtttaagtgcactcgccatcgcataagttataaaaccgcttatagaaggggcctcagaacaatgtacaggaggaggtctcagtgctgtcccggttattacgagagcggggacttttgcattccactgtgtaccgaggagtgcgtccacggccgttgtgtgagcccggatacgtgtcattgcgaaccaggatggggcggaccagactgctcatctggatgcgattcagaccattggggaccccactgttccaatcgatgtcagtgccagaacggggctttatgtaatcctattacgggggcatgtgtttgtgccgctggatttaggggttggcgatgcgaggaactctgcgcaccaggaacgcacgggaaaggttgccagctcccatgtcagtgtaggcatggagcttcatgtgaccctcgggctggggaatgtctctgtgcacccggatacaccggcgtttattgtgaggaactgtgcccacccggttcccacggcgctcactgtgagctgagatgtccatgccaaaatggcggtacgtgccaccatatcactggcgaatgtgcatgtcccccaggttggacgggcgctgtctgtgcacaaccctgtcctcccggaacattcggccaaaactgctctcaagactgcccgtgtcaccacggcggtcaatgtgaccacgtaactgggcagtgccactgtacagccggttacatgggcgatcgctgtcaggaagaatgcccattcggtagttttggctttcaatgctcccaacattgcgactgccataacggaggccagtgctcccctacaacaggagcttgcgagtgtgagcccggttacaaaggaccgagatgtcaggaaaggctctgtcccgagggccttcatgggcctggatgcacactaccgtgcccttgcgacgctgataataccatcagctgtcatcccgtgactggcgcttgtacttgccaacccggttggagcggccatcattgtaacgaaagctgtccggtcgggtactatggcgacggatgtcagctcccatgcacatgccagaacggagcggactgccattccatcaccggagggtgtacatgcgcccctggctttatgggcgaagtttgtgcagtaagctgcgccgctggcacctacgggccaaactgtagctctatctgctcctgcaataacggagggacgtgtagtcccgtagacggctcttgcacatgtaaagagggttggcagggtctggattgcaccctgccttgtccatctggcacttgggggctgaactgtaacgaatcttgtacatgcgccaatggggcagcttgctccccgatcgacggttcctgttcctgcacaccaggttggctcggtgacacctgtgagcttccgtgtcccgatggtacttttggcctgaactgctccgagcactgcgattgttcacacgctgacgggtgtgatccagtcactggccattgctgctgtttggctggttggacaggcataagatgcgattctacctgcccaccaggacgttggggcccaaactgttccgtgtcatgcagctgcgagaatggtggaagctgttcacctgaagatggatcttgtgagtgtgccccaggctttcgaggaccgctgtgtcagaggatctgcccgccagggttctacggccatgggtgtgcacaaccttgtcccctgtgcgttcactccagccggccttgccatcatatcagcggcatttgcgagtgcctccctggatttagtggagcactctgtaatcaggtctgcgccggaggttacttcggacaggattgtgctcaactgtgtagttgcgccaacaatggaacatgctcccctattgatggctcttgccagtgctttcccggttggattggaaaggactgcagtcaggcttgccccccaggcttctgggggcctgcatgtttccacgcttgctcatgccacaatggcgcttcatgtagcgccgaagacggcgcttgccactgcacgcctgggtggaccggacttttttgtacccaaagatgcccagcggcattctttggaaaagattgcggccgagtctgtcagtgccagaatggcgcaagctgcgaccatatttccggaaaatgtacctgtcgtacaggcttcaccggacaacattgcgaacaacggtgcgcgccaggcacattcggatacgggtgtcagcagctctgtgagtgcatgaataattcaacttgtgatcatgttaccggtacctgttattgctcgcccggtttcaagggaatccggtgtgatcaagctgcattgatgatggaggagctgaacccctacacaaagatttcaccggcactgggcgcagaacgccacagcgtgggagccgtgacgggcatcatgctcctcctctttctcatcgtggtgttactgggccttttcgcctggcacagaagaaggcagaaagagaaggggagagacctggcaccgagggttagctacactcctgcgatgcgaatgacctctactgattattccctgtccggcgcatgtgggatggatcgcagacagaacacttacattatggacaaaggattcaaggattatatgaaagaatcagtgtgtagcagctctacttgttccctcaatagttccgagaacccatatgccactattaaagatcccccaatcctcacctgcaaactccccgagagttcatatgtcgaaatgaagagccctgtgcatatgggcagcccctacactgacgtgccctctctgagcacctccaacaagaatatctatgaagtggagccgaccgtgtccgtggtgcaggaaggatgcggccataactcatcatatatacagaacgcctacgaccttcctcgcaacagtcatatccctgggcattacgatttgttgccggtgcgccagagtcccgctaacggaccctcccaggacaagcagtcttag

SEQ ID NO: 231172 - DNA, 3135 bp, synthetic construct
  misc_feature 1..3135: note = Description of Artificial Sequence: Synthetic coding sequence
  source 1..3135: mol_type = other DNA
atggtgctatccctgaccggccttatcgcctttagttttttgcaggctaccttggccttgaaccctgaggaccctaatgtatgttcccattgggagtcttacgccgtgacagtccaagagtcctacgctcaccctttcgaccaaatctattacactcgctgtacagacattctaaactggtttaagtgcacacgccatcggattagttacaagaccgcctatcgtcggggattgcgaaccatgtacaggagacgctcacagtgttgtcccggatactacgaatccggagacttctgtattccgctgtgcactgaggagtgcgtccatggaagatgtgtgtctcccgatacctgccactgtgaaccgggttgggggggaccagattgttcatccgggtgcgacagtgaccactggggccctcactgcagcaatagatgtcagtgtcagaatggggcactgtgtaaccccatcacaggggcttgcgtgtgcgccgctggcttcagaggatggagatgtgaagagttgtgcgcaccagggacacacggaaagggctgccagctcccttgccaatgtcgccacggagcgtcctgcgatcctcgcgctggagaatgtttgtgtgctccaggatacacgggtgtttactgtgaggagctgtgcccccctggcagccacggagctcactgcgagctgaggtgtccctgtcaaaatgggggtacctgtcatcacatcacaggcgagtgcgcttgccccccagggtggacaggcgctgtctgtgcccagccttgtccaccgggaacattcgggcagaactgctctcaggattgcccatgtcaccatgggggacagtgcgaccatgtcacagggcagtgccactgcacagccggttatatgggcgataggtgtcaggaggaatgtccgtttgggagcttcggatttcagtgcagccagcattgcgactgtcataacggtgggcagtgcagcccaaccacaggagcctgcgagtgtgaacccggatacaaaggcccacgctgtcaggagcggttgtgcccagagggcctgcatggacccggatgtacgctgccctgcccgtgcgatgcagacaatacaattagttgccaccctgtcacaggcgcatgtacttgccagcccggatggagcggacaccactgtaatgaatcttgtcccgtgggttattacggggacggctgccagctcccatgcacttgccagaatggtgctgattgccatagcattacagggggatgtacctgcgctcccggattcatgggggaggtctgcgctgtttcatgcgctgctggtacttatgggccaaattgcagctccatctgctcttgtaataacggcggaacgtgctctcctgtcgatggctcctgtacatgcaaagaaggatggcaggggctggattgtacactgccttgtccatctgggacttggggcttgaattgtaatgaatcctgtacatgtgccaacggtgccgcatgctcccccatagatgggagttgctcctgcactcctggttggctgggggatacatgtgagttgccctgccccgatgggacatttggtttgaactgttccgagcattgtgactgctctcatgcagatggctgcgatcccgtgacgggccattgctgttgcctggcaggatggaccgggataagatgtgatagcacctgcccacccggtcgctggggacctaactgctctgtcagttgttcctgcgaaaatggcggttcttgctcccctgaagatggatcttgtgaatgtgccccaggtttccgaggcccactttgtcagcggatctgccccccaggcttttatggccacggttgtgcccagccatgtcctctgtgtgtgcacagctctcggccatgtcaccatatcagtggtatttgtgaatgtttgcctggattctctggagccttgtgtaaccaagtgtgtgctgggggttatttcggacaagactgcgcccagctgtgctcctgcgcaaacaacggtacgtgttctcctatagacggaagttgccaatgttttcctggctggatcggaaaggattgctctcaggcctgtccacccggattctgggggcctgcgtgctttcatgcctgttcctgccataatggggcttcctgtagcgctgaggacggtgcttgtcattgcacacccggttggaccggcctattttgcacacagagatgccccgcagcgttcttcggaaaggattgtggcagggtctgtcagtgtcaaaatggggctagctgcgaccacatcagcggcaaatgtacctgccgaacaggatttacgggtcagcactgcgaacagaggtgtgctccagggaccttcggctatggctgccagcagttatgtgagtgcatgaacaactctacctgtgaccacgtaaccggcacatgttactgctcacccggatttaaaggaattaggtgtgatcaggcggctctgatgatggaggagctgaatccatatacaaaaattagccctgctctcggggcagaaagacactcagttggcgctgtgacaggaataatgctgctcttgttcctgatcgtggtgctcctgggactctttgcttggcatcgcaggcggcaaaaggagaagggacgagacctcgctccacgcgtatcttacacacctgcaatgcgaatgacctccacggattactctttgtctggagcctgcgggatggatcgtcgccagaacacttatatcatggacaagggtttcaaagattatatgaaagagtccgtgtgttccagtagcacatgttccttaaactcctcggagaacccatacgcaaccatcaaggacccacctatcttaacatgtaaactccccgaaagttcatacgtcgagatgaaatcgccagtacatatgggatcaccctacacagatgtcccgtccctgagcacctcaaataagaacatatacgaggttgagccgacagtgagcgtggtacaggaggggtgcggtcataacagtagctacattcagaatgcttatgacctgcccaggaactcccacattcctggccactatgatctcttgccagtcagacagtctcctgcaaacggcccatctcaggataaacaaagctag

SEQ ID NO: 231173 - DNA, 3690 bp, synthetic construct
  misc_feature 1..3690: note = Description of Artificial Sequence: Synthetic coding sequence
  source 1..3690: mol_type = other DNA
atgggggctagtagagacaggggactggcagcactgtggtgccttggactgctgggcggactagcacgcgttgccggtacacactatcgctacctctggaggggctgctacccctgtcatctgggacaggccggttaccccgttagcgctggagaccagagaccagatgtggacgaatgtcgtactcacaatggaggctgtcagcatagatgcgttaatacccccggtagttatctgtgcgagtgcaaacccggatttagattgcacacggactcaagaacttgcctggccatcaactcttgcgccctcggcaacggtggttgccagcatcattgcgtccaactgacaattactagacatcgatgccagtgtcgccctggtttccagctgcaggaggacggaagacattgcgtgagacgcagtccctgcgccaacagaaatggatcctgtatgcatcggtgccaagttgtgcggggacttgctcgatgtgagtgccacgtggggtaccaacttgcagcagatggcaaggcctgcgaggacgtggatgagtgcgccgcagggctcgcacaatgcgcacacggatgtctaaacactcaggggtcgttcaagtgcgtctgccacgccggttatgagctcggtgctgacgggaggcagtgctatcgaatcgagatggagatcgtaaatagttgtgaagccaacaatggcggttgttcgcacggatgttcgcatacgtctgctggacctctgtgcacgtgtcctcggggatacgagctggacaccgaccaacgcacatgcatagatgtggatgattgcgctgatagcccgtgctgtcaacaggtgtgcacgaacaacccaggcggatatgagtgcggctgttacgccggttacagattgagcgctgacggctgtggatgtgaagatgttgacgagtgcgcctcttcacgcggagggtgcgagcaccactgtaccaatctggctggaagttttcaatgctcatgtgaggcaggctataggcttcatgaagaccgcagaggatgttcccctttagaggagccaatggtcgacctggatggcgagttaccattcgtgaggccgttaccgcacatcgcagttctccaagatgaactgccgcaacttttccaggacgacgacgtgggagctgatgaagaggaagctgaattacgtggcgagcatactttaacagagaaattcgtgtgcctagacgattcttttggccacgattgttctctcacatgtgatgattgtcgaaatgggggaacatgtctacttggccttgatggttgtgactgtcccgaaggctggactggacttatttgtaatgagacttgcccccctgatacatttggtaaaaattgcagtttcagctgttcctgccagaatgggggaacgtgtgactccgtaacgggagcatgtaggtgccctcctggtgtgtccggaacaaattgcgaagatggatgcccaaaagggtattacggaaaacattgtaggaagaagtgcaactgcgcgaacagggggcgttgtcatagactgtacggagcctgcctttgcgatccgggtctctatgggaggttctgtcatctgacttgcccaccatgggctttcgggccaggctgtagtgaggagtgccagtgtgtccagcctcacactcagagctgtgataagagagacggcagttgttcatgtaaggcaggcttccggggagaacggtgccaggccgaatgtgaactgggctatttcggaccaggttgctggcaggcctgcacatgccccgtgggggtggcttgcgacagcgtatctggcgagtgcggcaagagatgccctgcagggtttcagggcgaagattgtggacaagagtgtcctgtgggtacattcggcgttaattgctcttcatcgtgcagctgcggcggagcaccctgccatggcgtgaccggtcagtgccgatgcccacccggacgaactggcgaagattgtgaggccgactgtcccgagggaagatggggactgggatgtcaggagatctgccccgcatgtcagcacgccgcaagatgtgatcctgaaaccggtgcttgtctatgtctgcccggattcgtgggctccagatgtcaagatgtatgtccagcaggatggtacggcccttcatgccagacccgttgttcctgcgcaaacgatggacattgtcatccagccaccggccactgcagttgtgctccagggtggacagggttttcttgccagagggcctgcgacacgggacattgggggcctgactgttcacacccttgcaactgtagcgccggtcacggaagctgcgatgccatcagcggcctgtgcctgtgtgaagcgggatacgtgggtcccaggtgtgagcagcaatgtccccaggggcacttcgggccaggatgcgaacaacggtgtcagtgtcagcatggagccgcttgtgaccacgtaagcggcgcatgcacgtgtcctgccggatggcgcggaaccttctgtgagcacgcatgccccgcaggtttcttcggccttgactgtcgctcagcatgtaactgcacggccggtgcggcttgtgatgccgtcaatggatcctgtctgtgtccagccggtcggagaggacctcgctgcgccgagaagtgcctccctagggatgtcagggctggatgcaggcattcagggggttgccttaacggcggactctgcgaccctcacacagggagatgcctgtgcccagctggttggacaggcgataaatgtcagagcccttgtctccggggttggttcggtgaggcctgcgctcagcggtgttcgtgcccgccaggcgcagcatgtcatcacgtgaccggcgcatgccgctgtcccccagggtttacaggaagcggctgcgagcaaggttgcccacctgggaggtatggccctggatgtgagcagttgtgcgggtgcctgaatggcggtagttgcgatgctgctaccggggcatgtcggtgtccaactggatttttggggaccgactgcaacctcacctgcccccaaggccgttttggtccaaattgcacacatgtttgcggttgtggacagggggcagcttgtgaccccgtgaccggaacctgtctctgcccccctggtcgggctggcgtaaggtgcgagcgcggatgcccacagaatcggtttggcgtgggctgtgagcatacatgctcctgtcggaacggcggactctgccacgcgtccaacggcagctgcagctgtggactggggtggaccggaagacattgcgaattggcatgccctcctggtagatacggcgcagcctgccatctcgagtgttcctgccacaacaacagtacctgcgagcctgctactggcacctgtcgctgcggacccggtttctatggccaggcctgcgaacatagaaggtctggggcaacatgcaacctggactgccgtaggggccagttcggcccatcctgcaccctccattgcgactgtggcggaggcgctgattgtgaccccgtgtcaggccagtgtcattgcgtggacggctacatgggcccaacctgtcgagaaggcggtccactccggctgccggaaaatccttcactggctcagggctccgccggaacacttccagcttctagtcggccaaccagtcggtcgggcggacctgctcggcattag

SEQ ID NO: 231174 - DNA, 4626 bp, synthetic construct
  misc_feature 1..4626: note = Description of Artificial Sequence: Synthetic coding sequence
  source 1..4626: mol_type = other DNA
atgagctttctggaagaagctcgggctgccggacgcgctgttgtgttagctctcgtgctgttgctgctgcccgcagtgcccgtcggggcatccgtccccccacggcctttattaccactccagcccggtatgccccatgtgtgcgccgaacaggaactgactcttgttggtcgcaggcagccctgtgttcaggcactctctcatactgtgccagtttggaaggccggatgtggttggcaagcctggtgtgtcgggcatgaaagacgaaccgtgtactatatgggctaccggcaagtatacacgactgaggcaaggaccgtgctccggtgttgtcggggttggatgcagcaaccggatgaggaaggctgtctgagtgcggaatgctcagcttcattgtgtttccacggcggtaggtgtgtgccaggaagcgcacagccctgccattgcccccctgggttccaggggccacgctgccagtatgatgtagatgaatgcagaacgcataacggcggatgccaacacagatgtgtgaacaccccagggtcctatttgtgtgaatgcaagcccggttttcggctccacacagattcccgaacctgcctggccattaacagttgcgccctgggcaatggcggttgccagcatcattgcgtccagctcacaatcacccgacataggtgtcagtgtagaccaggcttccaactgcaggaggacggaagacactgcgtccgtcgcagcccttgcgcaaaccgcaatggaagctgtatgcatcgttgccaggtggtgcggggtcttgccaggtgtgaatgtcacgtaggatatcagctggcggcagacgggaaagcctgcgaagatgtcgatgagtgcgccgctggcctggcgcagtgtgctcacgggtgtctgaatacacagggcagcttcaagtgcgtgtgtcatgccggttatgagctgggagcagacggaaggcagtgttaccggatcgaaatggagattgtaaacagctgcgaggcgaacaatggtggctgctctcacggatgctcgcatacttctgctggcccactctgtacgtgcccgaggggctacgagttggataccgaccagagaacatgtattgatgtcgacgactgtgcagacagcccatgttgccagcaagtgtgtacaaataacccgggaggttatgaatgcggatgttacgctgggtaccgcctttcagccgacggctgtgggtgtgaggacgttgatgaatgtgcatccagcagagggggatgtgaacatcactgtacgaatctagccggtagtttccagtgcagttgcgaggctggatatcgtctccacgaagacaggcgtggctgctctccattagaagagcccatggtcgatctggatggggagttacccttcgtccggcctttgccacacatcgccgtactccaggacgagctgcctcagctgttccaggacgatgatgtgggagcagacgaggaagaggctgaactgcgtggggagcacaccctcacagagaagttcgtttgcttggatgactctttcggacacgattgctcactgacatgtgatgactgtagaaacggcggaacatgtctgctgggcctggacgggtgtgattgtcctgagggctggaccggcctgatttgcaacgagacatgcccccctgacacctttggcaaaaactgctctttcagttgctcttgtcagaacgggggaacctgcgattccgtgaccggtgcttgtagatgcccgccaggcgttagtggtaccaactgcgaggacgggtgccccaagggttactacggaaaacactgcaggaagaaatgcaactgcgctaatcggggacggtgtcacagattatatggtgcctgcctgtgtgacccaggcctctatgggagattctgtcatctaacatgtcctccttgggcatttggccctgggtgctctgaggagtgccaatgcgtacagccccacactcagtcttgcgataagcgcgatggctcatgctcctgtaaagctggctttcgtggtgagcgatgccaggcagagtgtgaactggggtactttgggcctggctgctggcaggcttgtacttgtcccgtaggtgtggcctgcgactcagtcagcggcgaatgcggcaaacgctgtccagccggattccagggagaggactgtggacaagagtgtccagtcggcaccttcggcgtgaactgtagctcttcttgcagctgcggaggggctccatgtcacggtgtgactggccagtgtcgctgtccgcctggccgtacaggcgaggactgtgaggcagactgtcccgaaggtaggtggggcctgggttgccaagaaatctgtcccgcatgccagcacgcagcccgatgcgatccagagactggggcttgtctgtgtcttccagggttcgtggggtctcgttgtcaggacgtctgccctgccggttggtacggaccaagctgccagactcgctgttcatgcgccaatgacggacactgccacccggctacaggacattgcagttgtgctcccggttggactggtttcagctgtcagcgggcatgtgatacaggccattgggggcctgactgtagtcacccctgcaactgttcggcagggcacgggtcatgtgatgctatttccggcctctgcctctgtgaagccggttacgtaggacccagatgcgaacagcagtgcccacaaggtcacttcggacccggatgcgagcagcggtgccagtgtcagcacggcgctgcctgtgatcacgtgtccggggcatgcacatgcccagcaggctggcgcggaaccttttgtgagcacgcctgtccagcgggtttcttcggcttagattgtcgttcggcatgcaactgtacagccggagccgcttgtgacgcagtcaacggcagctgcctttgtcccgctgggagacggggacctcggtgtgctgaaacatgcccggcacatacatatgggcacaattgctctcaagcatgcgcatgtttcaatggggcatcttgtgatccagtgcacggccagtgccactgcgcccctggatggatgggccctagttgtttgcaggcgtgtcctgcaggcctatatggggataactgccggcacagttgtttgtgccaaaatggcggtacttgcgatccggtgagtggtcactgcgcttgccccgaagggtgggccggtttggcttgtgaaaaggagtgcctacctcgtgacgtccgtgcagggtgccgccacagcggcggttgtctaaatggcggactgtgcgatcctcatactgggagatgtctgtgtcccgctggatggaccggcgataaatgtcagtctccctgtcttaggggatggtttggcgaggcctgcgcacagagatgttcatgcccacccggagcagcatgtcatcacgtgaccggagcctgtcgctgcccccctggcttcacaggctccgggtgtgagcaggcttgcccgcctggctccttcggagaggattgtgcccagatgtgtcaatgcccgggagagaacccggcttgccaccccgcaaccggcacatgctcatgtgctgctggctaccatggacctagttgtcagcagcggtgtccacccggaaggtatggccctgggtgcgagcagctatgtgggtgcctgaatggtgggtcctgcgatgccgctacaggtgcatgccgctgcccgacaggatttctgggaaccgactgcaaccttacgtgtcctcagggcaggtttggccctaactgtacgcatgtgtgcggctgtggccagggcgcagcttgcgacccagtgactgggacttgtctgtgtccccctggtagggccggtgtacgctgcgagcgcggttgcccacaaaacaggtttggcgttgggtgtgaacacacgtgcagctgtcggaatggagggctatgccatgccagtaacggcagctgttcttgcgggttaggttggaccggacgccattgtgagctggcctgccccccaggcagatacggcgcagcttgccatcttgaatgtagctgccacaataattccacatgcgagccagccacaggcacatgtcgttgcgggccaggcttttacgggcaggcctgcgaacacccctgtccgcctggcttccatggcgctggatgtcaggggctgtgttggtgccagcacggcgcaccatgtgatcccatctctggaagatgcttgtgccctgctggattccacggacatttctgcgaacgtggctgcgagccaggctctttcggtgaaggttgccatcagcgttgcgactgcgatggaggtgcaccctgcgatccagtgacaggtctatgcctttgtccaccgggtcgcagtggtgctacctgtaatttagactgtaggcgcggacagttcggaccttcctgtaccctgcattgtgactgcgggggaggagccgattgcgatcctgtgtctggacagtgtcactgcgtggacggctatatggggcctacatgtcgggaaggcggaccactccgcctacctgagaaccccagcctggcacagggctcagccggaacactgcccgcatctagtcgcccaacctctaggagcggaggacctgcccgacactag

SEQ ID NO: 231175 - DNA, 8538 bp, synthetic construct
  misc_feature 1..8538: note = Description of Artificial Sequence: Synthetic coding sequence
  source 1..8538: mol_type = other DNA
atggccctgggaaaagtgctagcgatggccctcgtgttggcattagctgtgttagggagtctgtcccccggtgccagagcaggtgactgcaagggtcagaggcaggtgcttagagaggccccagggttcgtgacggacggcgctggcaactactccgtgaatggcaattgcgagtggttaatcgaggctccatccccacaacaccgcatcctgctggactttctattcctggatacggagtgcacatacgactatctcttcgtgtatgatggagattctccccgagggccacttctggcatctctttctgggagcacccgacccccacctatagaggcgtcttccggtaagatgttgctgcatctttttagtgacgccaactacaacctcttggggttcaacgctagttttagattctctttatgccccggtgggtgccagtcacacggccagtgccagccccctggagtttgcgcatgcgagcccggatggggtggcccagactgcgggctgcaagagtgcagtgcatactgcgggtcccacggcacgtgtgcctcgcctcttggcccttgtagatgcgagcctgggttcttaggtagagcgtgcgacctgcatctgtgggagaatcaaggagcgggttggtggcacaacgtctcagctcgcgacccggctttcagcgctcgaatcggtgcagctggggcattcctgtctcccccaggactccttgcagtgtttgggggacaagatctcaacaacgcattgggagaccttgtgctttataacttctccgcgaacacatgggaatcgtgggacttgagcccagcgcctgctgcaaggcactctcacgtagctgttgcttgggcgggatctcttgtcctgatgggcggagaactagccgacggctccctcaccaatgatgtttgggctttttcccccttgggccgtgggcactgggagctcctagctccacctgcaagcagcagttcaggcccacccggacttgccggacatgccgctgctctcgtggatgatgtgtggctgtatgtgagcggcggaagaacccctcatgacctgttctcctccggcctattccgttttcgcctggactcaacgtccggcggatactgggagcaagtcatccctgcaggtggcaggccgccagccgctaccggacattcaatggtttttcacgctccgtcaagagcactgctcgtccatggtgggcaccggccttcaactgccagattttctgtgcgagtgaattccaccgagctgttccatgtggatcgtcatgtctggactactcttaagggcagagatggtttgcaaggcccaagagagcgtgcgttccacacagcttctgtcctgggaaattacatggtcgtgtatggtggcaatgtgcatacccactatcaggaagagaagtgctatgaggatggcattttcttctatcacctgggttgtcaccagtgggtatcaggggcagaactcgctccccctggcacccccgaaggacgcgctgccccaccaagtggcagatacagccacgtggcagcggtactagggggaagcgtcctcttggttgctggtggatactctgggcgtccaaggggcgacctgatggcttataaagtgcctccctttgtgtttcaagcccctgctccagattatcatctggactactgcagtatgtataccgaccacagtgtgtgttccagggatccagagtgctcttggtgtcagggagcttgtcaggccgcacctcccccaggcacaccgttgggggcttgccctgctgcttcctgcctaggtctgggcagacttctaggagattgccaggcctgtctcgcattctcctctccgaccgccccacctcgtgggcctggaaccttaggctggtgcgtacacaacgaatcatgcttgcctaggccggaacaggcccgatgtcgtggggagcagatctccggaacagtcggctggtggggcccagcaccagtgtttgtaacctccttggaggcttgtgtgacccagagcttccttccagggctgcaccttcttacatttcaacagccacctaatacctctcagccagacaaggtttctatcgttcgctcaacaacgatcaccctgacccctagcgccgagacagacgtgtctttggtgtacagaggtttcatttaccctatgctcccaggaggccctggaggccctggcgcagaggatgttgctgtctggactcgggcacaacgcttgcacgtgcttgcaagaatggccagagggccagatactgagaacatggaagaagtaggacgctgggtagcccaccaggagaaagaaactcgcagattgcaacgccctgggagtgccaggctgttccccttacccggaagagatcacaagtacgcagtcgagatccaggggcagttgaatggctccgccggtcccggacatagcgagttgaccctattatgggatagaacaggagttcctgggggatcagagattagtttcttttttcttgaaccttatcgtagtagctcttgcacttcttactcctcctgcctcgggtgccttgcagaccagggatgcggctggtgtttaacctccgccacttgtcatctgaggcaaggaggcgcacactgcggtgacgacggagctggcggatcattgcttgttttggtgccaaccctttgtccactatgtgaagagcatcgcgactgccacgcctgtacacaggaccccttttgcgaatggcaccagtctacatcacgcaaaggagacgcagcttgctcaagaaggggcagggggcgtggagcacttaagagtcccgaggaatgcccccctctgtgcagccagcgattgacctgcgaggattgtctcgccaactcatcccagtgcgcatggtgtcagtccacccatacttgcttcctgtttgccgcttacctcgcccgttatccccacggtggctgccgaggatgggacgattccgtgcattccgagccgaggtgcaggagttgtgacggttttctcacctgtcatgagtgtctgcaatcccatgagtgtggctggtgcggcaatgaggataaccccactttgggaaggtgtcttcagggggacttttcaggcccactgggtggcggtaactgttcgttatgggtaggggagggactcgggctgcccgtcgccctgcccgctcgatgggcctatgccagatgtccggacgtggatgagtgcaggttgggactggccagatgtcaccccagagctacatgccttaacacgcccctgtcatatgaatgtcactgtcagagaggataccagggcgatgggatttcacactgtaataggacatgcctcgaagattgcgggcacggagtgtgtagcggaccccctgattttacttgtgtgtgtgatctgggttggacatcagatttaccccctcctacgcctgctccgggaccccctgcgcctagatgttctcgggattgcgggtgctcattccactcccattgccgcaagagaggcccaggcttttgtgatgagtgccaagactggacctggggggagcactgcgagcgctgtagacctggttcattcgggaacgccacaggttcacgcggttgtagaccgtgccaatgtaatggccacggtgaccctaggcggggacactgtgacaatctatcaggtttgtgcttctgtcaggatcatacagagggcgctcattgccagctgtgttccccaggttattatggggatcctagagccggtggctcctgtttcagagagtgtggcggtagggcactcttgaccaacgtcagctccgttgccctggggagcaggcgggtggggggtctgttgccacctggtggaggtgctgcccgagcaggccctgggttatcctactgtgtatgggtggtgtccgccactgaggaactgcagccatgtgcccctgggacattgtgccctccactaaccctgacattttcccccgactcctccactccgtgtacgcttagctatgtattggcattcgacggttttcccagatttttggacacgggggtggtccaaagcgatcgtagtctgatcgctgccttctgcggccagcgccgagatagaccactgactgtgcaagcgctgtccggcctgcttgtactgcactgggaggcaaacgggagctcctcctggggattcaatgctagcgtcgggtcagcgcgttgcgggagtgggggacccggttcttgccctgttcctcaggagtgtgtgcctcaggacggagccgcaggcgctggattgtgtcggtgcccacagggttgggctggaccccattgccgcatggccctctgcccggagaattgtaacgctcacactggcgcagggacctgtaatcagtcactgggcgtctgcatttgcgctgagggcttcggaggcccagattgcgccaccaagcttgacgggggacagctggtctgggagacactcatggactctagattgagcgccgatacagcgtccagattcctccatcgtctggggcacactatggtcgatgggccagacgcgaccctctggatgtttggtggcttggggctgccacagggactgctgggcaacctctacaggtacagcgtctctgaaagacgatggactcagatgctagctggagctgaagatggaggtccaggaccgtcaccaagaagcttccacgccgctgcctatgtgccggctggacggggagcaatgtacctgctcggcggtctgacagccggaggggtgactcgggatttttgggtattgaacctcactaccctacagtggagacaggaaaaggcacctcagacggtggagcttcccgctgtggcgggtcacacactcacagctaggagaggcctgtcacttctgctggtcggcggttattcaccggagaacggttttaatcagcagctgctggaatatcaattggccaccggtacctgggtttctggagctcagtcaggcacccctccaacaggcctttatggtcacagcgccgtgtatcatgaagctacggactcactatacgtttttgggggatttaggttccatgtcgagcttgctgcaccctctccagaactgtattcactgcattgtccagatagaacctggtcactactagctccaagccagggggcaaagcgtgaccgcatgagaaatgtgcggggatctagtcgtggtttgggacaggttccaggagaacagccaggcagctggggcttccgcgaggtgcggaagaagatggctctctgggctgcactcgccggtacaggcggattcttggaggagatctctccgcaccttaaggaacctaggcccaggctgttccatgcttcagctttgctgggcgacaccatggtcgtgctggggggaagaagtgacccggacgaattctcgtctgacgtgttgctttatcaggtgaactgtaatgcgtggctcctgcctgatctgactcgtagcgcgagcgttgggcctcccatggaagaatcagtggctcacgccgtggctgccgtgggttctcggttgtacatctcaggaggttttggcggtgtggcattgggccgactgttggcgttgacactgcctcctgacccttgtagactgctttcatctcccgaagcttgtaaccagtctggtgcatgcacttggtgccacggtgcttgcctgtccggcgaccaagctcatcggctggggtgcggcggatcaccatgctctcctatgccaagaagccctgaagaatgccggaggctgagaacgtgctcagaatgcctggcacgtcatccaagaacactacagcccggtgacggcgaagccagcacccctcggtgcaagtggtgtacaaattgccctgagggtgcatgcatcgggaggaacggaagttgtacttccgagaatgactgcaggataaaccaacgggaggttttctgggccggaaactgcagtgaagctgcatgtggggcagccgactgtgagcagtgtacgagagaaggcaagtgtatgtggaccaggcaattcaagaggacgggcgagacccggagaatcctgtctgtccagcctacctacgattggacgtgtttctctcattctctgctgaacgtgtcccctatgccggttgagagcagccccccactcccgtgtcccaccccctgccacttgctgccgaattgcacatcttgcctggattccaaaggagccgacgggggttggcaacactgtgtttggagtagctccctgcagcaatgcctcagcccttcatatctgcctctaagatgcatggcgggaggatgcggcaggttactgcgcggaccagaatcctgcagtctgggctgcgcacaggccactcaatgtgctctgtgcctgagacggcctcattgtggctggtgtgcttggggaggacaggatggcggaggcaggtgcatggaaggagggttgtctggaccccgagatgggctgacctgcggtcgccctggagccagctgggcctttctctcctgccctcccgaggatgagtgtgcaaacggccaccacgactgcaatgaaacgcagaactgccatgatcagccacatggctacgagtgctcctgtaaaaccggctacacgatggacaatatgaccggattgtgccgccctgtgtgcgctcagggctgtgtcaacgggagctgcgtcgagccagaccattgtcgatgtcactttggctttgtgggcaggaactgtagtacagaatgcagatgtaatcgccacagcgagtgtgccggagtgggcgcaagagaccactgcctgctgtgtagaaatcacactaaaggaagccactgtgagcagtgtctgccactgttcgtgggcagtgcagtgggcggaggaacctgccgtccttgtcatgcattctgccggggaaattcccacatttgtatcagtcgaaaagaattgcaaatgagcaaaggcgagcctaagaaatacagcctggacccagaggaaatcgagaactgggttacggaagggccttcggaggacgaggcagtgtgtgtgaactgtcagaacaacagctacggtgagaaatgcgaatcatgcttacaaggatattttcttttggacggtaagtgtacaaaatgccaatgtaacgggcacgcagacacatgtaacgaacaagacggaacaggctgcccatgtcaaaataacacagaaactgggacctgccagggtagctcccctagcgatagacgtgactgctacaagtaccagtgtgccaagtgcagggaaagcttccacggttcaccacttggagggcagcagtgctataggttaatttcggtagagcaagaatgttgcctggatcctacctcccaaaccaattgcttccacgagcctaaacggagggcactcggcccaggaaggacagtgctgttcggagtccaaccaaagttcaccaatgtggacatcagactgacactggatgtgacgtttggagccgtggacttatacgtgtctacctcttacgacacctttgtggtgcgcgtggcgccagacacaggcgtgcatacagtgcacattcagccgcctcctgcccctccaccccctccaccccctgcagacggtggtcccagaggggctggcgatcctgggggagctggagcctcctctggccctggcgcaccagccgagcccagggttagggaagtgtggcctagaggacttatcacttatgtgaccgtgaccgaaccgtcggcggtgcttgttgtccggggtgtgcgagatcggctggtcatcacatacccccatgagcaccacgctctaaagagctcacgattctatctgctgttgctgggggttggagacccttctggcccaggagcaaacggctctgctgatagccagggactgctgttctttagacaggaccaagcgcatatcgatctttttgtcttcttctcagtcttcttctcatgctttttcctgtttttgtccttgtgcgttctcctatggaaggctaagcaggcactggaccaacggcaggagcagcgcagacacctccaggaaatgaccaagatggctagcaggccctttgctaaggtgaccgtatgctttccacctgatccgaccgcccctgcgagtgcctggaagcccgcaggactcccacctccagcctttcggagaagcgaacctttcttggctcctttacttctgacgggagctggtggcccttggggacccatgggtggtggctgctgcccgcctgcaatccccgcaacaactgccggattacgggcaggcccaatcacccttgagccaaccgaggatggtatggccggtgtagcgacccttcttctgcagctgcccggaggtccacatgccccaaatggagcctgtttgggctcagccttagtgacactcaggcacagattacatgagtactgcggcggtggagggggagcaggaggatctggacatgggaccggcgctgggcgaaagggactgttaagccaggacaatctgacctccatgagtctgtas

SEQ ID NO: 231176 - DNA, 8336 bp, synthetic construct
  misc_feature 1..8336: note = Description of Artificial Sequence: Synthetic coding sequence
  source 1..8336: mol_type = other DNA
atggcccttggcaaggtcctggctatggcactcgtcttggcgctggccgtactggggtctctgagccctggggcaagagccggagattgcaaaggccaaaggcaagtcctgagggaggcccctggcttcgtaactgatggagcaggcaactacagtgttaatggaaattgcgaatggctgatcgaggccccttccccccagcacaggattcttctagacttcctctttcttgacacagagtgcacgtatgactatctattcgtatatgatggggactcaccgcgaggccctttgctggctagcctgagtggatcaacccggccaccgccaattgaagctagctcagggaagatgctattgcacctgttttctgacgctaactataacctgctgggattcaacgcgtccttcaggttttccttgtgtccgggaggctgtcagagtcacgggcaatgtcagcccccaggcgtctgcgcatgcgaacctgggtggggcggtcctgactgcggcctccaagagtgctcagcatattgcggcagccacggcacctgcgcttcacccctgggtccatgtagatgcgagccaggctttttgggaagagcctgcgatctccacctatgggaaaatcaaggggcaggttggtggcataacgtgtccgcgagggacccagcattttcagccagaatcggagccgcaggcgcatttctttcacccccaggccttcttgccgtatttggcggacaggacttgaacaatgccctgggtgatctggtcctgtacaatttttcagctaacacttgggaatcttgggatctgtcacccgcaccggctgccaggcactcccacgtggccgtggcctgggcaggatctctggtattgatgggcggagagctggcagatggatctctgacgaatgatgtttgggcattcagcccactgggtaggggacactgggagctacttgcccctcccgcatctagctcctctggacctcctgggctcgcgggtcacgcagctgcccttgtcgacgacgtctggctctatgttagtgggggaagaacacctcatgatttatttagtagcgggttattcaggttccgacttgatagtaccagcggcggatattgggagcaagtgatcccagccggaggcaggccccctgccgcaaccggtcactccatggtatttcatgccccatctcgggctctgcttgtgcatgggggacacagaccttcgaccgcccgtttctctgtccgggtgaattcgactgaattgtttcacgtggataggcatgtgtggacaacattaaagggccgagacggcttacagggaccacgagagcgagctttccataccgcctcagtgctcgggaactatatggtcgtctatggagggaacgtccatacacattaccaggaggaaaagtgctatgaagacgggatcttcttttatcaccttgggtgtcatcagtgggtatctggagccgagcttgctccccctgggacccccgaggggagagccgctccccctagcgggaggtattcccatgtcgccgcagttttgggtggatcagtgctgcttgttgcgggtgggtatagcggaagacctcgcggagacctcatggcttataaggtgccacccttcgtgttccaggcaccagctcctgactaccatcttgactactgttcaatgtatactgatcactctgtctgctctcgagatcccgagtgtagctggtgccaaggagcttgccaggctgccccaccccctggaacccctctaggtgcatgccctgccgctagctgtttgggcctgggacgattgcttggcgactgccaggcctgtctggctttttcatcccccaccgctcccccaaggggacctggaacactgggctggtgtgtgcataacgaatcctgcctgccccgtccggagcaggccagatgccgcggagagcagatctccggaaccgtgggctggtggggccctgctcccgtttttgtaaccagcctagaagcttgcgtgactcagagtttcctgcccggtctgcaccttctaactttccagcagcctcccaacacgagccagccagacaaagaggaagtgggaaggtgggttgctcatcaggagaaggaaacacggaggttgcagcgcccaggtagcgcccgtctattccctctgcccggaagggaccataagtacgctgttgaaattcaggggcagctcaacgggagtgccggaccaggtcacagtgagctgaccttgctgtgggatcgaaccggtgttccgggaggatctgagatttccttcttcttcctagaaccttataggagcagctcttgcacatcatactcttcttgtctgggatgtctcgcagaccaggggtgtggttggtgcctcacctccgcgacatgccacttgcgccaggggggagcacactgcggtgatgatggtgcagggggaagtctcctcgtgttagtcccgacactatgccccctgtgcgaggagcaccgtgattgccacgcttgtacacaagaccccttttgcgaatggcatcaaagtacctcccgcaaaggcgacgctgcctgtagtaggcggggtcgcggacggggagctctcaagtctcctgaagagtgccctccgctgtgttctcaaagactcacctgcgaggactgtctagccaactcctcacaatgtgcttggtgccagagcacccatacctgcttcctgtttgccgcttatcttgccagatatccacacggtggttgtcgaggatgggacgactctgtgcactccgagccgaggtgcaggtcatgcgacggatttctgacttgtcacgagtgcctgcagtcacacgaatgtgggtggtgtggtaacgaggacaatccgactctcggtagatgcctacagggtgatttcagtgggcctcttggaggcggtaattgctctttatgggtcggggagggtctgggcctgccggtggcgctgcccgctcgttgggcatatgcgcgttgccctgacgtggatgagtgtagactgggattggcacggtgccacccgcgagccacctgtctcaacacaccccttagctacgagtgtcactgtcagcgtggatatcagggcgatggtatctctcattgcaataggacctgcctggaggactgtgggcacggcgtttgcagcgggccacccgacttcacttgcgtgtgtgatcttggatggacctcagacctccctcccccaactccagcacccggaccacctgctcctcgttgtagcagagattgcggctgcagcttccatagtcactgtaggaagagagggcctggcttctgcgacgagtgtcaggactggacctggggggagcactgcgagcgctgcagaccaggctctttcggtaatgctactggctctcggggatgccggccatgtcagtgcaatggccacggagatcctagacgcggacattgtgataacttgtccggactctgcttctgtcaggaccacaccgagggggctcactgccagctctgcagtccaggctattacggcgatccacgggctggaggctcttgctttagagagtgcggaggcagagcccttctgaccaacgtttcatccgtggcacttgggtcaagaagggtgggcggattacttccacctggagggggtgccgctcgcgctgggccaggtctcagctactgcgtttgggtagtctcggccaccgaagagctgcagccatgcgcccctggcacgctgtgcccaccactcacccttacattttccccagatagcagtaccccgtgtacactgtcctacgtcctcgcctttgacggattcccaagattcctggacaccggcgtggtgcaatctgaccgcagcttaatcgctgccttttgcggccagaggagagaccgccctctaacagtgcaggcccttagtggactgttggtcctccactgggaggccaatgggtcctctagctggggctttaacgcaagcgtgggaagcgcacggtgtggtagcggcggacctgggagctgccccgtgccacaagaatgcgtgcctcaggacggagccgctggggctggcctgtgccgctgtcctcaagggtgggcaggaccacactgtaggatggctctctgtcctgaaaactgtaacgcacacaccggggcaggaacctgtaaccagagcttgggcgtatgcatctgtgcagagggtttcgggggtccagattgcgcaacgaagttagacggtggccagctcgtgtgggaaacactgatggatagcagactcagcgccgacacggcttcgcggtttctgcaccgcctggggcatacaatggtggacggacctgatgctacactttggatgttcgggggactgggcttgccgcagggcctgctggggaatctgtatcgatactcagtgtcagagaggagatggacccaaatgctcgcaggagccgaggacggcggtccgggacctagcccccgatctttccatgcagccgcttatgtgccggctgggaggggagctatgtacttgttgggcggattaaccgctggcggtgtcacaagagacttctgggtgctcaatctgaccacactacagtggcggcaagagaaagcaccccagactgttgagctgcccgctgttgcaggacatactttgaccgcccgaagaggactttcgcttctacttgttggtggttattcacctgagaacggattcaatcagcagctgctcgagtaccagttagctactggcacatgggtgagtggcgctcagtcaggaactcctccaaccgggctgtacggccactccgccgtctatcacgaggctactgatagcctttatgtgttcgggggattccgctttcacgtcgaactcgctgcacccagtcccgaactgtactcccttcattgccccgaccgaacttggagtctgttggcaccgtcgcagggggctaaacgagacagaatgaggaatgtgcggggatcctccagaggcctgggccaggtaccaggggagcagcccggaagttgggggttccgggaagttaggaagaaaatggccctatgggctgcactagccggaactggcggatttttggaggagatatcgccgcatctgaaggaacctcgccctcgcctgttccatgcttctgcactattaggagacacaatggtcgttcttggaggtcgaagcgacccagacgagttctcgtctgatgtcttgctttatcaggtcaattgtaacgcttggctgttgcctgacctgaccaggagcgcatccgtcggacctcctatggaggaatccgtggcccacgccgtcgctgccgtcggcagcaggctctatatctctgggggttttggtggagtggctctcggccgtctgttggccttgacacttcccccagacccgtgccggctcctgtcttcccccgaagcttgtaaccagtctggtgcctgcacctggtgccacggagcctgccttagcggcgaccaagcacacagacttggttgcggtgggagcccatgttccccaatgcctcgctcacccgaagagtgtaggcggctaaggacctgtagtgaatgcctggcacggcaccctcgaaccctgcaacccggagacggcgaggcgtctacgccgcgatgcaagtggtgtactaactgtcccgagggagcgtgtataggcaggaacggctcttgcactagcgaaaacgactgcagaatcaatcagcgggaagtattttgggcgggtaattgcagcgaggctgcttgcggtgccgctgattgcgaacagtgtaccagagaagggaaatgtatgtggacccgtcaattcaagcgcaccggagagacgcgtaggattctaagcgtgcaacccacatatgactggacatgcttttctcattcactactcaatgtgtctcccatgcccgttgagagttccccccctctaccttgcccaaccccatgccatctgctacctaactgtacatcgtgtttggacagcaagggggctgacggcggatggcagcattgcgtgtggagctcctccctgcagcagtgtctcagtccatcttatttgcccttgcgatgtatggccggaggatgtggccgactgctgcgcggacctgagagttgctcccttggatgcgcccaggctactcagtgcgcgctgtgcttgcgtcgaccacattgcgggtggtgtgcttggggtggacaggacggtggcggtagatgcatggaggggggactctccggcccacgggatggacttacatgcgggagacccggagcgagctgggcttttctgagttgccctcctgaggacgaatgcgccaatggccaccacgattgtaatgagacgcagaattgccatgaccagccacacggatacgagtgttcttgtaaaactggctataccatggataacatgactggtttgtgcagacccgtgtgcgcccagggctgtgttaacggcagctgtgtcgagccagaccattgcagatgtcacttcggctttgtgggcaggaactgttccaccgagtgcaggtgtaatcgacacagcgagtgtgccggagttggggcaagggatcattgtctgctgtgccggaaccataccaaaggaagtcattgcgagcagtgtctccccctgtttgttggatcagccgtgggcggtggtacttgcaggccctgccacgccttctgccggggaaatagccatatctgtatcagccgaaaagaactgcagatgagtaaaggcgaacccaaaaagtacagcctcgaccctgaggaaatagagaactgggtgactgaaggaccgtctgaagatgaagcagtgtgcgtcaattgccagaacaacagttacggagagaaatgcgaatcatgcttacaaggttactttctgcttgacggaaagtgcaccaaatgtcagtgtaatggacacgctgacacgtgtaatgaacaggatggtactggttgtccctgccaaaataacacagagactggcacctgccagggctccagtccctcagacagacgcgactgttacaagtaccaatgtgcgaagtgcagagagagcttccacggctcaccactgggaggccagcagtgttaccggctgataagcgtcgagcaggaatgttgcctggaccccacaagccaaaccaactgttttcatgaacccaaacgcagggcactcggtccaggacggactgtgctgttcggtgtccaacccaaattcaccaatgtggatatcagacttaccctcgatgtgacgtttggggcagtagacctgtatgtatcgacgtcctacgacactttcgtcgtccgcgtggccccagacaccggcgttcacaccgtccacatccagccgcctccagccccacctccccctcctcccccagcagacggagggccaagaggtgctggggatccagggggtgcaggggcatcttctggcccaggggcacccgctgagcccagagtgagagaggtgtggccacggggactgatcacctatgtgacagtcacagaaccatctgccgtgttggttgtgaggggtgtccgggataggctggtcatcacctacccgcacgagcaccacgcgctcaagagttcccgattctatcttctactgctgggagtcggagaccctagtggacccggtgccaacggttccgccgactctcagggactacttttcttccgccaggatcaggctcacatcgatctctttgtcttttttagtgtgttcttttcctgcttctttctcttcctgtccttatgcgtccttctatggaaagccaagcaggccctggaccagcggcaagaacagcgaagacacctgcaggagatgaccaagatggcctcccgtccctttgccaaggtgactgtgtgttttccacccgacccaaccgcgccagcatccgcctggaagccagccggtctcccaccaccagctttccgcagatccgaaccatttctagcacccctccttttaaccggggctggcggaccgtggggccctatgggtggcggttgctgtcctcccgcaatccccgctaccactgccggactgcgggcagggcctattacattggagcccacagaggacgggatggcaggagtggccacattgctactgcagctccccggtggcccacatgcccctaatggtgcctgcctcggcagtgcgttagtcacgctccgacacaggttacacgagtactgcggcggtggcggtggggctggaggaagcggtcatgggacaggcgctggccgaaagggcttgcttagccaggacaatctgacatctatgtccctcta

SEQ ID NO: 231177 - DNA, 1320 bp, synthetic construct
  misc_feature 1..1320: note = Description of Artificial Sequence: Synthetic coding sequence
  source 1..1320: mol_type = other DNA
atgagggagctgccagctggtctcctccccccaggaagggaggtgcatcagtgcgcaaaatgcagggagagtttccacggatcacccctgggcggtcagcagtgctaccgattaatatcagtcgagcaggaatgttgtctggacccaacatcgcaaaccaactgcttccatgagcccaaacgtagggccctcggccctgggaggacagtgctgttcggggtccagcccaaatttacgaatgtggatatcagactgacgctggatgtcacctttggtgctgtggacctgtacgtgtcaacctcctacgacaccttcgtggtaagagtcgcgccagataccggcgtccacacggtgcatattcaacctcctcccgctccaccacccccaccccctcctgcagacggaggcccacgcggagccggagatccagggggagctggcgctagcagcggtccgggtgctcccgctgaaccaagggtgcgcgaggtgtggcccagaggcctgatcacatatgtgaccgtcaccgagccatcggcagtcttagtggtcaggggagtacgtgaccggctcgtcattacctacccacatgaacatcacgcccttaaaagctctaggttctatctccttctcctgggcgtcggggacccctccgggccaggagccaatggcagcgctgactcccaaggattgctgttctttcgccaggaccaagcccacattgacctgttcgtgttttttagtgtattcttcagttgctttttcttgttcctgagtctgtgtgtgctcctctggaaagccaaacaggccttggaccagagacaggagcagcggagacatctgcaagagatgacgaagatggcgtctcgtccgttcgccaaggtgactgtctgctttcccccagatcctaccgccccagcatccgcctggaaacccgcaggattgccccctcccgcttttcgtcggagcgaacctttccttgcacccctgctccttacgggcgctggcggtccctgggggcctatgggcggaggctgttgtccccctgcaatccctgcaactactgcaggtctgcgagccggaccaatcacccttgagccgaccgaggacgggatggcaggtgttgcgaccctgctgctacagctgccagggggaccccatgccccaaatggggcttgccttggcagcgctctcgtgacactccggcaccgcctgcacgagtactgtggcggaggtggaggggctggaggatcagggcatggtacaggcgctggacgcaagggattgctgagtcaagataatctgacaagtatgtcgctctag

SEQ ID NO: 231178 - DNA, 1809 bp, synthetic construct
  misc_feature 1..1809: note = Description of Artificial Sequence: Synthetic coding sequence
  source 1..1809: mol_type = other DNA
atgaacggtggggctgaacgcgctatgagaagtttaccttctctgggaggcctagccctactatgctgcgccgctgccgcagcagccgctgccgtggcttccgcagcaagcgctggtaacgtaacaggtggcggaggcgcagcaggacaggttgacgccagtccagggccaggactgcgcggagaaccttctcatcccttcccccgagcaacagccccaactgctcaggccccaaggactgggccacccagggccacggtgcacagacctttggccgcaacttccccagctcagtcccccgagacaactccactgtgggccaccgctggtccctcaagtacaacattccaggctcccctgggcccaagtccaaccactcccccagcagctgaaagaacctctaccactagccaggccccaacaaggccggctcccacgacgctctctacaacgaccggacccgcaccgaccactccggttgcgaccacagttccagcaccaacaacgcctcgtaccccaacccccgatcttccaagctccagcaatagcagtgtgctgccgacaccaccggctaccgaggcaccctcttcaccaccccctgagtacgtgtgcaattgcagcgtggtgggtagccttaacgtaaatcgctgcaaccagaccactggtcagtgcgaatgccgcccaggataccaggggctgcattgtgagacttgcaaagagggcttttacctcaactatacatcaggcttgtgtcagccatgtgactgtagccctcatggagccctgagtattccctgcaactcatccggaaagtgccaatgcaaggtgggcgtcatcggatccatttgcgatagatgccaggatggatattatggattttccaaaaacggctgtctgccctgccagtgcaataatcggtctgcctcatgcgatgctttgaccggtgcctgcctgaattgccaagaaaattctaaaggcaaccactgtgaggaatgtaaagaggggttttatcagagtcccgacgccactaaggaatgcctgagatgtccatgttcagccgtgacatcgacaggttcgtgctctattaagagctctgaactggagcccgagtgcgatcagtgtaaggatgggtacatcggacccaactgtaataaatgcgaaaatggctactacaattttgattccatctgtagaaagtgtcagtgccatggacacgtggacccagtgaagacaccaaaaatctgtaagcccgaatccggagaatgtataaattgcttacataacactactggattctggtgcgagaattgtcttgagggttacgttcacgacttggaagggaactgtatcaagaaagaagtcatcctgccaacacctgagggcagcaccatcttagtgagcaacgcgagtcttacaacgtccgtcccgacacctgtgatcaacagtacattcaccccaaccacactccaaaccattttcagtgtgtcaacgtctgagaattcaacatcagctctggccgacgtctcatggacacagtttaacatcatcatcttaactgttataatcatcgtggtggtcctactcatgggttttgtgggtgccgtgtatatgtacagagagtaccaaaaccggaagctgaatgctcctttttggacaattgagctcaaagaggataacatctcattcagctcatatcatgattccattccaaacgctgacgtctccgggctgctagaagacgatggtaatgaggtggctcccaatggtcaactcacactgaccactcccatccataattataaggcctag

SEQ ID NO: 231179 - DNA, 1920 bp, synthetic construct
  misc_feature 1..1920: note = Description of Artificial Sequence: Synthetic coding sequence
  source 1..1920: mol_type = other DNA
atgagatcgcttccctcattgggaggtcttgcattactttgctgcgcagcggctgccgcagccgcagctgtggcctcagctgcctctgccggaaatgtgaccggcggtgggggagccgctggtcaggttgacgcaagtccaggacctggcctgcgcggagagccaagtcacccttttccgcgtgcaacagccccaaccgcccaagctccgaggaccggcccaccaagagccacagtccatcgaccactggctgccacaagtccggctcaatcccctgagaccactcccctctgggctaccgccggtcccagcagcactaccttccaggctccactgggcccttccccaacaaccccaccagctgcggaaagaacatctacaacctcgcaggcacccacacgtccggcaccaacaaccctgtctactaccacagggccagcgccaactactcccgtggcaacaaccgtccctgcacctacaactccccgaacccctactcctgatctgccatcgagttccaatagcagtgtgttaccaacacccccagcaacagaagccccttcaagtcccccacccggacaccagtggcccgtggctaaaatgccgcagaaatatctgggtaagtacgcatgcgagtctaatctgaagtcaaaatacttgcctttaacccagcctgtaatgaacctacgagtgagcgaagccgtcaagaccgagtacgtgtgcaactgcagcgtcgtcggctctctcaacgtaaaccgttgcaatcaaacaacggggcaatgtgaatgcaggccgggataccagggtctgcattgcgagacctgcaaggaagggttctatttgaactacacaagcggtctttgtcagccctgcgactgctccccacatggcgcactgtctatcccttgcaactctagcggtaaatgtcagtgcaaggttggtgttattggatccatatgtgaccgctgtcaggacggttattacggcttctctaaaaatggatgcctcccgtgtcagtgcaacaatcggtcagcgagctgcgacgcactgacaggggcatgtctgaattgccaagaaaattccaaggggaaccactgtgaggagtgtaaggaaggattctaccagtctcctgatgctacaaaagaatgcctgcggtgtccgtgttcagccgtgactagcacaggctcctgcagtataaaatccagcgaactggagcctgaatgcgatcaatgtaaggatggttacattggacccaattgcaataagtgcgaaaatgggtactataactttgactccatatgccgtaagtgccagtgccatggccacgtggatccagtaaagactcctaagatctgcaagcctgagagtggcgagtgtataaattgtctgcacaatacaactggattttggtgtgaaaactgtttggaaggttatgtgcatgatctagaaggtaattgcatcaaaaaagaggtgattctccccacaccggagggcagtacaatactcgtgagcaacgcgagtttgactacgagcgtgcctactccagtcatcaattcaacattcactcccaccacactgcagactatattctccgtgtctacatcggagaacagtactagcgcccttgccgacgtctcttggacacagttcaatattattatccttaccgtcatcatcatcgtggtggtgctcctcatggggttcgtgggggcagtctacatgtaccgggaatatcagaacaggaagttgaacgcaccgttttggactatagaattgaaagaggataacattagcttcagctcttatcacgactcgatcccgaatgccgatgtttctggtcttctggaggatgacggcaatgaggtcgcaccaaatggccaactgacactcactaccccaattcacaactacaaagcctag

SEQ ID NO: 231180 - DNA, 939 bp, synthetic construct
  misc_feature 1..939: note = Description of Artificial Sequence: Synthetic coding sequence
  source 1..939: mol_type = other DNA
atgctgcgggcaccagggtgcctcctgagaacaagcgttgccccagctgccgcactggcagccgcactgctgtccagtctagccagatgctcccttctggagccacgcgatcctgtcgcttcttccctgagtccttattttgggacaaaaacccgatatgaagacgtgaacccggtgctgctgtcaggtcctgaggccccatggcgcgatcccgagttgctggagggcacctgcacccctgtgcagctggtcgccctgattcgacacgggacccggtatcccacggtcaagcagataaggaagctgcgtcagctccacggccttctccaggcacgtggatctagggatggcggagcaagctccacgggaagtagagacctaggagctgcgctagccgattggcctttgtggtacgctgactggatggatggccagcttgtggaaaaggggaggcaggacatgagacagctggcactccgtcttgccagcctgttcccagcactcttcagccgcgagaactatggaaggctgcgacttatcaccagtagtaaacacagatgcatggactcctcagcggcttttctgcaggggttgtggcagcattaccatcctggcttacctcctcctgacgttgcggacatggagttcgggccacccacagtcaatgataagcttatgagattcttcgatcactgcgagaagtttctcactgaagtggagaagaatgccaccgccctgtatcacgtggaggcattcaagaccggcccagaaatgcagaatatcctcaagaaggtcgctgcaaccctgcaagttcccgtgaacgacctgaatgcgggactgagccagtttttgcttcagtcttccagcagtctcgtcatgcaaaggcttttcttccactgttttctaagttgggctactagtaagactcgaaacccctag

SEQ ID NO: 231181 - DNA, 1464 bp, synthetic construct
  misc_feature 1..1464: note = Description of Artificial Sequence: Synthetic coding sequence
  source 1..1464: mol_type = other DNA
atgctgcgggcacccggttgtctactcagaacgtcggtagcccctgctgccgcactcgcagccgcactcctgagctcacttgcccgatgttctttgctggaaccccgagatccagtggctagcagtttgagtccttatttcgggactaagactcgttacgaagatgtgaatccggtcctgttgtccggccctgaggccccttggcgcgaccccgaacttctggaggggacttgcactccggttcaattggttgcattgatccgtcatggcacgcggtatccaaccgtcaaacaaatccgcaagctgcggcaattgcacgggttactgcaggcccgtggctccagggacggtggggcttccagcaccggaagtagggacctaggggcagctctggcagactggcctctgtggtacgcagattggatggacggacagttagtggagaaaggtagacaggacatgcgccagctggcccttaggctggctagcctatttcctgcgctgttctcaagggaaaactatggcaggctgcgcctgatcacctcatccaagcaccgatgcatggactcaagcgcagcgttcctgcaggggctctggcaacattaccatcctgggctgccaccacccgatgtcgcagacatggaattcggaccacccacggtcaacgataaactgatgcggtttttcgatcattgtgagaagtttctgacggaggtggagaagaacgccacagccctgtaccacgtggaggccttcaagaccgggcctgaaatgcagaatattctgaagaaggtcgctgcaacattgcaagtacccgtcaatgatcttaacgctgatctgattcaagtggcattctttacctgttcgttcgatctggcgataaaaggagtcaagtctccttggtgcgacgtgttcgacatcgacgacgccaaagtattggagtatttgaacgaccttaagcagtactggaagcgaggatacggatacaccattaatagtaggtcctcctgtactctgtttcaagatattttccagcatctcgataaggctgtcgaacaaaaacagagaagccaaccaatctcatcacctgtgattctccagtttggacatgctgagacactgctgccactgctctcccttatgggctactttaaagataaggaacccctgactgcttacaactataaaaaacagatgcaccggaagtttcgtagcgggcttattgtgccctatgcatccaatttaatctttgtcttgtatcattgcgagaacgcgaagacacctaaggagcagttcagagtacaaatgctgcttaatgaaaaggtactgcctctcgcctactcccaagagaccgtgagtttttacgaggacctgaagaatcattacaaagatatcttacaaagttgccaaacctctgaggagtgcgaactcgcacgcgcaaactctacatctgatgagctgtag

SEQ ID NO: 231182 - DNA, 861 bp, synthetic construct
  misc_feature 1..861: note = Description of Artificial Sequence: Synthetic coding sequence
  source 1..861: mol_type = other DNA
atgtgcctctttcagttgtgtggccttgtgagatacatggagtttgggcctcctacagtcaatgataaattaatgcggttttttgaccactgcgagaagtttctgacagaagttgagaaaaatgcgactgccttgtatcacgtggaagcatttaagacgggcccagagatgcagaatatactcaaaaaagtcgctgctacactgcaggtccctgtgaacgacctcaacgcagacctcattcaggtagcatttttcacctgttcctttgacctggccatcaaaggggtcaaaagcccctggtgtgatgtgttcgatatcgacgatgcgaaagttctggaatacctgaacgacctgaagcagtactggaaacgcggatacggctacaccattaattctcgatctagctgcacgctgttccaagatatctttcaacacctggacaaagccgtggagcagaaacagagaagccagcccatttcctctccagtgattctgcagttcggacatgctgaaacactgctcccactcctttcactcatgggatactttaaagacaaagaaccactgactgcatacaattataaaaagcagatgcatcgaaagttcaggtccggcctcattgtgccatatgcatccaacctgatctttgtgctgtaccactgcgagaatgccaagaccccaaaagaacagtttcgagtccagatgctcttgaatgaaaaggtcctgcctctggcctacagtcaggagactgtttcgttttacgaggatctgaagaaccattataaggatatcctgcaaagctgccagacctctgaagaatgcgaactggcaagggctaacagtacttctgatgaactgtag

SEQ ID NO: 231183 - DNA, 1041 bp, synthetic construct
  misc_feature 1..1041: note = Description of Artificial Sequence: Synthetic coding sequence
  source 1..1041: mol_type = other DNA
atggatggacagctcgtcgagaaggggcgacaggatatgaggcagctggccctgcggctggcatcgctctttcccgctcttttttccagagaaaactacgggaggttgagactgatcactagcagcaaacatcgttgcatggatagcagtgcagcattccttcaggggctgtggcagcattatcaccctgggctgccccctcccgatgtcgcggatatggaattcgggcctccaacagtcaacgacaaactgatgcgatttttcgatcactgcgaaaagttcctgaccgaggtcgagaagaacgctacggccctgtatcatgttgaggcgttcaagaccggacccgagatgcagaatatactcaaaaaagtcgctgctactctacaggtccctgtcaatgacctcaatgctgatcttattcaagtcgccttctttacgtgctcattcgatctggctataaagggcgtgaagagtccgtggtgtgacgtgtttgacattgacgatgccaaagtgcttgagtacttgaacgacctgaagcagtattggaaaagggggtacggatataccattaattctcggagttcctgtacactgttccaggacattttccagcacctcgacaaggccgtggaacagaagcagaggtcacagccaatctctagcccagtaatcctacaatttggccacgctgaaacattgctgcccctcctctctctgatggggtacttcaaggacaaggaaccattgacagcttataactacaaaaaacaaatgcacaggaagttccggagtggcttgatcgtgccatacgcgtctaacctgatcttcgtgctgtaccattgtgaaaacgccaagacccccaaggaacagtttcgtgtgcaaatgctgctgaatgagaaagtgctgcccctggcatactcccaggagactgtgagcttctacgaggacctcaagaatcactataaggacatcctgcagtcctgtcagacatccgaggagtgtgaactggccagagccaatagtacttctgatgagctttag

SEQ ID NO: 231184 - DNA, 6212 bp, synthetic construct
  misc_feature 1..6212: note = Description of Artificial Sequence: Synthetic coding sequence
  source 1..6212: mol_type = other DNA
atgctggaggcaattgacaagaatagagctctgcacgccgcagaaagattgcagactaagctgagagagcgcggtgacgtggcaaatgaggacaaactgagcctgttgaaaagtgtccttcaatcccccctttttagccaaattctaagtctacagacatccgtccagcaactcaaagatcaggtcaatatcgctaccagcgcaacgtccaacatcgaatacgcccatgtaccccatctgtcgccagccgtcattccaactctccagaatgaaagtttcctcctgtcccccaacaacggcaatttagaggcacttacagggccaggcatcccacatatcaacgggaaaccggcttgtgacgaatttgatcaactgataaagaatatggcgcagggcagacatgttgaagtgttcgaattgctgaaaccgccttctgggggattaggattctccgtagttggcttgagatctgagaaccgaggtgagctggggatattcgtgcaggaaattcaggaagggagcgtagcccacagagatgggaggcttaaggaaacggaccaaattctcgctatcaacggccaggccctggaccaaacaatcacacaccagcaagcaatctctattctgcagaaggccaaagacactgtgcagttggtgatagccagagggagtctcccgcagttggtctctcccatcgtaagcaggtctccatccgccgctagtaccattagcgcccacagcaaccctgtgcattggcagcatatggagacgatcgaactggtaaacgatgggtcaggcttgggcttcggtatcatcggagggaaagcaaccggggtgatcgtgaaaacaatactacccggaggggtggccgatcaacacggtcgcctctgcagcggtgaccacattctgaagatcggcgacacagacctagcaggaatgagttccgaacaggtcgcccaagtcttgagacagtgtggcaaccgcgtcaaactgatgatcgcaagaggcgcaatcgaggagaggaccgctccaacagccctcggcattaccctgtcctcttcacccaccagtacacccgagctccgtgttgacgcaagtacccaaaagggggaagagtcggaaacgtttgacgtggaactgactaagaacgtccagggactgggtattaccatcgccggttacatcggagacaaaaagctggaaccgagcggcatctttgtaaaatcaatcactaagtctagcgctgttgaacacgatgggagaattcagatcggagaccagatcatcgcagtcgatggcacgaacctccaggggtttaccaatcaacaggccgtggaggtcctccggcacaccggtcaaaccgttttgctcacactcatgaggagaggcatgaagcaggaggcagagctcatgagccgggaagacgtgacaaaggacgccgatctgtcacctgtgaatgctagcattataaaagaaaactatgaaaaagacgaagatttcctgagctcaaccaggaacactaacatactcccaactgaggaagaagggtacccactcctgagcgctgagatcgaggagatcgaggacgcccaaaagcaggaggccgcactgctgaccaaatggcaaagaatcatgggaatcaattatgagatcgtcgtcgctcatgtcagcaaattctccgagaattccggactcggcatatccttggaggccacggtgggccaccacttcattagaagtgtactccccgaaggcccagtgggccacagcgggaagctgttctctggcgacgagctcctagaagtgaacggtataactctgcttggggaaaaccaccaggatgtggtgaacatcctgaaggagctgcccatcgaggttacaatggtttgttgtcggagaacagtccccccaacaacacaaagcgagctggattcactcgacttgtgcgacatcgaactaacagaaaagccccacgtggatttaggggaatttattgggtcctccgagacagaggatcctgtgctggcaatgacagatgccggacagtctacagaggaggtgcaggctccactcgctatgtgggaagcaggtattcagcacatcgaactggagaagggatcaaagggcttgggcttcagtatactggattaccaagacccaattgatccagccagtaccgttattatcatcaggtctttggtgccaggcggtatcgccgaaaaggatggcaggctgctgcctggagaccgcctgatgtttgtcaacgatgtaaatctggagaatagcagtctggaagaggctgtggaggccttgaaaggagctcctagcggtacagtcaggatcggggttgcgaagccactgcccttatctccagaagagggttacgtctccgctaaggaagatagtttcctctaccctccacactcatgtgaagaggcaggactggccgataagcccctcttcagagccgaccttgccctcgtgggcacaaatgatgcggatctggtagatgaaagcacctttgaatctccttattcaccagagaatgatagcatctactccacccaggcaagtatcctgtcactgcatggaagctcatgtggcgatgggctcaattacggttcaagtctgccgtcctcacccccaaaggacgtgatcgaaaacagctgcgaccccgttctggacttacacatgagtctagaagaactgtacacacagaacctgctacagagacaggacgaaaatactccttccgtggacatctctatgggccctgcaagcggattcacaattaatgactacacacccgctaatgcaattgagcaacagtacgaatgtgaaaacactattgtttggaccgaatctcatttgcccagcgaggtgattagcagcgccgaactgccaagcgtgctgccagatagtgcgggaaaggggtccgagtacctcttggagcaatctagcctggcttgcaacgctgaatgcgtcatgctgcagaatgttagcaaggaatcttttgaaagaacaattaacattgcgaaggggaactcatctctagggatgacggtctcagcaaataaagatgggctggggatgattgtgcgaagtatcatccatggaggagccatctcccgtgacggcagaatcgcaattggggattgtatactgagcataaatgaggagtctactatcagtgtgacaaatgctcaggcacgggcaatgttaagacggcactcccttatcggtcctgacatcaagatcacctatgtccccgctgaacatctggaggagtttaaaatcagtcttggacagcagagtggcagggtgatggccctcgatatattttccagctacacgggcagagacattcctgaactgcccgagcgggaagaaggcgagggggaagaaagtgagctgcaaaatactgcctactcaaactggaaccaacccagacgggttgaactctggcgcgaaccctctaaatctctgggaatctccatagtaggtggtcgcggaatgggcagtcgcctcagtaatggggaagtgatgcgtggaattttcattaagcacgttctggaagactcccccgctggcaagaacggcactttgaagcccggtgaccgtattgttgaggtcgatggcatggatctgcgggatgcttctcacgagcaagccgtcgaagccataagaaaagcagggaatccagtggtgtttatggttcagtctattattaatcgtccgaggaagagtccacttccatccctccttcacaacctttaccccaagtataattttagtagtactaaccccttcgctgactctctacagatcaatgcggataaagccccatcacaaagtgagtcagagcctgagaaggctccactttgtagtgtacctccaccaccgccttcagccttcgcagaaatgggctccgaccacacccagagttccgccagcaagatatctcaagacgtggacaaagaagatgagtttggctatagctggaagaatatccgcgagaggtacgggactcttactggagagttgcacatgatcgagctggagaagggccactccgggctcggtcttagcctggcaggaaacaaggacagaagccggatgtctgtgtttatcgtggggattgaccccaacggggctgctggcaaagacggcaggctgcagattgccgatgaactgttagagatcaacgggcagatcctctatggcaggagtcatcagaacgcttcatcaatcataaaatgtgcacccagcaaagtgaagatcatttttattcgaaacaaggatgccgtgaatcaaatggcagtctgccccggtaacgcagtggagcccttgccttctaatagcgagaatttgcagaacaaggagaccgaaccaaccgtcacaacatctgatgctgcagttgacctgtctagttttaagaatgttcagcacctcgagttgcccaaggaccaggggggtcttggaatcgccatctctgaagaggataccctgagtggcgtgatcatcaagtcactcactgaacacggcgtggcagctactgatggcagactgaaagtgggggaccaaatactggcggtggacgacgagattgtggtcggctaccccatcgagaaatttatttctcttctcaaaacagcgaagatgacagtgaaactgaccattcacgccgaaaatcctgacagtcaggccgtgccttccgccgctggcgctgcctctggagaaaaaaagaattcttcccaaagcctgatggtacctcaaagtggcagtcccgaaccagaaagtatacgcaatacctctcgcagctccaccccagcaatttttgcgtcagaccccgctacatgcccaattatacctggctgcgagaccaccatcgaaattagtaaggggagaaccggcctcggcctgtccatcgttggaggctccgatactctcctcggcgcaatcattattcacgaagtgtatgaggaaggagctgcatgtaaggatgggagattatgggccggagaccaaatcctggaagtgaatggcatcgatttgaggaaggccacccatgatgaagctatcaacgttctccgccagacaccgcagcgagtcaggctgactctatacagagacgaagcaccctataaggaagaagaagtgtgtgacactcttaccattgaactccagaagaaacccggaaaaggactgggcctatctattgtcggaaagcgaaacgacactggtgtcttcgtctctgatattgtgaagggaggaatcgctgatgccgacgggagacttatgcagggcgatcagattttaatggtcaatggggaagacgtcagaaatgccactcaggaggcagtagccgcactcttgaaatgttcgctgggaacagtgactctcgaggtgggcaggatcaaggcaggaccttttcactcagaaagacggccatctcagtccagccaggtgtcagagggaagcctcagctcctttacttttcccctgtctgggtcctccacatcagagagcctggagagcagttccaaaaaaaatgccttggcgagtgaaattcagggtctccgaaccgtagagatgaaaaaggggcctaccgacagtctcggaatttcaattgcaggtggcgtgggaagtcctctgggagacgtgccaattttcatcgcaatgatgcatcccaccggcgtagcagcccagactcaaaagcttagggtgggcgatagaattgtcaccatctgcgggacctcaacagagggcatgactcacacgcaagccgtgaacctcctgaagaacgccagcggatctatcgagatgcaggtggtagccggaggggacgtaagtgttgttacagggcatcagcaggagccggcttctagtagtctaagcttcactgggttgacctcaagttcaattttccaggatgatctgggaccaccacaatgcaaaagtatcacgcttgaacgagggccagacggtctaggtttctcgatagtcggcggttatggcagcccgcacggagacttacccatttacgtcaaaactgtcttcgccaagggcgctgcatctgaagacggtcgacttaaaaggggagatcaaataattgccgtgaatggacagagcctggagggcgtcacacacgaggaggcagtcgccatcctgaaacgtacgaagggtacagttacccttatggtgctgagtta

SEQ ID NO: 231185 - DNA, 6212 bp, synthetic construct
  misc_feature 1..6212: note = Description of Artificial Sequence: Synthetic coding sequence
  source 1..6212: mol_type = other DNA
atgcttgaagcaatcgataagaaccgcgctctgcatgcagcagaaagactccaaacaaagctccgggaacgaggagatgtagccaatgaagacaagctgtcgcttttgaagtcggtgctgcaatccccactcttcagtcagatcctgtcattacaaacatcagtccagcagctgaaggatcaagtaaacattgccacctccgctacaagcaatatcgagtatgcacatgtgccacatttatcccctgccgtgattcccacgctgcagaacgagtctttcttactgtctcccaataatgggaacctggaggcactcacgggcccagggatcccacatatcaatggaaagcccgcttgtgacgagtttgaccagctgataaagaatatggctcagggacgccatgtggaagtgttcgagctcctcaagcccccatccggagggcttgggttttccgtggttgggctgagaagcgagaacaggggtgagctcgggatattcgtgcaagagatccaggagggttccgtagcacaccgggacggacgactgaaggagacagatcagatcttggctatcaacggacaagcactcgaccaaacgattacacaccaacaggctatcagtattctgcagaaggcgaaagataccgtccagctggtcattgctcgcggaagtttacctcagctagtgtctcccatcgtctcgagatcaccaagtgctgcctccacaatctccgcgcatagtaaccccgtgcattggcagcacatggaaactatcgagctcgtgaatgacggatctggcctaggatttggcattatcgggggtaaggcaaccggcgtcatcgtcaaaaccattcttcccggaggcgttgccgaccagcatggacgcttatgttccggcgaccatatcctgaaaattggggacacagatctggccggaatgagcagtgagcaggttgcccaggttctccgccagtgtggcaaccgggtcaagctcatgatagccagaggagcaatcgaagagcgtacagcacccacggctctgggaatcaccctcagcagttctcctactagcacgcccgaactcagagtcgatgccagcacccagaaaggcgaagagagcgaaaccttcgatgttgagctgaccaaaaatgtccagggactgggcattacaatagctggatacataggcgacaagaagctcgaaccttctggaatcttcgtaaaatctatcactaagagcagcgctgtggaacatgacggaaggattcagatcggcgaccagatcatcgctgtcgacggcaccaatctgcagggatttacaaatcagcaagcggtcgaggtgctgcggcacactggacaaaccgtgctactaactctgatgagacgcggaatgaagcaagaagccgaattgatgagtcgcgaggatgtcaccaaagacgcggatctgagccccgtaaacgcgagtatcattaaggaaaattatgagaaagacgaagacttcctttcgtctacccggaacacaaatatcctaccaactgaggaagagggttaccctttgctgtctgccgagatcgaggaaatagaggatgctcagaaacaggaagcagctttactgacaaagtggcagcgtatcatgggaattaactacgagatcgttgtggcacacgtcagtaaatttagtgaaaatagcggcttgggcatttccttagaagctaccgtcggccatcacttcattagaagtgtgttacctgagggccctgtggggcattcaggaaaattgttctcaggggatgaactgttggaagttaatggcattactctgttgggagagaaccaccaggacgtcgtcaatatattgaaggagttaccgatcgaagtaacaatggtgtgctgccgccgtacagtccccccaacgacccagagcgagttggacagtctggacctgtgtgacatagaacttacagagaaaccgcacgtcgatcttggggaatttattggatcaagtgagactgaggatcccgtcttggctatgacggatgctgggcagagtacagaggaggtgcaggccccactggctatgtgggaagctgggatacagcatatcgaactagagaaaggttctaaaggcctcgggttcagcatcttagactatcaggaccccattgacccagcttcgaccgtgatcattatccggtctctggttcctggtggtattgcagagaaagatggacgtctattgcccggagaccgattaatgttcgtgaatgatgtgaacctagaaaattcctccctggaggaggccgtggaggcattaaagggggcaccctcgggcacagttcgcattggagtggccaagccactgccactaagccccgaggaagggtacgtaagcgcaaaggaggactcgttcctctatcctccacatagctgcgaggaggcaggtttggcagacaagcctttgttccgagctgatctcgctctggttggtaccaatgacgcggatctggtggatgagagcacctttgagtcaccctatagccccgaaaacgactcaatctattcaacacaggcctccattctctcactccacggtagctcatgtggtgatggcctcaactacgggagctcattgcccagttcccccccaaaggacgtcatcgaaaatagctgtgatccggtgctggatctccacatgtccctggaggaattatacactcagaatttgctacaaagacaggacgaaaatacccctagcgttgatattagtatgggcccagctagtggatttacgatcaatgattatacaccagctaatgcaatagagcaacagtacgaatgtgagaataccatcgtgtggaccgagtcacacctgccctcggaagtgatttccagcgctgaattgccttctgtcttgccagattcagctggaaaaggcagcgaatacctactagagcagagcagtttggcgtgtaacgctgaatgcgtgatgctgcagaatgtaagcaaggaatcctttgaaagaaccattaacatcgccaaagggaactcctctctgggtatgacggtaagtgctaacaaggatggattgggtatgatagtacgcagcattatccacggcggagctatttctcgggacgggcgaattgccatcggtgactgcatcctcagcattaacgaagagagtacaatttcggtgacgaacgcccaggcccgagccatgctgaggcgccacagcctgatcgggcctgacattaagattacatacgtgcccgctgaacacctggaggaattcaagatttctcttggccagcagagtgggagagtcatggccctcgatatatttagtagctacaccggccgtgacattcctgagctgcccgaaagagaggagggggaaggtgaggagtctgagctgcagaacacagcctattccaactggaaccaaccccgtagggtggagttgtggcgggagccctccaagagtctgggaatctctattgtgggaggcaggggcatgggaagcagactctccaatggtgaggtcatgcggggtatctttatcaaacacgtgttagaggactctccagccggaaagaacgggactctgaagccaggagatcgaatcgtggaggtagacggaatggacctgagggatgccagccacgagcaagcagtggaagctatcaggaaggccggaaacccagtcgttttcatggtccagtccatcattaacagacccagaaagagtccattgcctagcctcctccataacctttatccaaaatacaacttttccagcacaaatcctttcgccgatagtctgcaaattaatgccgacaaagctccctcacagtctgagtccgaaccagaaaaggctcccctgtgctcagtgccgccaccaccaccctctgcgttcgccgagatgggttcagaccacacacagtcctcggccagcaagatctcgcaggacgtcgataaggaggacgagtttggatattcttggaagaacatcagagaacgatacggtacactcactggagaactacacatgattgagctggagaaggggcatagcggcttgggtttgtctctggctggaaacaaggatcggtcccgcatgtcggtgttcatagttggcatcgacccaaacggggctgctgggaaggatggcagattacagattgcggatgagctgctggagatcaacgggcagatcctgtacgggaggagtcatcagaatgcaagttctattatcaaatgtgctccctcaaaagtgaagatcatcttcattcgcaataaagacgctgtaaatcagatggctgtatgtcctggtaacgctgtagagcctttgccatcaaactctgagaaccttcagaacaaggagactgagccgacagttactacatccgacgccgctgtggatctcagcagttttaagaatgtgcagcaccttgagctgcctaaagatcaaggtggccttggcattgccatttctgaggaagacaccctcagcggagttatcatcaagagccttaccgagcatggcgttgctgccacagatggccgattaaaggttggagatcaaatcctcgcagtcgatgacgagatagtggtgggttatcctattgagaaattcatcagtcttcttaaaaccgcgaaaatgaccgttaagttgacgatccacgccgaaaaccctgattctcaggccgtgccctccgctgctggggcagccagcggcgaaaaaaaaaattcctcccagagccttatggtgcctcagtcagggtctccagagccagagagcattagaaacacatcccggagcagtacgcctgcaatcttcgctagcgatccagccacatgcccaatcatacctggatgcgagaccacaattgagatttctaaagggcgtaccgggctcggcctttcgattgtagggggatcagacacactactgggggcaatcatcatccacgaagtgtatgaggagggtgctgcatgcaaggatggaagactctgggccggagaccagatcttggaagttaacgggattgatctccgcaaggcaacccacgatgaggcgatcaacgtgttaaggcaaacaccccagcgcgtacgcctcaccctatatagggacgaagccccttataaagaagaggaggtgtgtgacacactgaccatcgagttacaaaaaaaaccagggaagggcctgggacttagtattgtggggaaaaggaacgatacaggcgtgttcgttagcgatattgtgaaagggggaatcgccgatgccgacggcagactaatgcagggcgatcagatcctgatggttaacggggaagacgtgagaaatgctacgcaggaagcagtggccgctctcctcaagtgctcactggggactgttactctggaagtgggcaggatcaaagccggtcctttccattctgagcggagacctagtcagtcatctcaagtttctgaaggcagtctctcaagcttcaccttccccctttccggatccagtaccagcgagagcctggagtcatcttccaaaaaaaatgcactggcatccgagattcagggtctgcgcaccgtggaaatgaagaagggtcctaccgatagcttgggcatctccatcgccggtggagttggctcacctctcggcgatgtgcccatttttatagcgatgatgcatcctaccggagtggccgctcagacccagaagctgcgtgtgggcgaccgtattgttaccatctgcgggacgagcacggagggaatgacacacacccaggctgtgaacctgttaaagaacgctagtggatcaatcgagatgcaggtagtggcgggtggcgatgttagcgtcgtcacgggacaccagcaggaacccgcatcttcctccctgagtttcacaggactaaccagcagttcaatttttcaggatgatctcggaccgccacagtgtaaaagcattactctggagagaggcccagacggtcttggtttctccattgtggggggatatggctccccccacggggatctgccaatctacgtgaagacggtgttcgccaagggcgctgcgagcgaagacggacggctgaaacggggtgatcaaataatagccgtaaatgggcagtctcttgagggcgtaacccatgaagaggcagtcgctatattgaaacgtactaagggaactgtaaccctcatggtattgtctta

SEQ ID NO: 231186 - DNA, 6125 bp, synthetic construct
  misc_feature 1..6125: note = Description of Artificial Sequence: Synthetic coding sequence
  source 1..6125: mol_type = other DNA
atgttggaagcaatcgataagaatcgggctcttcacgccgcagagaggctccagactaaactgagagaacgcggagatgttgcaaatgaagataaattatcactgctcaagtctgtcctccaatctcctctattctctcaaattctgtccttgcagacctctgtccaacaactcaaggatcaggtgaacatcgctacttccgccacaagcaacatcgagtatgcacacgtgccacatcttagtcctgctgttattccgactctccaaaatgaaagctttctgctttctcccaataatggcaacttggaagccctaaccggtccagggatcccccacatcaatggtaagcctgcttgcgacgagttcgaccagctgatcaagaacatggctcaaggaaggcacgtcgaggtctttgagcttctgaaaccaccaagtgggggtcttggcttcagcgtggtcggcctccggtccgagaacaggggagaactcggcatattcgtgcaagagattcaggaggggagcgtggcccaccgcgatgggaggcttaaggagacagaccagattctcgccattaacggccaggctctggatcagactatcactcaccagcaggcaatctctattctgcagaaggctaaggataccgtacaactggtcattgctagaggctccctgcctcagctcgtcagtccgatcgtcagtagaagtccgtctgcggcatcaacgatttctgcgcactctaaccccgttcactggcagcatatggaaacaatcgagctagtgaatgacggcagcggactgggattcgggatcattggcggtaaggccaccggcgtgattgttaaaaccatcctgcctggtggtgtcgccgaccagcacggtcgcctgtgcagcggcgatcatatccttaaaattggagacacggatctggccggaatgtccagcgagcaggtcgcccaggtgctgcgtcaatgcgggaatcgggtcaagctaatgatcgcccgtggggcaatcgaggagcggactgctccaaccgctctgggaataaccttgagtagttccccaaccagcacccctgaactgagggttgacgcctcgactcaaaagggagaggagtccgagacatttgacgtggaattgaccaagaatgtccagggactgggaatcaccattgcaggctacataggtgataagaagctggaacccagcggaatttttgtcaagtctattacaaagtcctccgctgtcgagcacgacggaaggatccaaatcggcgaccaaatcattgcagtggacggcactaaccttcagggcttcacaaatcagcaggctgtggaggtcctgcgccatactgggcagacggtcttattaaccctgatgcggagggggatgaagcaggaagcagaactcatgagtagggaggacgttactaaggacgcagacctgtcccccgtaaatgcttctattatcaaagaaaactatgagaaggatgaagattttctttcttctacaaggaacacaaatatcctgccaaccgaggaagagggttatccactgctgagcgcagaaatcgaggaaatagaggacgctcaaaagcaggaggcggctctcctgacaaagtggcagcggattatgggaattaactacgagattgtggtcgcccatgtatctaaattttcagagaactctgggttgggcatatcactcgaggccactgtggggcaccacttcattcgctccgtgttgcccgaagggccagtcggacattcaggtaaactgttttctggggacgaactcctggaagtaaatggtataactctccttggggagaaccaccaggatgtggtgaacatacttaaggaattgcccatcgaagtgaccatggtatgttgcagaaggactgtgccccctaccacacagagcgaattagacagtctcgacctttgcgatatcgaactgactgagaagcctcatgtagacctaggcgagttcattgggtcgagtgagaccgaggacccagttctggccatgactgatgcgggacagagcaccgaggaagttcaagcccctttagccatgtgggaggccggtatccagcacatagaactcgaaaaaggcagcaaaggactggggttttccatcctcgactatcaggatcctatcgaccctgccagcaccgtgatcatcatacgcagcctggtccccggtggaatcgccgaaaaagacgggcgtctgttacccggtgatagactaatgttcgtgaacgatgtgaatctggaaaactcctctctggaagaagccgtggaggccctgaaaggtgcaccctcgggcactgtccgaatcggcgtggcaaagcctcttccacttagccccgaagagggatacgtctctgccaaagaggattcttttctgtaccctccacactcgtgtgaagaggctggactcgccgataaacccttgttccgtgctgacctcgccctggttggaaccaacgacgcagatctcgtcgatgaaagtactttcgaatctccctatagcccagagaacgattccatctactctacccaggcatctatcctgagcctgcacggtagcagttgtggggacggtctcaattacggatcatccctgcccagcagccctcctaaggacgttatcgagaatagttgcgaccctgtcttggacctgcacatgagtttagaggagctctatactcagaacctgctgcaaaggcaagacgagaacaccccaagcgtcgacatttcaatgggccctgcctcaggcttcaccattaacgactataccccagccaacgctattgagcagcaatatgagtgtgaaaacaccattgtgtggactgaaagtcacctccctagcgaggtgatcagctctgctgaactcccatctgtccttccggactcagccggtaaggggtccgaatatctgttggaacaatcttctcttgcatgcaacgctgagtgcgtgatgttacagaacgtttccaaagagagtttcgagaggactattaacatagccaaagggaattccagtctggggatgacagtctccgctaacaaggacggcctcggaatgatcgttcggagtataatccatggtggagcaatctcacgggacggaaggatcgctattggcgattgtatcctgagtatcaacgaagagtcaacgatctcagttacaaatgctcaggcgagagctatgctccgccgtcacagcctgatcgggcctgacattaagattacctatgtacccgcagagcacttggaggaatttaagatatccctggggcagcagtcagggcgagttatggcactagacattttctccagctatacagggagagacattccggagctcccagagagagaggagggagagggggaggaaagcgaactacagaataccgcatattcaaattggaatcagcctcgtagggtggagctttggcgtgagccatcgaagtccctggggatctccattgtcggcggtagaggtatggggagccggctgagtaatggcgaggttatgaggggaatttttatcaaacacgtattggaagactctcccgcaggtaagaacggaactctgaagcctggggatcggatagtcgaggtggacggtatggatctccgggacgcctcgcacgagcaggccgttgaggcgatacgtaaagcgggtaaccctgtagtgttcatggtgcaaagtattataaaccggccacgaaagtcacccctcccaagcctactacacaacctgtacccaaagtacaatttttcctccactaatccttttgcagactcccttcagattaacgccgacaaggccccatcccagagtgagtcggaaccagagaaagccccattgtgctccgtaccccctccaccaccctccgctttcgcggaaatggggtccgatcatacccagtcttctgcaagcaaaatcagtcaggacgttgacaaagaggatgagtttggctactcttggaagaatatcagggaaagatacggaaccctgaccggtgaactgcacatgattgaactcgagaagggccatagcggtctcgggttaagtttagccggtaataaggaccggtcgcggatgtctgttttcatcgtgggaatcgacccaaatggcgcagcaggtaaagacggcaggctgcaaatcgccgatgagctgctggaaattaacggacagatcttatacggccgatctcatcagaacgcaagcagtatcattaaatgcgccccttcaaaagtaaagatcatttttattcgcaataaagatgccgtgaaccagatggccgtctgcccaggcaatgccgtggaacccttgccgtcaaacagcgaaaatctccagaataaagagacggagcccacagtgaccacttcagatgcggctgtagacctgtcttccttcaagaatgtccagcatctcgaattaccgaaagatcagggcggactgggtattgcgatttcagaggaggacaccttgtctggagttatcattaaaagtcttactgaacacggagtcgccgctaccgatgggagactgaaggttggggatcagatcctggccgtggatgacgagattgtcgtaggctaccccatagagaaattcataagcctcctgaaaactgcaaaaatgaccgtaaagctcacaatccatgccgaaaatcctgattcgcaggctgtgccaagtgcggctggtgcagcatccggggagaagaagaactcttcacaatccctgatggtcccacagtcgggatcccccgagcctgaaagtatacgaaacacctcgagaagttccacccctgctatctttgccagtgatcccgctacatgcccgattattcccggatgtgagaccacaatcgaaatctcgaaggggaggaccgggctggggctgtcgatagtaggaggctctgacaccttgctcggcgcaatcataattcacgaggtgtatgaggaaggtgcagcctgcaaggacggcaggctgtgggccggtgatcagattctggaagtgaatgggattgatctgcggaaggccacgcatgatgaggcaataaacgtgctgcgacagacccctcagcgggtccgcttgactctataccgagatgaggccccttacaaggaggaggaagtctgcgatacattgacaattgagttgcagaaaaaaccgggaaaaggcttgggactaagtatcgttgggaaaaggaatgatacgggggtttttgtaagtgacattgtcaaaggtgggatcgccgatgcagatggcagactcatgcagggggaccaaatcctgatggtgaacggcgaggacgtgaggaacgcaacccaagaggctgtggccgcacttttaaaggtttcagaaggatctctgtcatcgttcaccttcccactatccggatcttccacttccgagtcattggagtcaagttccaagaagaatgctctggcgagtgaaatccaggggctcagaactgttgaaatgaagaaaggaccaacagacagcctgggcatcagtatagccggaggggtggggtctccacttggggacgtacccatctttatcgccatgatgcaccctaccggggtggcggctcagacacagaaactgagagtgggtgaccgcatcgttaccatctgcggaacctccacggaaggaatgacccacacccaggctgttaacctgctcaaaaacgctagcgggtcaatcgaaatgcaagtggtggcaggtggcgacgtaagcgtggtcaccgggcaccagcaggagcccgcatcctcatcgctcagctttacaggacttacgtctagcagcatcttccaggacgatctggggcctccccagtgcaagagcatcaccctggagcgcggacctgatggcctgggattctccatcgtggggggatacggcagccctcacggggacttacctatctatgtcaaaacagtgtttgcaaaaggagcagcgtctgaggacggtcgtttgaagcggggagaccaaattattgcagtgaatgggcaatcgctggaaggcgtcacacatgaggaggcagtggcgatcttaaaacgtaccaagggtaccgtaacgctcatggtgctcagcta

SEQ ID NO: 231187 - DNA, 5852 bp, synthetic construct
  misc_feature 1..5852: note = Description of Artificial Sequence: Synthetic coding sequence
  source 1..5852: mol_type = other DNA
atgctagaggcaatcgacaaaaaccgcgcactgcatgccgcagaaagactccaaaccaagctgagagaacgtggggatgtcgcaaacgaggacaagcttagcttgcttaagtcagtcctgcagtccccactgttctcacagattctgtcactccagaccagtgtgcagcagctcaaagaccaagtgaacatcgccacaagtgctacgtcaaacattgagtacgctcatgtgccacatctcagtccggcagttatccctactctgcagaatgagtcctttctgctcagccctaacaacgggaatctggaagccctgactgggccaggaattccacacatcaacggtaaaccggcttgcgatgagttcgaccagctgatcaagaacatggcacagggaagacacgtagaggtgtttgagctgttgaagcctcccagcgggggtctcgggttttccgtagtgggcttaagatccgaaaacagaggagaattaggtatattcgtccaggagatacaggaggggtctgttgcacatcgcgacggcaggctcaaggaaaccgatcagatcctagccatcaacggtcaggccctcgaccagaccatcacacaccagcaggccatctctattctacagaaagccaaggatactgtacagctggtgattgcccgagggtcgctcccccagctcgtcagtcccatagtctctagatctccaagcgccgctagcacgatcagtgcacacagtaatccggtgcattggcagcatatggaaactatcgaactcgtgaacgatggatccgggctgggatttggcataataggaggtaaggcgaccggggtaatcgtgaagacaatcctccctggcggtgtggccgatcagcacggaagactgtgttccggggaccacatcttaaaaatcggggacacagacctggccggaatgtcttccgagcaagttgctcaggtcctgcgtcaatgcggcaacagagtgaaactcatgatagcccgtggggctattgaggagagaacggcccctaccgcactcggcatcacgctttctagttcccccacatcaacgcctgaacttagagtcgacgcctcgacccagaagggggaggagagcgaaactttcgatgtggagctgaccaagaatgtgcagggcctcggcattactatcgccggatacataggggataaaaagctggaaccatccggaattttcgtgaaaagcattacgaaatcctctgcggtggagcacgacggtagaatccagattggggatcagatcattgcagtggacggcactaacttgcagggattcacaaaccagcaggcagttgaggttctacgtcataccggccagaccgttctgcttaccctgatgagacgtggcatgaagcaggaggctgagctgatgtctagggaagacgtaactaaggacgcggatcttagccctgtgaatgccagcatcattaaggagaattacgaaaaggatgaggattttctgagctctacacgcaacacgaatatcctgccaacagaagaagaaggctatccattgttatctgcggaaatcgaggagatcgaagacgcccaaaagcaggaagccgctctcttgaccaagtggcagcgcataatgggaatcaactatgagatcgtggtggctcatgttagcaagttttcagagaattctggactcgggatctctctggaagctaccgtggggcaccactttatcaggtccgtcttaccggaaggtcccgtcgggcattccggtaaactatttagtggagatgagctcctggaggtgaacggaataacattacttggcgaaaatcaccaggatgtcgtaaacatccttaaagagctccccatagaggttaccatggtctgttgcaggcggacagtcccgccaactacacagtcagaactggacagtctgggtattcagcacattgaactggaaaaaggttccaaaggcctgggcttctctatattggattaccaagaccctatcgacccagcttctacggttattattatcaggtcactggtacccggagggattgcggagaaggatggcagattgctaccaggggacaggctgatgtttgtgaatgatgtgaatttggagaattcaagcctggaggaagctgtggaagcgttaaagggggcaccgagtggaactgtccggatcggcgtcgcaaagccacttccactgtccccagaggaaggctacgttagcgctaaagaggacagttttctgtatcctcctcattcgtgcgaagaagctggcctggcagacaaacctttgttcagggctgatcttgcactggtgggtacaaatgatgccgacttagtcgatgagagcacgtttgagtctccctactccccagaaaatgactccatctatagcacccaagcttctatcctgtctcttcatggcagttcctgtggggacgggcttaactacggatcatctcttccatcctcacccccaaaagatgtgatcgagaattcctgtgatccggttttagacctgcacatgtcactggaggaattgtatacccaaaatctcctccagaggcaagacgaaaacacgccttccgtagacataagcatgggccctgccagtggatttacgatcaatgattacacccccgcaaatgctattgagcagcagtatgagtgcgaaaacactatagtgtggacggagagtcaccttcccagtgaggtgattagcagcgccgagctgccatccgttctgccagacagcgcaggtaaaggtagtgaatatctgctggagcagtcttccttggcctgcaacgctgaatgtgtgatgctgcaaaatgtcagtaaagagtcgtttgagaggacaatcaacatcgccaagggaaatagttcattaggaatgacggtgagcgctaacaaagacggcctgggcatgattgtgaggagtataattcacggcggagccatttcccgcgacggtcgtattgcgattggtgactgtatcctgtctataaatgaggaaagtaccatctctgtcacaaatgcccaggcaagagctatgctcaggaggcacagcttaatcggacctgacattaagattacatatgtacccgctgaacatttagaagaattcaaaatcagtctcggtcagcagtctggcagagtgatggccctggatatctttagtagttacaccggcagagacatccccgaattgcctgagagggaagaaggtgaaggggaagaaagtgaacttcagaatacagcctactccaattggaaccagcctcggagagtagaactgtggagagaaccttcaaaaagccttggtatcagcatcgttggcggtagggggatgggctccaggttgagcaacggtgaggtgatgcgaggaatatttattaagcacgttctcgaagatagcccagccggtaagaacggcacccttaagcctggggataggattgttgaggcgcctagccagagcgagagcgaacctgaaaaggccccactctgctcagtgcccccacccccaccctctgcatttgcggaaatgggttctgatcacacgcagagcagcgccagcaagattagtcaggatgttgacaaggaagacgagtttggctattcttggaagaatatcagagagcgttacggaacactcaccggggagttgcatatgatagaactcgagaaagggcatagcggtttgggcttatcgctcgctggcaataaagaccgatcccgtatgtctgtgtttatagttggcattgatccaaatggcgctgccggaaaagatggacgactccagatagccgacgaactgctcgaaatcaacggacaaatattgtatggccgaagtcaccagaatgctagttcaattatcaagtgcgctccaagtaaggtcaaaattatatttattaggaataaagatgccgtaaatcagatggcggtatgccctgggaacgcggtcgagccccttccatccaatagcgagaacctccagaacaaagaaacagaacctaccgtcaccacgagcgatgcagccgttgatctgagctctttcaaaaatgtacagcatctcgaactccccaaggatcaggggggactcgggattgctatctcggaggaagacaccctatcaggagttattattaaaagtcttactgaacacggggtcgcagccactgacgggaggttaaaggtgggcgaccagatcctggccgtcgacgatgagatcgtggttgggtaccctatcgaaaagttcattagcctgttgaagaccgcaaaaatgactgtcaagcttacgattcatgctgagaaccccgatagccaggcagtgccctcagctgccggtgccgcttcgggcgagaagaagaatagctcacaatccctgatggtaccgcaatctggtagtcctgaacccgagagcatccgtaatacatcgcgctcctctacccctgcgatctttgcttcagaccccgcaacatgtcccatcatccccggatgtgaaacgaccatcgagatcagcaaagggcgaacaggtctcggcttgagtattgtgggcggttccgataccctgctgggagccattatcatacacgaggtatatgaagaaggcgcagcgtgtaaagacggacgactttgggctggtgaccagattcttgaagtgaatggtatagatttaaggaaagcaacccacgacgaggccattaacgttttgagacagactccccagagagttcggttaacgctgtatcgtgatgaggcaccctataaggaagaggaagtatgcgacacccttacaatcgaattacagaagaagccaggcaaagggctaggtctcagtatagttggtaaacgtaacgatacgggggtatttgtctccgacatcgtgaagggcggtatcgctgacgccgatgggaggctgatgcaaggggaccagatcttgatggtgaacggtgaggacgtgaggaatgctactcaggaggctgttgcagctctgttgaagtgctcccttggcacagttaccctcgaggtgggccgaatcaaagcgggtcccttccatagcgaacggagaccctcacagtcctcacaggtgagcgagggcagcctgagctccttcacattccccctttctgggtccagcaccagcgagagcctcgagtcctcctcaaagaaaaatgcgctggcttccgaaatacaagggctgcgcactgtggaaatgaaaaagggaccaaccgactccttggggattagcatcgccggaggagttggttcccctctgggcgatgtgccaattttcattgcaatgatgcatcctacaggcgtggccgcacaaacacagaaattgcgagttggagatagaattgtgaccatctgcggaacctcgacagaggggatgacccatacccaagccgtgaacctgctgaagaatgcctctggcagtattgagatgcaggttgtggccggtggggacgttagcgtagttactggccaccagcaggaaccggcaagctccagcctttcctttaccggccttacaagctcttcgatttttcaggatgatcttgggcctccccagtgcaagtcaatcaccctagagcggggacctgatggtctaggattctctatagtaggaggatatggcagcccacacggcgacctgcccatctatgtcaagaccgtgttcgccaagggcgcagcatccgaagatggacgcctgaaacgcggagatcaaattatcgccgtgaacgggcagagcctggagggcgttacccacgaggaggcggtggccattctaaagcggaccaagggcactgttactctgatggtcctcagcta

SEQ ID NO: 231188 - DNA, 915 bp, synthetic construct
  misc_feature 1..915: note = Description of Artificial Sequence: Synthetic coding sequence
  source 1..915: mol_type = other DNA
atgcaaggtgatcagatcctcatggtcaacggggaggatgttcgtaatgccacacaggaagcagtggcagctttgctaaagtgctccttgggaacggtcactctggaagtggggagaattaaggctggaccttttcatagtgagcgcaggccttctcagtcctctcaggtgtccgaagggtctctgtcctctttcacattccctctttctggcagcagcactagtgagtccctggaatcatctagcaagaagaatgccttagcatctgagatacaagggctgagaaccgttgaaatgaagaagggcccaacagatagcctgggcatctccattgcaggaggcgtgggctcccccttgggggatgtgccaatctttatcgccatgatgcaccccaccggagtcgccgcacagacacagaagctccgggtgggagatcggattgttaccatatgtgggacatccacagagggaatgactcacactcaggcagtgaatctcctgaagaacgcgtccggctcgatcgagatgcaggtcgttgcgggaggtgacgtaagcgtggtcactggacatcagcaggagcctgcctcttctagcctgtcttttaccggactgaccagctcttcaatttttcaagacgacctcggcccaccacaatgcaagtctataactctggagcgaggtcccgacggactaggcttttcaatagtgggcggttacggaagcccacatggggacctccctatttatgtaaagacagtctttgcgaagggtgcagcgtctgaagatgggcgtctcaaaaggggggatcagatcattgccgtgaatggacagagtcttgaaggcgtgacacatgaagaggcagtggctatcctgaagcgaaccaaaggcacagttactttgatggttctctcatag

SEQ ID NO: 231189 - DNA, 6125 bp, synthetic construct
  misc_feature 1..6125: note = Description of Artificial Sequence: Synthetic coding sequence
  source 1..6125: mol_type = other DNA
atgcttgaggcaatagacaagaacagggccctgcatgcagccgaaagactgcaaaccaaactaagagaacggggtgatgtcgccaacgaagataagctcagcctgctcaagtcagtgctgcagtctcctcttttctcccagattctttcactccagacctccgtgcagcaactgaaagatcaggtgaacattgcaacgtcggcgacctccaatatcgagtatgcccacgtgccacacctgtctcccgctgttatcccgactctgcagaatgagagcttcctcctatctcccaacaatgggaatctcgaagccttgaccgggccagggatccctcatatcaatgggaaacccgcttgcgatgagttcgaccagctgataaagaatatggcacaggggcgtcacgtggaggtgtttgagctgctcaaaccgccttctgggggactgggattcagcgtagtgggccttcgttctgaaaaccgcggagagctggggatcttcgtgcaggagattcaggagggcagcgtcgcccaccgagacgggagattgaaggagaccgaccagatccttgccattaacggacaggcgctggaccaaaccattacacaccaacaggccatctccatcctccaaaaggctaaggacactgtgcagttagtgattgctcggggatcactacctcagttagtgtcccctatcgtgtcccgcagcccctcagcggcatctaccatatcagctcattcaaaccccgtgcactggcagcatatggagacaatcgaactggtgaacgatggaagcggtttgggctttggaattattggcggaaaggccacaggggtgatcgttaaaaccatcctgccaggtggggtggccgatcagcacggacggctgtgcagcggcgatcacatcctgaagattggcgatacagatctggcgggaatgtcttcagaacaagtagcacaggtgctcagacagtgcggcaaccgggtaaaactgatgattgccagaggcgcaattgaggagcggaccgctcccacagcactcggtatcacattgtcgtccagccctacaagtacgccagaactgagggtggacgcctctactcagaagggagaagaatcagaaacttttgacgtcgagctaaccaaaaacgtgcaagggctggggattacaatagcaggctatataggggataagaagctggaaccctccggcatcttcgttaagtcaatcactaagtcatcggccgtggagcacgatggacggattcagatcggcgaccaaatcattgccgtggacggaaccaacctacagggcttcaccaaccagcaggcagtggaggtgctccgtcacaccgggcagacagtactgttgacccttatgaggcggggaatgaagcaagaggcagaattgatgtcgcgcgaagatgtcaccaaggatgctgacctgagtcctgtcaacgcttccataataaaggaaaactatgaaaaagacgaggactttctcagctctactaggaataccaatattcttcccaccgaggaggaagggtaccccctgttatcagctgaaattgaggagattgaagatgcgcaaaagcaggaggccgctctacttaccaaatggcaaaggattatgggaatcaattacgagattgttgtggcccacgtgagcaagtttagcgagaactcaggactggggatatctctggaagctaccgttggacatcactttatccgctccgtgctgcctgaaggacccgtgggacactcaggaaaacttttcagcggcgacgagctcctcgaagtaaacgggattacactgcttggagagaatcaccaagacgtggtgaatattctaaaggaactgcccatcgaggtcactatggtgtgttgcagacgcaccgtacctccaacaacccagagcgaattagattcactggacctgtgcgacatagagctgaccgaaaaaccgcacgtcgatctcggggagtttatcgggtcttcagagactgaggacccagttcttgccatgacagacgcaggtcagtccactgaagaggtgcaggcacccctcgccatgtgggaagccggaatacagcatattgaactggaaaaaggctccaaaggtctcggcttttctattctcgattaccaagatcctatagatcccgcttccacagttatcatcattcgtagcctcgtcccaggtgggatcgccgaaaaggacggcagactgctgccaggggatcgattaatgtttgttaacgatgtgaacctggaaaatagcagtctagaggaggccgtagaagcattaaagggtgccccttctgggactgttcgcataggcgttgccaaacctctgccactgagcccagaggaggggtacgtcagtgccaaagaagattctttcctttatccgccacacagttgcgaggaagcaggattggccgataaacccctttttcgcgctgatttagccctggtcggcacgaatgacgcagacctggtcgacgaatccacattcgaatcgccttacagccctgaaaacgattctatttactccacccaagcctcaatcctctcattgcacggctcaagctgcggcgacggactcaactacgggagtagtctaccatcttcccctccgaaagatgtgatcgagaattcctgtgaccctgtgctggacctgcacatgagtcttgaggagctttatactcagaacctgctgcaaaggcaagacgaaaataccccatcggtggacatttccatgggcccagcgtcaggatttaccataaacgattatacacccgcaaacgccatcgaacagcagtacgagtgcgagaacaccattgtttggactgagtctcaccttcccagcgaggttatctcctcggccgagctgccaagtgtacttcctgactccgccggtaagggaagcgaatacctcctagagcagtcctcccttgcttgtaatgccgaatgcgtcatgctgcagaatgtgagcaaggagtcattcgagcgcacaataaacattgcaaaaggtaacagctcactagggatgactgtttctgctaacaaggacggacttggcatgattgtgcgctctattatccatggaggggctatcagtagagatggacgcatagctatcggggactgcatactgagcatcaacgaagaatctacaattagtgtgacaaacgcccaggccagagctatgctacgcagacatagcctgatcggccctgacatcaaaataacttatgtccctgcggagcacttggaggagtttaaaatcagccttgggcagcagtctggacgtgtgatggccctagacatcttcagcagttacacagggagagatatccctgagctcccggaacgggaggaaggagagggagaagagtctgaactccaaaatacggcctattccaattggaatcagccaagacgtgtagagctgtggcgggagccctccaaatctttaggaatttccatcgttggcggtcgaggaatgggctctagactctctaatggggaggtcatgcgcggaatcttcatcaaacacgtcctagaggattcacccgctgggaaaaatggaacgcttaagcccggtgacagaattgtggaggtggacggaatggatttgcgcgatgctagccatgaacaggcagttgaggctatccgaaaagcgggtaaccctgttgtattcatggtccagtctattatcaatagacccagaaaatcacccctgccatcactacttcacaatctgtacccgaaatacaacttcagttccactaaccctttcgctgactctctacaaatcaacgctgacaaggcaccttcacaaagcgagagcgaacctgagaaggcacccctctgctctgtgccgccaccacctccttccgctttcgcggagatgggctccgaccacacacagtcaagtgcttccaaaatctcccaggatgtcgacaaagaagatgagtttggttactcctggaaaaatatccgcgaacgctacgggacactgaccggagaacttcatatgatagagctagagaagggccattctgggctagggttatccctggccggtaacaaggatagatcccggatgtctgtcttcatcgtgggaatcgaccccaacggagcagcgggtaaggacggaaggcttcaaatcgccgacgagttgttggaaattaatggccaaatcctgtacggtagaagtcaccagaatgcctccagcattattaagtgcgccccatctaaggtgaagatcatttttatcagaaataaagacgcagtaaaccagatggcagtatgcccaggcaatgccgtagaaccgctcccctctaatagcgaaaatcttcagaacaaggagactgaacctacggtgactacaagcgatgccgcagtggatctcagctcttttaagaatgttcaacatctggagttgcctaaggaccagggcggattgggcatcgccatttccgaggaagatactctgtctggtgtcatcataaaaagtctaactgaacacggtgtggctgccacagatggcaggttaaaagtgggagaccaaatcttggccgtggatgacgaaatagtcgtgggctatcccatagaaaagttcatctcccttctcaaaactgctaagatgacagtgaaattgactattcatgccgaaaaccccgacagccaggcagtcccatccgcagcaggcgcagcctccggcgagaagaagaactcttcacaaagcctcatggtaccacagtctgggagccctgaaccggagagcattcgcaacacatctagatcctcgaccccagccatctttgctagcgatccagccacatgtccaatcatccccggatgcgagacaaccatcgagatctcgaaaggacgcactgggctgggtctgtctattgtcggaggttccgacactctgctcggcgctattattatacatgaagtgtacgaagaaggggcagcgtgtaaagacggtaggctctgggccggtgatcagattctggaagtcaatggcatagacctgcggaaagcaacccatgacgaggctattaacgttctgaggcagactcctcagcgcgttaggctgacactctacagagatgaggccccatacaaagaggaggaagtctgtgatacacttaccattgaattgcagaagaaacctggcaagggactggggctgtctatagtcggcaagcggaacgataccggagtattcgtgtctgatattgtcaagggcggaattgccgacgcagatgggagactgatgcagggggatcagatcctcatggtgaacggcgaggacgtacgaaacgccacacaggaggctgttgcagcactgctgaaagtgtccgagggttcgctgtctagtttcacttttcctctatctgggtcatctacatcagaatcactggaaagttcctccaaaaagaatgccctcgcttcagaaatccaaggactgcgtacagtggagatgaaaaaaggtccgacggatagtctcggcattagcatcgcaggaggtgtgggatctcctctgggcgacgtcccgatctttatcgccatgatgcacccaactggggtcgcagcgcagactcagaaactcagagtgggcgacagaattgttactatttgcgggacatctactgaaggcatgacgcacacacaagctgtcaatctgctgaaaaatgcttcaggctcgatagagatgcaggtggtcgcagggggagacgtgagcgttgtgactggccaccagcaggagcccgcttcatcgtcattgagtttcaccggactgacctctagctctatctttcaggatgaccttggcccaccccaatgcaagtctattaccctggaaagaggccctgatgggctcgggttttctattgtcggtggatacggtagtccacatggagatttgccaatttatgtgaagactgtcttcgctaagggagcagctagtgaagacggcaggctgaagaggggagatcagattatcgcagtgaatggacaaagcttggagggggtaacacacgaagaggcggtagctattcttaagaggactaagggaacggtgaccctgatggtactgagcta

SEQ ID NO: 231190 - DNA, 6113 bp, synthetic construct
  misc_feature 1..6113: note = Description of Artificial Sequence: Synthetic coding sequence
  source 1..6113: mol_type = other DNA
atgctggaggcaattgataaaaatcgagcccttcatgcagccgagcggttacagacgaagctgcgagagagaggggacgtggcaaatgaagacaaactgtctctcctcaagagtgttctccagagtccactattttcacaaattttgagtttgcagaccagtgtccaacagctaaaagatcaagtgaatattgcgacatccgccactagtaatatcgaatacgcccacgttccccacctgtccccggcagttattccaactctccaaaatgagagcttcctgttgtcacctaataacggtaacctggaagccctcaccggaccaggcataccccacattaatggaaaaccagcatgcgacgagttcgatcagctgattaagaacatggcgcagggcaggcacgtcgaagttttcgaactgctgaagcccccaagtggaggcctggggttttcggttgtgggcctccgttctgagaatcgaggggagcttggaatctttgtgcaggagatccaggagggttctgtggcgcatagggacgggcgtttaaaagagaccgaccagattctagcaattaatgggcaggcactagaccagacaatcacccaccagcaggccatttctatcctgcaaaaggcaaaggatacagtgcagcttgtcatagcgagaggctcactccctcaactggtatcgcctattgtgtcacgcagcccgtctgccgcatctactatctcagctcacagcaacccagtgcactggcagcatatggagaccatagagctggttaatgatggatcaggccttgggttcggtataattggcggtaaggccactggggtcattgtcaagacaattttgccaggaggcgttgcggatcagcacggaagattatgcagcggggatcatattctgaagataggggatactgaccttgccggaatgagttctgagcaagtcgcacaagttctgaggcagtgtggcaaccgggtaaaactcatgatcgctcgcggagccatcgaggagcgcacagctcctacagcgttagggattacactgagctcctctccaacttcgaccccggagctccgggttgacgcctcaactcaaaagggcgaagaaagtgaaacattcgacgtggagcttactaaaaacgtccaagggctgggcatcactattgccggatatatcggggataagaaacttgaacctagtggtatcttcgtgaagtcgattactaaatcctccgccgttgagcatgatggaagaatccagataggcgaccagatcattgccgtggatggaaccaatctgcaggggtttaccaatcaacaggccgtggaagtgttaaggcacaccggccagacagtgctgctcactctgatgcggaggggtatgaagcaggaggccgagctgatgtccagagaggacgtgacaaaggacgcagacctgtctcccgtgaacgcttcgataattaaagaaaactatgagaaagacgaagactttctatcttccacccgaaataccaatattcttcccacggaagaggaaggctacccattgctcagcgctgagatcgaagaaattgaggacgcccagaagcaggaagcagcactgcttaccaaatggcagagaattatggggatcaattacgagattgttgtcgcccatgtctctaagttctcagagaattccggactgggtatcagcctggaggcaaccgtcggacaccacttcatccgatcagtgttacccgagggcccagtcggtcactccgggaagctgttcagcggggacgagctgctggaagtgaatggcattaccctgctcggagagaaccatcaggacgtggtaaacatcctgaaagaactgccaatcgaggttaccatggtgtgttgccgcaggaccgttcctcctacaactcagagtgagttagattctctcgacttgtgtgacattgaattgaccgagaaacctcacgtagatctgggagaatttataggtagcagcgaaacggaagatcccgtgctagccatgacagatgccggacagtcaactgaggaagtgcaagcccctctggccatgtgggaggcagggattcagcacatcgaacttgagaaaggctccaaaggactgggcttcagcatcctggattatcaggatcccatcgatccggcttccacagtaataattatcagaagtctggtgcctggtggcatagctgagaaggatgggcgtcttctcccaggcgatcgcctgatgtttgtgaacgatgttaacctggaaaacagctcgcttgaagaagcagtcgaggccttgaagggagccccatctggaactgtgcgcataggggtggccaagcctttgccgctctcccccgaggagggatatgtgtcagcaaaggaggacagctttctgtatcctcctcatagctgcgaggaagcaggcttagccgacaaacctctgttccgtgccgacctggccctggtgggaaccaatgacgcggatttggtagacgagtctacatttgagtcaccatattcacccgagaacgattccatctatagtacccaggctagcatcctgtctctgcatggaagctcctgcggggatgggctcaattacgggtccagcctcccttcttctcctccgaaagatgtaatcgaaaatagctgtgaccccgtgctggacctccacatgtcccttgaagaattgtacacccagaacctcctgcagaggcaagatgagaacaccccctccgtggacatctcaatgggcccagcttccggttttacaattaatgactacacaccggctaacgccatcgagcagcagtatgagtgcgagaatacgattgtttggacggaaagtcatctccccagtgaagtcatcagctccgcagaactgcccagtgtcttgcccgatagcgcaggaaaaggctcagagtatctgttggagcagtccagtctggcttgcaatgccgaatgtgtaatgctccagaacgtgagtaaagagtccttcgagcgtaccatcaatattgcgaaaggcaattcatctttgggaatgacagtgtctgctaacaaggacggacttggtatgatcgtacgatctataattcatgggggagctatctccagggatggtagaattgccatcggagactgcattttgagcataaatgaggagtccaccatttccgttacaaatgcccaggcacgagcaatgctgcgcagacactctttgatcggcccagacatcaagatcacatacgtgccagccgagcacttagaggagtttaagatctcgctggggcaacagtccgggagagtgatggcactggatattttcagtagctataccggccgagacatcccagagcttcccgaacgggaagagggtgagggtgaagaaagtgagctgcagaatactgcttactcaaactggaaccagccgaggcgcgtggagttatggcgtgagccatccaagtcactcggcatatcaatcgttggcggaaggggcatgggctcgcgtctttcgaatggggaggtcatgcgcggtatattcattaagcacgtcttggaggattcccccgctggcaaaaacgggacgttgaagccaggggaccggatagtggaggttgatgggatggacctgcgagacgctagtcatgagcaggccgtcgaagctatccgcaaggccggtaatccggtagtcttcatggtgcagtcaatcatcaatcgcccacgcgctccctcacagagtgagtccgagcctgagaaggcccctctttgttctgtgcctcctccaccaccttccgcttttgcggagatgggcagcgatcatactcagagttccgcaagtaaaattagccaggacgttgacaaggaggatgaattcggctatagctggaagaacatccgggagcggtacggaacactcacgggggaactgcacatgatcgagctggagaaaggccactcaggcctgggcctctccctcgccggaaacaaagaccgctctagaatgtccgttttcatcgtgggaatagatcccaacggtgccgctggcaaagacgggaggcttcaaatcgctgatgagcttctggagataaacggacagatcctgtacggcaggtcccatcagaacgcctcgagtatcatcaagtgcgcccctagcaaggtcaagatcatcttcatccggaataaggatgcggtgaatcagatggccgtgtgccccggaaacgcggtggagccccttccaagcaatagcgaaaatctccagaataaagagacagagcccaccgttacaacaagcgatgcagccgtggatttaagctcctttaaaaatgttcagcatttagagcttcccaaagaccagggaggattgggaattgctatcagtgaggaagacaccctgtctggcgtgattatcaagtcactcactgagcacggcgtggccgcaaccgacggaagactcaaggtgggggaccaaattcttgccgtggacgacgaaattgtggtcggctatcctatagagaaattcatttctctgctgaagaccgcgaaaatgacggtgaagctgacaatccatgcagagaaccccgactcgcaggctgttccctccgctgccggtgccgctagtggggagaagaagaactcttctcagtccctgatggtcccgcaaagcggcagtcctgagcccgagtctattaggaatacctctcggtctagcactcccgcaattttcgcctctgacccagctacgtgtccgattatccccggttgtgagactaccatagagatctctaaaggacgcacaggtcttggactctcaatcgtagggggttcagacaccctgctgggggctattatcatccatgaagtttacgaagagggggctgcttgcaaggacggtagactttgggcgggagatcaaatcctggaagtaaacggaatcgacctgcgcaaggccacccacgacgaggccatcaacgttcttcggcagacaccccagagagtgcgactgaccctatatcgggatgaagctccatataaagaagaagaagtgtgtgatactctgaccatagaactgcaaaaaaagccaggcaagggcttaggtctgtcaatagtggggaagcggaacgacactggggtgtttgtatcagacatcgtgaaagggggtattgcagacgcggacggacgtctcatgcagggagatcagatattgatggtgaatggtgaagacgtgagaaatgccactcaggaagccgtggccgctttgctcaaatgctctttgggcaccgtcacactggaggtaggccgaatcaaggccggacctttccattctgagagaaggccctctcagtcttcccaggtcagtgaagggtcgttatcttcctttaccttccccttgtcagggagcagtacctcggagagcctggaaagtagctccaaaaaaaatgccttggcctccgagatccaggggctgcgaacagtagaaatgaagaagggacctacggactctctgggtatctccattgcaggaggggtgggaagccctctcggcgatgttcccatcttcattgccatgatgcatcccacaggggtggcagctcagacacagaagttgcgagtaggggatagaattgtgaccatatgtgggactagtacagaaggaatgacccatacccaggccgtcaacctgcttaagaatgcaagtggttctatagaaatgcaagtggtcgccggaggcgatgtttcagtggtgacaggtcatcagcaggagcccgcttccagctctctgtcttttacgggtctgacctctagctctattttccaggatgatctaggcccaccacagtgtaagtcgatcaccttggaacggggaccagatggtttgggtttctccattgttggcggttacggaagtcctcacggcgatctccccatttatgtgaaaactgtgttcgctaagggcgctgcttccgaagatgggcgactgaagagaggcgaccaaattatcgccgtcaacgggcaatccttagagggggtgacgcacgaggaggctgtcgccatcttgaaacgcaccaaggggaccgtgactttgatggtgctctcata

SEQ ID NO: 231191 - DNA, 6026 bp, synthetic construct
  misc_feature 1..6026: note = Description of Artificial Sequence: Synthetic coding sequence
  source 1..6026: mol_type = other DNA
atgctggaagctattgataaaaatcgggctctacacgccgctgaacggctccagactaagctccgggagcggggagacgtcgcgaacgaagacaagttgtcactgctcaaaagcgtcctccaaagtcctctgttctcgcaaattctttccttgcagaccagtgtgcaacagctcaaggaccaggttaacattgctacttccgccacgagcaatattgagtacgcccatgtccctcacctgagtccagcggtgattccgacgctgcagaatgaatcatttcttctgagccccaacaatggcaacctggaggccctaaccggacccggtatccctcatatcaatggaaagccggcatgtgacgagttcgaccaactgatcaagaacatggcacagggacggcacgtggaggtgttcgaattgctgaagccacctagtggagggctaggctttagtgtggtgggcctccggtccgaaaataggggagagctgggaatcttcgtacaagagatccaggaggggtctgtggcccaccgagacggtcgcttgaaggagaccgatcaaatcttagcaatcaacggacaggccctggaccagaccataactcaccaacaagctatcagtattttacagaaagccaaggacactgttcaactggtcattgcaagaggctcactcccccagttagtgagccccatcgtgtcccggagcccatctgcagccagcaccatctcagcccactccaacccagtgcattggcagcatatggaaacaattgagctggtaaatgacgggtctgggcttggtttcggcattatagggggaaaagctaccggcgtaatcgtgaagactatcctgcccggtggcgtggcggaccagcatggtaggctctgctctggcgaccacatcctgaagattggcgataccgacctcgcagggatgtcctccgaacaggtcgcacaggtgctgcggcagtgtggtaacagagttaagttgatgatcgcaagaggagctatagaagaacgcacggcgccaacggcactgggaataacactctcatccagccccacatcaacccctgagcttagggtagacgcatccacgcagaaaggagaggaaagcgaaacgtttgacgtggagctgactaaaaacgtgcagggcctggggattacaattgccggatatatcggtgataaaaagctcgaaccctctgggatcttcgtcaaatccattaccaaaagcagcgccgtggagcacgacggaaggatacagatcggcgaccagatcattgctgtagatggaaccaacttacagggctttactaatcagcaggctgtggaggtgctccgacacaccggccaaacagtgctgttaaccctcatgcgcaggggtatgaagcaggaagccgagctgatgtctcgggaggacgttacaaaggacgccgacctttcacccgtgaacgcttcaatcatcaaggaaaattatgagaaggatgaggatttcctctcttctaccaggaacaccaatattttgccaaccgaggaagaaggataccctctgctgagcgcggagatcgaagagatagaagatgcgcaaaagcaggaggctgccctcctgaccaaatggcaaagaatcatgggtatcaattacgagatcgtagtagcacatgtctccaagttcagcgaaaactctggcctgggaatctcccttgaggccacggtcgggcatcattttatccgctctgtactgcctgaaggtccagtgggacattcaggtaaactgttcagcggcgatgagctcttggaagtcaacggaattacattgctcggcgagaatcatcaggacgtcgtcaatattctaaaggaactgcctatagaggtgacaatggtgtgctgtagacgcacagtgccacctacaacgcagtctgagctggattccctggacctgtgcgacattgaacttaccgagaagccacacgtggatctcggggaattcatcggcagttccgagacggaagaccccgtgctggccatgacagacgccggacagtctacagaggaggtgcaggcaccccttgccatgtgggaggctggcattcaacacatcgaattggagaagggatcgaaggggttagggtttagtatacttgattaccaggaccctattgaccctgccagcacagtgatcatcatccggagtctggtgccaggagggatcgcagagaaagacggccgactgctccctggagatcgtctgatgttcgtaaatgacgtaaacttggaaaattcctcactcgaagaggcagtggaagccttaaagggggcaccttcaggaaccgtgagaatcggcgtcgccaagccccttccactctccccggaagaggggtacgtgtcagctaaagaggactcttttctgtacccgcctcacagttgcgaagaagctggactggctgataagccactctttagagctgatctcgctctcgtcggtacgaacgacgcggatttagttgatgagagcacgttcgagagtccatacagccctgaaaacgatagtatttacagcacccaagccagtattctgtctctgcacggctcaagttgcggggacggcctgaactatggctcctccctgccctcttcacctccaaaggatgtcatcgagaacagctgcgatcctgtacttgacctccacatgtctcttgaagagttatatacccagaatctgcttcagcgccaggacgagaacaccccgagcgtggacattagcatgggcccagcctccgggttcaccattaatgactatacacccgctaatgctatcgagcagcagtatgagtgcgaaaatacgatcgtgtggacagagtcccacttgccgtctgaggttatcagcagtgctgagctccctagtgtgctccctgactcggcaggcaagggctccgaataccttttggagcaatcaagccttgcatgcaacgccgagtgcgtcatgttgcagaacgtttccaaagaaagcttcgaaaggaccattaacatcgcgaaaggaaactcatctctggggatgacggtctctgctaataaggacgggcttgggatgattgtacgcagtatcattcacgggggagccatctcccgcgatggccgtattgctattggagactgtatactttcaatcaatgaagaaagtactatctccgtgacaaacgcccaggcccgtgctatgctcaggaggcactctctcattggccctgatatcaagatcacgtatgtccccgctgagcatcttgaggaattcaagataagcttgggccagcagtcaggcagagtgatggccctagacatttttagcagttacaccggacgggacattccagagcttccggaaagggaggagggggaaggagaagaatctgaactgcagaatactgcttactccaactggaatcagccacgtcgcgttgagctctggagagaacccagcaaatcactgggcatttctatcgtgggcggtagaggcatggggtcaagattaagcaacggcgaggtcatgagggggatctttattaagcacgtacttgaggactcccctgcagggaaaaacgggactctcaagcccggtgatcggatcgtggaagttgatgggatggacttgagagatgcaagtcacgaacaggctgtggaggccattcgaaaggctgggaatcctgtggtttttatggtccaatccataatcaacaggccaagagcaccctcccagtcagagtccgagcctgaaaaagcaccgttatgcagtgtgccaccgccacccccaagcgctttcgccgagatgggcagtgaccacactcaatcgtctgcatccaagataagccaagacgttgacaaggaagacgagttcggatatagttggaaaaacatacgcgagagatatggaacactgacaggcgagcttcacatgattgaactggagaaggggcacagcgggttaggcctcagcttagcaggcaacaaggacagatctcggatgagtgtgttcattgtgggtattgatcccaacggagcggcaggaaaagatgggaggctgcagatcgccgatgaattgctcgagatcaatggtcaaattttgtacggccgatctcaccaaaacgcctcaagtatcatcaagtgcgcaccttccaaagtcaagatcattttcattagaaataaagatgctgtgaatcagatggccgtgtgcccgggaaacgccgtagaacccctcccttccaattctgaaaacctccagaataaagaaactgagcccacagtgacaacatctgacgccgctgtggatctgagtagcttcaagaatgttcagcacctcgagttgccaaaagatcagggcggtttgggtatcgctattagtgaggaagataccctgagtggagttattataaagagtctgacagagcacggggtggctgccaccgatggaaggttgaaggtcggcgaccagatcctggccgtcgacgatgagattgtggtggggtatcccatagaaaaattcatttcgttactgaaaactgccaagatgacagtgaaactgaccattcacgccgagaaccccgacagccaagccgtaccatctgccgcaggcgctgcctctggcgaaaaaaagaatagcagccaatcactgatggtgccccagagtggaagcccagaaccggaaagcatccgaaacacttcccgcagctccactccggctatcttcgcttcagatcccgctacttgccctataattccaggatgcgaaacaaccatagagattagcaagggtcgtaccggcctcggcctgtctattgtcggtgggtctgacaccctgttgggtgcaatcattatccatgaagtctatgaggagggcgctgcctgcaaggatggtagattgtgggccggtgatcagatcctggaagttaacggtattgatctgcggaaggcaacccatgacgaagcaatcaatgtcctccggcagactcctcagagagtgaggctgacactctacagagatgaagccccatacaaggaggaagaggtgtgcgataccttaacaattgagcttcagaaaaaaccgggaaaaggcctgggattgagcatcgtgggcaagagaaatgacacaggcgtgttcgtctctgatatcgtgaaagggggaattgccgatgctgatggacgcctgatgcaaggcgatcagattcttatggtcaacggcgaggatgtgaggaatgccacacaggaggccgtggctgcgttactgaaagtatccgaggggtcgcttagcagtttcaccttcccgctatccggaagcagtaccagcgagagtctggagagtagctccaagaagaatgcattagcatccgagattcaaggactgagaacagtggagatgaaaaagggccctacagactcgttagggatctccattgctggtggcgtgggcagtcccctcggagatgtccctatttttattgccatgatgcaccctacaggagttgccgctcagactcagaaacttcgggtcggcgaccgaattgtgactatctgtggaaccagcaccgaggggatgacccacacacaagccgtgaaccttctgaagaatgctagcggcagcatcgagatgcaggttgtggccggaggagatgtgagtgtagtgacaggacaccagcaggagcccgcttcaagtagcctgtctttcacaggtctgaccagcagcagcatttttcaggatgatctgggtccgccacagtgtaagtcgattacactggaaagaggcccagatgggctcggctttagcattgtggggggatacggctccccccacggggacctaccaatttacgtcaaaaccgttttcgcaaaaggcgcagctagcgaggacgggcgtctaaaacgcggtgaccagatcattgcagtaaacggccaatctctggagggcgtaacgcatgaggaagcagtagccatcctgaagcgaaccaaagggactgtaacactgatggtcctgtcata

SEQ ID NO: 231192 - DNA, 1089 bp, synthetic construct
  misc_feature 1..1089: note = Description of Artificial Sequence: Synthetic coding sequence
  source 1..1089: mol_type = other DNA
atggagacagacgcgccacagcccggactcgcatctcccgacagcccgcatgacccttgcaagatgtttatcggtgggctgtcctggcagaccacacaggagggtcttcgggagtattttgggcagtttggcgaggttaaagagtgtctggtgatgagagaccctctgacgaaacgcagtcgtgggttcggattcgtcacatttatggaccaggcgggagtggacaaggttttagcccagtcccgacatgagctcgattccaagaccatcgatcctaaggtggcgtttcctagacgggcacagcctaagatggttacccgcactaaaaaaatcttcgtgggcggtttaagtgtgaatacaaccgtggaggatgtcaaacagtatttcgagcaattcggcaaggtagacgacgcaatgcttatgtttgacaagactacgaaccggcacagggggttcggcttcgtgacattcgaatccgaggatattgtggagaaggtgtgtgagatccatttccatgagataaataataagatggtagaatgcaagaaggcacagccgaaagaagtgatgtctcctacaggcagtgccagagggagaagtagagtaatgccatacggaatggatgcattcatgctggggatcggcatgttaggctaccctgggttccaggcaaccacttacgcatcaagatcttatactggcctagctcccggatatacctaccaatttcccgaattccgcgtggagcgcacccccctcccctcagcgccagttctgccggagcttaccgctatccctctaacagcgtatggtcccatggccgcagcagccgctgccgctgccgtggtgcgcggaacgggctcacatccctggacaatggctcctccccctggaagcacaccttcacgaacaggaggcttcctggggacgacctcgccgggaccaatggcggagctctatggcgctgctaaccaggactcaggggtgagctcctacataagtgccgcttctccagcgcctagcacaggattcggacactctctcgggggacctctgattgccacagctttcaccaacggttatcactag

SEQ ID NO: 231193 - DNA, 627 bp, synthetic construct
  misc_feature 1..627: note = Description of Artificial Sequence: Synthetic coding sequence
  source 1..627: mol_type = other DNA
atggcaacatcagcggttccctctgataaccttcccacttacaagctcgtagtggtgggcgatggcggagttggcaaaagcgcattgacaatccagtttttccagaagatatttgtacccgactacgatccaaccatcgaggattcctacctcaaacatactgaaattgacaatcagtgggccattctcgacgtgctcgatactgcaggacaggaggagttttccgctatgagggagcaatatatgcgcactggggatggcttcctcattgtgtatagcgtcaccgacaaagccagctttgaacatgtcgaccggtttcaccagctcatcctacgcgtgaaggatcgggagagttttcctatgattcttgtggccaacaaagtggacctcatgcatcttcgcaagatcacacgagagcaagggaaggagatggctactaaacacaatattccttacatcgaaacttcagctaaggaccctcctttgaatgtggacaaggctttccacgacctggttcgcgtgattcggcagcagattccagagaagtcacagaagaagaaaaaaaagaccaagtggaggggtgatagagcaactggtacacacaagctccaatgtgtgatactgtag

SEQ ID NO: 231194 - DNA, 627 bp, synthetic construct
  misc_feature 1..627: note = Description of Artificial Sequence: Synthetic coding sequence
  source 1..627: mol_type = other DNA
atggcaacaagtgccgttcccagtgacaatctgccgacttataagcttgtggtggtgggagacgggggagtgggaaagtccgctcttactatccagttcttccagaagatatttgtgcccgactacgacccaaccatcgaggatagttacctaaagcacactgagattgataatcaatgggcgattctggatgtcctagacactgcaggacaggaagagtttagcgccatgcgtgaacagtacatgcgcaccggtgacggtttccttattgtatactccgtgactgataaggcctcgttcgagcacgttgatcgcttccatcagctgattctgagagtaaaggacagggagtctttccccatgattctagtcgcaaacaaagttgacctgatgcaccttcggaaaatcacacgggagcaagggaaagaaatggctactaagcacaatattccatacattgaaaccagcgcaaaggacccaccactcaacgtggacaaagcattccatgatctcgtaagggtgatacgtcagcagattcccgagaaatctcagaagaagaaaaaaaagaccaagtggagaggggatcgggcaacaggcacgcataaactccagtgcgtgatcctgtag

SEQ ID NO: 231195 - DNA, 399 bp, synthetic construct
  misc_feature 1..399: note = Description of Artificial Sequence: Synthetic coding sequence
  source 1..399: mol_type = other DNA
atgagggaacagtacatgcggactggggacggtttcctgatcgtctatagcgttacagataaagccagtttcgagcacgtggatcgatttcaccagctcatactgcgggtgaaggacagggaatctttccccatgattctggttgcaaataaggtagacctcatgcaccttaggaaaatcacccgggaacaggggaaagagatggcaacaaagcacaatattccctatatcgaaacatcagctaaggaccctcctctgaacgtggacaaggcattccatgatctggttcgggttattaggcagcagataccagagaagagtcagaaaaaaaagaaaaagactaaatggcgaggagatcgagctactgggacccacaaattgcagtgcgtgatactgtag

SEQ ID NO: 231196 - DNA, 627 bp, synthetic construct
  misc_feature 1..627: note = Description of Artificial Sequence: Synthetic coding sequence
  source 1..627: mol_type = other DNA
atggcaacatctgccgtgccctctgacaatttgcccacatacaaattagtggtcgtcggcgatggcggagtaggtaaatctgcccttactatacaattctttcaaaaaatctttgtccctgattatgacccgacaattgaggattcttaccttaaacacactgaaatagacaaccaatgggcaatccttgatgtgctcgatactgcgggtcaggaggagttttctgccatgcgagaacaatacatgcgaacaggtgatggatttctgatcgtgtattctgtcaccgacaaggcctcattcgaacacgtggaccggttccaccagctaattcttcgggtgaaagaccgagagtccttccctatgattttggtggcaaataaggtggacctgatgcacttgcgcaaaattacaagagaacagggaaaagagatggctacgaagcataatatcccatacatcgagacaagcgctaaggacccaccactgaatgtggataaggccttccatgacttggtcagagtaatccggcagcagatacccgaaaagtcacaaaaaaaaaaaaagaagaccaagtggcggggagatagggccacaggaacccataaactacagtgtgtgatcctctag

SEQ ID NO: 231197 - DNA, 72 bp, synthetic construct
  misc_feature 1..72: note = Description of Artificial Sequence: Synthetic coding sequence
  source 1..72: mol_type = other DNA
atggccacttccgccgtgccatccgataatttgcctacatacaagttagtggtagtgggggacggaggttag

SEQ ID NO: 231198 - DNA, 2628 bp, synthetic construct
  misc_feature 1..2628: note = Description of Artificial Sequence: Synthetic coding sequence
  source 1..2628: mol_type = other DNA
atgcgagaactagtcaatataccactggtgcacattttgacactggtcgccttctcagggacggaaaagctcccaaaggcacccgtaatcaccacccctctggagaccgtggacgccctggtcgaggaagtcgccactttcatgtgcgccgtcgagagctatccccagccagaaatttcttggaccagaaacaagatcctcatcaagctgttcgacacgcgatactcgattagggaaaatggccagctcttaacaattctctcggtagaggattctgacgacgggatatattgctgtaccgccaataacggggtgggtggggctgtggaaagctgtggtgctctccaggttaaaatgaaaccaaagattacccggcctccgattaacgttaagattattgagggcctgaaagccgtgcttccatgcacaacaatgggcaaccctaaacccagcgttagctggattaaaggcgacagtccattgcgcgaaaactccagaatagccgttctggaaagcggcagcctgcggattcacaatgtacagaaggaggatgctggtcagtatcggtgtgtggcaaaaaattcgctgggtacggcttacagcaaggtcgtgaaactggaggtggaggtgtttgcacgcattttgcgcgctccagagtctcataacgtaaccttcggaagcttcgtgacgctccattgcacagcaaccggtatccctgtgccaacaattacatggattgagaacggtaatgctgtgagcagcgggagtatccaggagagtgtcaaggaccgggtgattgactctagactccagttattcattacaaaacctggactctacacctgcatcgccactaataagcacggagaaaagttttctactgctaaggcagctgctaccatctcgatcgctgagatgttattcatctctagtttctcgaagcctcagaaagacaacaaaggttattgtgcacagtatcggggagaggtatgcaacgccgtcttggccaaagatgccctcgtgtttctcaataccagctatgcggacccagaggaggcccaggagctccttgtccacaccgcatggaacgagctgaaggttgtaagccctgtctgccggccagcagctgaggcgctgctatgtaatcatatttttcaggaatgctcccctggcgtggtgccaacacccatacccatctgtcgcgagtattgcctggccgtcaaagaacttttctgcgctaaggaatggctggtcatggaagaaaagacccaccggggactgtatcggtccgagatgcacctcctctcagtgcccgagtgctctaaactgcctagtatgcattgggatcccactgcttgcgcccgattaccgcatcttgattataacaaggagaatctgaagaccttccctccgatgacctcctctaagcccagcgtcgatatcccaaacctgccaagtagctcaagctcatctttcagcgtgtcaccaacttactccatgaccgtcatcattagtataatgtcatcttttgctatcttcgtcctcctcacaattactaccctatactgctgtaggcggcgaaagcagtggaaaaacaagaagcgtgaatccgctgctgtgacactgaccactcttccttcagagttactcctggaccgcctgcatcccaaccccatgtaccagaggatgccactgttactgaaccccaaacttctgtcactcgagtaccccaggaacaacatcgaatacgttagggacatcggagaaggtgcctttggacgagtgtttcaggccagagcccctggcctgctaccctacgaaccattcacgatggtcgccgtgaaaatgctgaaggaggaagcatctgctgacatgcaggctgacttccagagagaggccgcactgatggccgaatttgacaaccccaacatcgtaaaacttctcggcgtgtgtgccgtgggaaaacctatgtgtttactgtttgagtatatggcctatggtgacctcaacgagtttctgcgttctatgagcccacacactgtctgctccttgtcccactcggacctgagtatgcgggcacaggtgtcatcacccggtccccctccactttcctgcgccgagcaactgtgtatcgctcgacaggttgcggcaggtatggcctacttgtcagagcgcaagttcgtccacagggacttggccacccgtaactgtctggtgggagaaaacatggtggttaagatcgcagatttcggcctgtccagaaacatctacagcgccgactattacaaagctaacgagaatgatgccatccctatccgttggatgcctccggagagtatcttttacaaccggtataccacagaatcggatgtgtgggcatacggggtggtgctttgggaaatcttttcctacggcctgcagccttattatggcatggcccatgaggaagtcatttattacgtcagggacggcaacatacttagctgccctgagaactgtccggtcgagctttacaacctgatgagactgtgctggagtaaattgcccgctgatcggcctagcttcacaagcattcatagaatcctggaacgcatgtgtgagagggctgaggggaccgtcagcgtctag

SEQ ID NO: 231199 - DNA, 570 bp, synthetic construct
  misc_feature 1..570: note = Description of Artificial Sequence: Synthetic coding sequence
  source 1..570: mol_type = other DNA
atggctggaaatgggcgtgaggatccccagcggacacttcagattagagatgccttcgccgtgagggcgcgaatgcagcaggcttcacagcatgcattgggaccacacggtttatgccaaaccgcaacttccagggagtccgccgctgtcactctaaccacactgccttcagagctactactagacaggctgcacccaaatcctatgtatcagcgtatgcccttgctgctcaaccccaaactcctgagcttggagtatcctcgcaataacatcgagtatgtgcgggatatcggagaaggagcttttgggagagtttttcaagcccgtgccccaggattactcccttatgagccctttactatggtcgcggtaaaaatgctgaaagaggaagcgtctgctgatatgcaggctgattttcagcgagaagcagcattgatggcggagttcgataatcccaatattgtgaagttgctgggcatgaaaattcaggtgcgcatttgcatcagtagcgagaacagagggtttccctcattctctccccttgtgagagccttctcgttctcaccctag

SEQ ID NO: 231200 - DNA, 351 bp, synthetic construct
  misc_feature 1..351: note = Description of Artificial Sequence: Synthetic coding sequence
  source 1..351: mol_type = other DNA
atgaaacctaagatcaccagaccaccaattaatgtgaaaatcattgagggcctgaaggctgtgcttccttgcaccactatggggaatccaaaaccaagtgttagttggatcaagggagattctcctctacgcgagaatagccgtatcgcagtgctcgagtccggatccctgcggatccacaacgtgcagaaagaggatgctgggcagtacagatgcgtggctaaaaatagtttgggaaccgcctattcaaaggttgtaaaactggaagtggagggagccaagggcatccatacacagtttgtcgctagcgcactgcagctgcgctccttcctgtcgtgcccacaaatctag

SEQ ID NO: 231201 - DNA, 351 bp, synthetic construct
  misc_feature 1..351: note = Description of Artificial Sequence: Synthetic coding sequence
  source 1..351: mol_type = other DNA
atgaagcctaagataactcgccctcccatcaatgttaagataatcgaaggcctgaaggcagtgctgccatgtaccactatgggcaatcccaagccatcagtgtcatggattaagggcgatagtcctctccgcgaaaatagtcgtatcgctgtgctcgagagcggttcactgcgaatccacaacgtacaaaaagaggatgcaggacagtatagatgcgtggcaaagaattctctggggacagcttacagcaaggttgtcaaattggaggttgagggtgctaaaggaattcatacccagttcgtggccagcgcattgcaactcagatctttcctgtcctgcccccagatatag

SEQ ID NO: 231202 - DNA, 570 bp, synthetic construct
  misc_feature 1..570: note = Description of Artificial Sequence: Synthetic coding sequence
  source 1..570: mol_type = other DNA
atggctgggaatgggagagaggatcctcagagaacacttcaaattcgtgatgccttcgcggtcagggccaggatgcaacaggcctctcaacacgcactagggccacacggtctctgtcagactgccacctcccgcgaatcagcagctgtgaccctgacaacactcccgagcgagcttctgctcgaccgactccatcccaatcctatgtaccagcgcatgcccctgcttctcaaccccaagctattgtcacttgagtacccccgtaataatattgagtatgtgcgggacattggagaaggggctttcggacgagttttccaggcccgtgccccaggcctgctcccatacgagccgtttacaatggtggcggttaagatgttgaaggaggaggccagcgcagacatgcaggctgatttccaacgggaggccgctctgatggcggagttcgataatcctaacatagtcaagcttctgggaatgaaaattcaagtacggatctgcattagtagcgaaaaccggggatttcctagctttagccctttggttcgagccttttccttctccccttag

SEQ ID NO: 231203 - DNA, 2352 bp, synthetic construct
  misc_feature 1..2352: note = Description of Artificial Sequence: Synthetic coding sequence
  source 1..2352: mol_type = other DNA
atgcgagagttagtgaacatccctctggtccatatattgactctggtggcttttagtggaaccgagaaactgcccaaggccccagtcatcaccacccctctcgagaccgtggacgctctggttgaagaggtggcaaccttcatgtgtgccgttgaatcctacccccaacccgagatctcctggaccaggaataagatcttgattaagctcttcgacaccagatattcaatccgcgaaaacggccagctgctgaccatcttatccgtggaggacagtgacgatgggatctactgttgtaccgctaacaacggagtgggcggagctgtggagtcgtgcggggctctgcaggtgaagatgaagccgaagatcacccggcctccaatcaatgtcaagatcattgaggggctgaaagcagtgcttccatgcactactatggggaaccccaagccatcggtgtcctggataaaaggcgattctcccctgcgggagaattcacgaatagccgtgcttgagagcggctcactcaggatacacaatgtgcagaaggaagatgctggacagtacaggtgcgtggccaaaaactccctcggtactgcttacagcaaggtggtgaaacttgaagttgaggaagaaagtgagcccgaacaggacactaaagtattcgctaggattctgcgagctccagagtcccacaatgtcacctttggcagtttcgttactctgcattgcacggctaccggcattcctgtccccacaattacctggatcgagaacggcaacgccgtatcctcaggtagcatacaggaaagcgtgaaggaccgggtcatagactcaagattgcaacttttcataaccaaaccaggattatacacatgcattgcaacaaataagcacggcgagaagttttctactgctaaagccgctgccaccatctcgatcgcagatttccgagagtattgccttgccgtgaaggaattgttttgcgccaaagaatggttagtgatggaggaaaagacacataggggactttaccgctcagaaatgcacctgctgtcagtcccggagtgttctaaactgccgtccatgcattgggatcccacagcctgtgcccgtctcccccacctcgcttttcctcccatgacatcatcaaagccttcggtcgatattccgaatctaccctcctcctcatcctcatcttttagcgtgtctcctacctactccatgaccgtaatcatcagcatcatgagtagtttcgctattttcgtgctgctgacaatcactaccctatattgttgcaggcggcgaaaacagtggaagaataagaagagggagtccgccgcagtgactttgactaccctaccaagtgagttgttgctcgaccggcttcatcctaatcccatgtaccagcggatgccactgttactcaatccaaaactcctgtcactggagtatcctagaaataatatagagtacgtcagagacatcggcgagggtgcctttggccgtgtgtttcaggccagggcaccagggcttctgccttacgaaccatttacgatggttgccgtcaagatgttgaaggaggaggcctccgcggatatgcaggcggactttcagcgcgaagccgcactgatggctgagtttgataatcccaatatagttaaactgctcggggtctgcgccgttgggaaaccgatgtgcctgctgtttgagtatatggcctatggagacctgaatgagtttctgcgctcaatgagcccgcatacggtgtgctctctgtcccattcagatctgtccatgcgcgcacaggtctcgtcccctggacctcctcccctgtcgtgtgcggagcaattgtgtatcgctagacaggtggccgctggcatggcttacctcagcgaacggaagttcgtgcaccgcgacctggccacacgcaactgtctggtgggcgaaaatatggttgtgaaaatcgcagacttcggactgagtcgcaatatctattcagccgactactacaaagccaacgaaaacgatgcaattcccatcaggtggatgcccccagagagcatattctacaatcgctacacaactgaatccgatgtctgggcgtacggggtcgtgctctgggagatcttctcctacggactccagccctactatgggatggcgcacgaagaagtgatttactatgtgcgagacgggaatattctctcttgtccagagaactgccctgtcgaattatacaacctcatgcggctgtgttggtcaaagttaccagccgatcgtccgagttttacttctatccaccgcattttagaaaggatgtgtgagcgagccgagggtacagtgagcgtctag

SEQ ID NO: 231204 - DNA, 2610 bp, synthetic construct
  misc_feature 1..2610: note = Description of Artificial Sequence: Synthetic coding sequence
  source 1..2610: mol_type = other DNA
atgagagaactcgttaacatacctctcgtccacatcctgacgctggtggcattcagcggaaccgagaaactcccaaaagctcccgtcattacaactccactcgaaaccgtggacgcccttgtcgaggaagtggccacatttatgtgcgctgtagaatcctaccctcagcccgagatttcctggactcggaacaagatcttgattaaactgtttgacacccggtattccatccgagagaacggacagctcctgacgattcttagtgtggaggattccgacgatggcatttattgctgcaccgcgaacaacggcgtgggaggcgcagtcgaatcctgcggagccctccaagtgaagatgaaaccaaaaatcactagacccccaattaatgtaaaaatcatagagggacttaaggcagtcctcccctgcaccaccatggggaatcccaagcctagcgtcagttggattaaaggcgatagccctctcagagagaactctcgcattgccgttctggaaagcggaagcctgaggattcataatgtgcagaaggaagacgccggacaataccgctgcgtggcgaaaaattctctgggaacagcatactcaaaggtagtaaagttggaagtagaggtctttgcccgaatcctgcgcgctccagaatcacacaacgttacatttggctctttcgttaccctgcactgcaccgccaccggcatcccagtgcctacgattacatggatcgaaaatggcaacgcggtgagctcagggagcatccaggagtcggtgaaagatcgggttatcgacagccggctacagttgttcataaccaaacctggcctttacacctgtatcgcaaccaacaagcacggagaaaagttctcaaccgccaaagccgcagccactatcagcattgctgagtggagtaagccccagaaggacaataaggggtactgtgcacaatatcgcggagaggtttgcaacgccgtgcttgccaaggatgctctcgtttttctgaacacgtcctatgcagatccagaagaggcgcaggagctcttagtacacaccgcttggaacgagctaaaggttgtaagtcccgtttgtaggcccgcagctgaggccctgctctgcaatcatatcttccaggagtgctccccaggagtcgttccaactcccatcccaatatgtcgcgaatattgtcttgcagtgaaagaactgttctgtgctaaggaatggttagtcatggaggagaagactcacaggggactttatagatctgagatgcacctgctgagcgttccagagtgttccaaattgccatccatgcactgggatcccaccgcatgcgcccgattgccccacctcgactataacaaagagaacctgaagacctttccaccaatgacctcttccaagccctctgtggacatcccaaacctgccttccagcagctcatcttccttcagtgtgtccccaacttattcaatgactgtaattatctccatcatgtccagctttgccatttttgtactacttaccataactaccctgtattgctgtcgaaggcggaaacagtggaagaataagaagcgcgagagtgctgcagtgactttgactacccttccttcagagttactgctcgatcgcctgcaccctaatcccatgtatcaaaggatgcctctcctgctgaacccaaaactcctgagcctggagtatccacgaaataatattgaatacgttagggatatcggagagggggctttcggcagagtcttccaggcacgtgcccctggtctgctcccatacgagccttttacaatggtagcagttaaaatgctgaaggaggaggcctcagcagatatgcaagcagatttccagagggaagccgcactgatggcagagtttgacaatcctaatattgtgaagctgctcggtgtatgtgctgtgggcaaaccaatgtgcctgctgttcgagtatatggcatatggggatctgaatgaatttcttagatccatgagcccccatacagtctgctctttaagccactctgatctgagtatgcgggcacaggtgagttctcctggtccacctccgctgtcctgcgctgaacagctgtgcatcgcacgtcaggttgccgcagggatggcatacctttctgaaagaaaatttgtacatagggacttggctacaagaaactgcttggttggtgagaacatggtggtgaaaatcgcagacttcggattgtcaaggaacatttattcagcagattattacaaagccaacgagaacgacgccattccaattcggtggatgccgcctgaatccatcttttataacaggtacactaccgagtcagacgtgtgggcctacggcgtggtgttgtgggagatcttcagctacggattgcagccttactacggcatggcacacgaagaggtaatttattacgtgagagacggcaacattctgtcctgccccgaaaattgtcccgtggaattgtataatctgatgcgcttgtgctggtcaaagctgccagctgacaggcccagctttacctcaatacatcggatattggaacggatgtgtgagcgggctgagggcaccgtgagcgtgtag

SEQ ID NO: 231205 - DNA, 2604 bp, synthetic construct
  misc_feature 1..2604: note = Description of Artificial Sequence: Synthetic coding sequence
  source 1..2604: mol_type = other DNA
atgcgcgagctagtgaatatccccctggtacacattctgacactggttgctttctccgggacagaaaagctgccgaaggctcctgtcataactacacctttagagaccgttgacgcgctcgtggaagaagtggccacatttatgtgcgctgttgaaagttatccgcagcccgaaatcagctggacccggaacaaaattctcatcaagctgtttgacacccgatactcaattcgggagaatggacaactcctgaccatcctctctgtagaggactccgatgatggtatttactgctgtactgctaacaatggggtgggcggagccgtggagagttgtggtgctttgcaggtgaaaatgaagcccaaaattactagaccgccaatcaacgtgaagatcatagagggacttaaagcggtattgccctgtacaactatgggtaatcccaaaccatcagtctcatggattaaaggagatagccccttacgagagaactccaggatcgccgtgctggagtcaggaagccttaggattcacaatgtccagaaagaggacgcaggccagtacaggtgcgtcgccaaaaacagcctgggtacagcttactccaaagtggttaagttagaagtggaggtcttcgctaggattctcagagccccagaaagccacaatgtcacctttggttccttcgtgaccctgcactgtacggccacgggaattcccgttcctaccatcacatggattgagaatggaaacgccgtgtcatccggaagtattcaggaatctgtgaaagatagggtcatcgattctcgcctacaactatttattacaaaacccggtctgtatacgtgtattgccaccaacaaacacggggagaagtttagcactgctaaggcggctgccaccatctccatagccgagatgttgtttattagctccttctcaaaacctcaaaaggacaacaaaggatactgcgcccagtatcgaggagaggtgtgtaatgcggttttggcaaaggacgcattagtgtttttgaacacttcatacgcagaccctgaagaagcccaggagctactcgttcacacagcttggaacgaactgaaggtggtatcccctgtgtgtcgtccagcagccgaagcccttctctgcaaccacatctttcaggagtgttcacccggagttgtgcccactccaatcccgatctgccgcgaatactgcttagctgtgaaagagttgttttgtgccaaggaatggctggtcatggaagaaaagactcatcgcggactctatcgctcagaaatgcatttacttagcgtgcctgaatgcagcaagctgccctccatgcattgggatcctaccgcctgcgcacgccttccgcacctcgcttttcctccaatgaccagcagtaagccatcagtggatatacctaatttgccctcctcttcctcgtcctcgttcagtgtctcgccaacgtatagcatgaccgtcattatctcgattatgtcatcgttcgccatattcgtcctgcttacgataaccactttatactgctgccgacgccgtaagcagtggaaaaataaaaagcgagagagcgctgccgttactctgaccaccctcccttcggaactgcttctcgatcgcctgcatcccaaccctatgtaccagcggatgcctctcctcctgaaccctaaactgttgtctcttgagtacccgcgtaataatattgagtatgtgagagatattggggagggcgcttttggcagagttttccaagccagggcgcctggactattaccctatgagcccttcaccatggtagctgtgaaaatgctcaaagaagaggcctcggcagatatgcaggccgactttcagcgggaagccgctttgatggccgagtttgataatcccaacattgtgaagctgctcggagtctgtgcagtgggcaagcccatgtgcctcctgttcgaatacatggcatatggagacctaaatgagttcctgcggagcatgtcaccccacaccgtgtgttccctgtcccactcggatcttagtatgcgggctcaggttagctccccgggtccgcctcccctgagctgtgctgaacagctgtgcattgccaggcaggttgccgcagggatggcatacttgagcgaacggaagtttgtacatcgggacctggccactcgcaactgcttggtcggggaaaacatggtagtgaagattgctgactttggcctgtctcgcaacatctattctgccgactattacaaggctaatgagaacgacgctattcctatcaggtggatgccacctgagagcattttctacaacaggtacactaccgagtctgatgtttgggcttatggtgtcgtgctgtgggagatcttttcctatgggcttcagccctactacgggatggctcatgaagaagttatctactatgtgcgagatggcaatatcctttcctgccctgagaactgtcctgtggagctgtataatctgatgcgcttgtgctggtctaaactgcccgctgaccgacccagctttacctccattcaccggattcttgaaagaatgtgcgagagggccgagggaacagtgtccgtatag

SEQ ID NO: 231206 - DNA, 2610 bp, synthetic construct
  misc_feature 1..2610: note = Description of Artificial Sequence: Synthetic coding sequence
  source 1..2610: mol_type = other DNA
atgcgggaattggtgaacattcctctggtgcatattctgacactagtggcttttagcggtacagaaaaattacccaaggccccagtaattaccacacctttggaaaccgtggacgctctagtggaggaggttgccacctttatgtgtgcagtcgagtcctatccccagccggagatttcatggactcgcaacaagattctgatcaaactctttgacaccagatacagtattcgcgagaacggccagctgttgacaatcttgtctgtcgaagacagtgacgacggtatttattgctgtaccgcaaataatggcgtgggcggagctgtcgaatcatgcggggctcttcaggtgaaaatgaaacctaagattaccagacccccaattaatgtaaagatcatagagggcctcaaggccgtcctgccctgtactactatggggaatcccaagccaagtgtaagctggatcaaaggagacagcccactgcgtgagaacagcagaattgccgtgcttgagtcagggtctctgaggatccacaatgtgcaaaaagaagatgcaggacaatatcgatgtgtagcgaaaaacagtttgggaacagcctactctaaggtcgttaagctggaggtggaggtgtttgccaggatcctacgtgcacccgagtcccataatgtaacattcggcagctttgttacccttcattgcacagccaccggcatccctgtgccgaccattacctggatcgagaatggtaacgccgttagctctggctccattcaagaatcagtgaaggacagggtcattgattctcgcctgcagctgttcatcaccaagcccggtctgtatacctgcatagctactaacaagcatggagaaaagtttagcacagcgaaggcagctgcgaccatttcaatagccgctttcagtaaaccccagaaggataataaagggtattgcgctcagtacaggggagaggtttgtaacgcagtcctggccaaggatgctttagtattcctgaacaccagttatgctgatcctgaagaagcacaagagttgctggtgcacaccgcatggaatgagcttaaagttgtcagtcccgtgtgtagacccgctgcggaggctttgctgtgcaatcacatctttcaggaatgctctccaggggtcgtacctacgcctatccccatatgcagagagtattgtttggctgttaaagagctgttttgcgctaaggaatggttggtgatggaggaaaagactcataggggcctgtacaggagcgaaatgcacctgctgtccgtacccgagtgtagtaaacttccatctatgcactgggatccaactgcctgtgcaaggctgcctcacctcgactacaataaagagaaccttaagacatttccaccgatgaccagctccaagccctctgtggatatcccaaaccttccctcatcatcctctagctcattctcagtatctccaacatacagcatgactgttataatctcgataatgtcttctttcgcaattttcgtcctgctgaccatcaccactttgtactgctgtaggagacggaagcagtggaagaacaagaagagagaaagcgctgcagtgacactgaccaccctgccctctgagcttctcctggacaggctgcaccccaatccaatgtaccaacggatgccattgctccttaatcctaaacttttgtctctggaataccctcggaataacatcgagtacgtccgggatatcggcgagggtgccttcggcagagtcttccaggcgagagcaccagggcttctcccttatgagccatttacaatggtcgccgtcaagatgctcaaggaagaggcttctgccgatatgcaagcagatttccagagagaagcagcactcatggcagagttcgacaatcccaacatagttaagttgctgggggtgtgtgctgtggggaagcctatgtgcctcctgtttgagtacatggcctacggtgacttgaacgaattcttgcgatctatgagccctcatacggtatgctccctctctcactccgatcttagcatgcgcgctcaggtatcttcccctgggcctcctccattgtcctgtgcggagcaattatgcatcgcacgacaggtcgcggctggaatggcatatctgagtgaaagaaagttcgtgcaccgcgatcttgctactagaaattgccttgttggggagaacatggtcgtgaaaatcgccgacttcggactttctcgaaatatttatagtgccgactattacaaggctaacgaaaacgatgcgatccccatcaggtggatgcccccagagagcatcttctataatcgatacacgacagaatccgacgtctgggcatatggtgtcgtactgtgggaaatcttcagttatggtctgcaaccatactatggaatggcccatgaggaggttatctactatgtaagggatggcaatatcctgtcctgccctgaaaattgccccgttgaactgtacaatttaatgaggctgtgctggtctaagctgccagctgatcggccatccttcacatccattcaccggattttggaaagaatgtgcgaacgcgctgaaggaaccgtgtccgtctag

SEQ ID NO: 231207 - DNA, 2352 bp, synthetic construct
  misc_feature 1..2352: note = Description of Artificial Sequence: Synthetic coding sequence
  source 1..2352: mol_type = other DNA
atgcgggaactggttaatatccccctggtacacatcttgacgctggtcgcgttcagcggaacagaaaaactgcccaaggcccctgtcataacaacaccgttggagactgtggatgcacttgtagaggaagttgccacctttatgtgcgctgtggagagctatccccagcccgaaatttcgtggacacggaataagatattaatcaaattgtttgacacgcggtacagtattcgggaaaatggccagctactgacgattctgagcgtcgaagattcagatgacgggatatactgctgcactgcgaataacggagtcggcggagctgtcgagtcatgtggcgcactgcaagttaagatgaaacctaagattacaagaccacctattaacgtgaagataattgaggggttgaaggccgtcctcccttgtacaacgatgggcaatcctaaacccagtgtttcgtggattaagggagactcgcccctcagagagaattccagaattgcagtcctggagagcggatccttgaggattcataacgtacaaaaggaggacgccggtcaatacagatgtgttgccaaaaatagtctgggcaccgcctacagcaaggtggtgaaactcgaggtcgaagaggagtccgaacctgagcaggatactaaggtgtttgcgcgaatcctgagagcacctgagagccacaacgtcactttcggcagttttgtaacgttacactgcaccgctacaggtattccagttcctacgattacctggatcgaaaacggaaacgccgtctcttcagggagtatccaggaaagcgttaaagatcgcgtcattgattctaggctgcagctgtttataaccaagcctgggctatatacatgcatagccactaacaagcatggggaaaaattctctactgccaaggccgctgcaacaatttcaatcgccgcttggaagaagtattgcttggccgtcaaggaactgttctgcgccaaggagtggctggttatggaagagaagacacatcggggtctctacaggagcgagatgcatcttctctctgtgcccgagtgtagcaagctaccatccatgcactgggaccccacagcttgcgctcggctgccacatctggctttcccacccatgacttcctctaaaccctcagtcgatataccaaacctcccaagctcctccagttcttccttttctgtgtcgcccacgtactcaatgaccgtgattatctccattatgagctctttcgccatctttgtcctcctaaccatcacgaccctctattgttgtcgaaggcgaaaacagtggaaaaataaaaagcgggagagtgccgcagtcacattaactaccctcccatcagagctgctgctggatagacttcaccccaatccaatgtaccagcgcatgccgctactgttgaaccccaaactcctgtctttagagtatccccgaaataacattgaatacgtccgcgacataggcgagggagctttcgggcgagtcttccaagccagagcaccgggtcttctgccttacgaacctttcactatggtggctgtaaagatgcttaaggaggaggcctccgctgacatgcaggccgatttccagagagaggccgctctgatggctgagttcgataaccccaatatcgttaaactgctgggcgtgtgtgcggtgggcaagcccatgtgcctgctctttgagtatatggcttacggtgacctcaacgagtttcttaggtctatgtcccctcacacagtgtgtagcttgagccactctgacctgtccatgcgggcacaggtgtcatcccccggaccacccccactcagctgcgcagagcagctctgtatcgctaggcaggtggctgcgggtatggcctacctgtccgagaggaagttcgtacaccgcgacctggctacacgcaactgcttagtgggagagaacatggtagtgaaaatcgctgattttggacttagcaggaacatttactcagcggattactataaggccaatgagaatgatgccatccctatcagatggatgccacccgagagcattttctataatcgctacacaacagaaagtgatgtgtgggcttatggggtggtgttatgggaaatctttagttacggactgcagccatactatggaatggctcacgaagaggtgatttattatgtccgcgatggaaacattctttcttgccccgagaattgccctgtggagctgtataatttgatgcgtctttgctggagtaaattgccagctgatcgtccatcctttacatctatacatcgaattctcgaacgcatgtgcgaaagagcagaagggacggtcagtgtgtag

SEQ ID NO: 231208 - DNA, 1167 bp, synthetic construct
  misc_feature 1..1167: note = Description of Artificial Sequence: Synthetic coding sequence
  source 1..1167: mol_type = other DNA
atggccgtcagcgtgaccccgattcgcgacactaaatggttaaccctggaggtgtgccgggagtttcagcggggtacatgctcaaggccagacaccgagtgtaagttcgctcacccctccaagtcatgccaggtcgagaatgggcgagtgatagcgtgctttgattctctgaagggtcgctgtagccgagagaactgtaaatatctccacccacctccacacctgaagacacagcttgagatcaatgggaggaacaacttaatccagcaaaaaaacatggcgatgctggcacagcaaatgcaactcgctaatgctatgatgccgggtgctcctctgcagccagttcccatgttttcagtggcaccgagcttggcaaccaatgcttcagcagcagcctttaacccctatctgggtcctgtctctccttcactggtaccagctgaaatcttgccaacagcgcctatgctcgtgacaggcaacccaggcgtgcccgtaccggctgcggcagcggctgcggctcagaaactgatgcgcaccgatagactagaagtgtgtcgtgagtaccagcgagggaattgtaaccggggtgagaacgactgtcgattcgcccaccccgcagacagcaccatgatcgacacaaacgataatacagtaaccgtctgcatggattacattaagggacgctgttcccgggaaaaatgcaagtattttcacccccctgcccatttgcaggccaaaataaaagcagcccagtatcaggtgaaccaagccgctgctgcacaagcagctgctactgccgctgctatgacgcagtccgctgtgaagtctctcaagagacccttagaagccacctttgatctgggcatcccgcaggcagttctccccccattgccaaagaggcctgctctggaaaaaacaaatggagccacggctgtattcaatacggggatttttcagtaccagcaggcccttgccaatatgcagctgcagcagcataccgctttcctgccccctgtgccaatggtgcacggcgctactccagcgacagtgtccgccgcaaccaccagcgccacctctgtcccctttgctgctactgccaccgcaaatcaaatccctataatcagcgccgaacatcttacgagccacaagtacgtgacccaaatgtag

SEQ ID NO: 231209 - DNA, 909 bp, synthetic construct
  misc_feature 1..909: note = Description of Artificial Sequence: Synthetic coding sequence
  source 1..909: mol_type = other DNA
atggccgtcagtgtcacccctatacgcgacaccaaatggctgacattagaagtgtgccgggaattccagcggggaacctgctcccgacctgataccgagtgtaagtttgcccatccttcgaaatcttgccaggtggagaatggacgcgttatagcctgcttcgacagtcttaaaggacgctgctctcgggagaactgcaaatatctccatccacccccacatctgaaaacccagctcgaaattaacggtcggaataatctgatccagcagaaaaacatggcaatgttggcccaacagatgcagctggccaatgctatgatgcccggtgcccctctccagccagtggtgtgtagggaatatcagcgtggtaattgtaatcggggagagaacgactgtaggtttgcacacccagccgactccactatgatagacactaacgacaatacagtcactgtctgcatggattatattaaagggagatgttcacgtgaaaagtgcaaatacttccatccacctgcccacctccaggccaaaattaaagccgctcagtaccaagtgaatcaggccgctgctgctcaggccgcagcaaccgcggcagccatgggcattccacaggccgtactgccgccactccccaaaaggccagccctggagaagacaaacggggcaacagccgtgttcaacaccggcatctttcagtaccagcaggcgctggcaaacatgcagttgcagcagcatacagcttttctgcccccagttcccatggtccacggggcaactccagcaaccgtgagcgccgctaccacctccgcaacctccgttcccttcgccgcaactgccaccgcaaatcagataccgatcatcagcgccgaacacctcaccagccacaaatacgtaacacagatgtag

SEQ ID NO: 231210 - DNA, 1023 bp, synthetic construct
  misc_feature 1..1023: note = Description of Artificial Sequence: Synthetic coding sequence
  source 1..1023: mol_type = other DNA
atggcggtttcagttactccaatacgggataccaagtggttaacattagaagtgtgcagagagttccagagagggacctgctcgcggccagacacggagtgcaagttcgcacacccctccaagagctgtcaggtggaaaatggcagagtcatcgcctgttttgactccctgaaggggaggtgctctagagagaactgcaaatacttgcatccccctccacacctcaagacccagctcgagatcaatggaaggaacaacctgattcaacagaagaacatggctatgctcgctcagcagatgcagcttgctaatgcaatgatgccgggtgcgccactgcaacccgtgcccatgttttctgtcgctccatccctagcaacaaacgcatctgccgctgcgttcaacccctatcttgggccagtaagcccctcactggttcctgctgaaatattgccaaccgcccctatgttggtgaccggcaacccgggagtgccagtcccggcagctgctgctgccgcagcccagaagctaatgcgaaccgaccgtttagaggtatgccgcgagtatcagcgtggaaactgcaaccggggtgagaatgattgcaggttcgctcaccctgctgattctaccatgattgacactaacgacaatacagtcactgtctgcatggactacattaaggggaggtgctccagagaaaagtgtaagtattttcatccgcctgcccacctacaggcaaaaattaaggccgctcagtatcaggtgaaccaggcagccgctgcccaagccgcagccaccgctgccgcaatgttcccatggtgcactgtgctgcgccaacccctgtgccctcagcagcagcatctccctcaggtgttcccctcactccagcagccccagccaacatccccaatcctggatgcatcaaccctgcttggggcaacaagttgcccagcagctgcaggcaagatgattcccatcattagtgctgaacacttaacgtctcataaatatgtgacccagatgtag

SEQ ID NO: 231211 - DNA, 1149 bp, synthetic construct
  misc_feature 1..1149: note = Description of Artificial Sequence: Synthetic coding sequence
  source 1..1149: mol_type = other DNA
atggctgtttcagtgacgcccattagagatacaaagtggctgacactcgaggtgtgcagggaatttcaaagggggacttgtagcagacctgataccgagtgcaaattcgctcatccctccaaatcttgccaagtcgaaaacggtagggtgatcgcttgcttcgactccctgaaagggaggtgctcaagagagaattgtaagtatctgcatccacctcctcacctcaagacacaactggaaatcaatggccgtaacaatctcatccagcagaaaaatatggccatgctggcacagcagatgcagctggccaacgcaatgatgcccggagcgccattgcagcccgtgcccatgttctccgtcgctccctcgctggccacaaacgcatctgcggctgcctttaacccttatttgggacccgtctccccatccctggtccccgctgagattctgccgactgcccctatgctggtaactggcaaccccggagtccccgtgcccgcagccgcagctgctgccgctcagaaactgatgaggacagacagacttgaggtttgtcgagaataccagcgtggcaattgcaatcgtggagaaaatgattgcagatttgcccacccagcagacagtactatgatcgataccaacgataatacagtgactgtgtgcatggattatatcaaaggaagatgctcccgggaaaaatgtaagtactttcatcccccagcacatctccaggccaagattaaagctgcccaatatcaggtgaaccaggcagctgctgctcaggccgcagcgacagcagccgctatgggtattccgcaagctgtcctaccccctctgcctaagaggcctgccctggaaaaaaccaatggcgcaacagcagtttttaatacagggatattccagtaccagcaagcactggctaacatgcagctacagcagcacacggccttccttcctccgggttcgattctgtgcatgactcctgctacctcagtggtacccatggttcacggggctacacccgcaacagtgagcgccgctaccaccagcgcgacttccgtgccctttgccgctacagccaccgccaatcagatcccaattatatccgctgagcacctaacgagtcataagtatgtcacccagatgtag

SEQ ID NO: 231212 - DNA, 1113 bp, synthetic construct
  misc_feature 1..1113: note = Description of Artificial Sequence: Synthetic coding sequence
  source 1..1113: mol_type = other DNA
atggccgtgagcgtcactccaatcagggacactaagtggctcactctggaagtgtgcagggagtttcagaggggaacttgttcacggccagacacggaatgcaagtttgcgcaccccagtaagagctgtcaggtggagaacggccgagttatcgcatgtttcgactctctcaagggtaggtgctctcgggagaattgcaagtatcttcatccgccaccccacttaaagactcagttagaaattaacggacgtaacaatctgatccaacagaagaatatggcgatgctggcccaacagatgcagcttgcaaacgcaatgatgccaggtgcgccattacagcccgttccaatgtttagcgtcgccccaagtctagctaccaacgccagcgcagcagccttcaatccgtacttaggccctgtatctccaagtctggtgcccgcagagatcctgccaacggctcccatgttagtcaccggaaaccccggtgttcccgtacctgcagcagcagccgctgccgcacagaaactcatgagaacggatcgcctggaggtttgtagggaatatcaacggggaaattgtaacaggggagaaaatgactgtcgcttcgcccatcctgctgatagcacgatgattgacactaatgacaatacggtgacggtatgtatggactacatcaaaggtaggtgttcgcgcgagaaatgtaagtacttccatccccctgcacacttgcaggccaagatcaaagcggcacaatatcaggtcaaccaggctgcagctgctcaggccgctgccactgcagctgctatgggcatcccacaagctgtgcttcctcctttacccaaacgtccggcactggagaagacaaatggggctaccgcagtcttcaacaccgggatttttcaataccagcaagcactcgccaacatgcaattgcaacagcacacagcctttctccctcctgtgccaatggtccacggtgcaacccccgcaacggtgtctgccgctaccaccagtgccacttctgtgcccttcgcagccactgccactgcaaatcagatccccatcatctccgcagaacacctcacctcccacaagtacgtgacacagatgtag

SEQ ID NO: 231213 - DNA, 1029 bp, synthetic construct
  misc_feature 1..1029: note = Description of Artificial Sequence: Synthetic coding sequence
  source 1..1029: mol_type = other DNA
atggccgtgagtgtgacacccatcagagataccaagtggcttacgttggaggtgtgtagagagttccagcgagggacatgttctcggccagatacagagtgcaaatttgcacatccatccaagagttgtcaggtcgaaaatggcagggtgatcgcctgtttcgacagcctaaaaggacgatgttcccgtgagaactgtaagtatctccaccctcctccccacctgaaaactcagctggaaatcaatgggagaaataacctaatacagcaaaagaacatggccatgctggcccagcagatgcagctcgctaacgccatgatgcctggggcaccgcttcagcccgtccctatgtttagcgttgctccctcgcttgccacaaacgcgtctgctgccgctttcaacccgtacttaggcccagtctccccttcactggttccagcagaaatcctgcctacagccccaatgctggtcaccggcaaccccggagtgccggtgccagccgctgctgctgccgcagcccagaaactcatgcgcacagacaggctggaggtttgtcgcgagtatcaacggggaaattgcaacaggggcgaaaacgattgcaggtttgcgcaccccgcagactcgaccatgatagacaccaacgacaataccgtgactgtttgcatggactacatcaagggtcgttgttcacgggagaagtgcaagtacttccaccctcctgcccacctacaggccaaaattaaggctgctcaataccaggtcaaccaggctgccgcagcacaggcggctgctaccgccgctgccatgggtatcccacaggccgttctgccgccacttcctaagagacctgccttggagaaaactaatggcgcaacggcagtgtttaacaccggtatcttccagtaccagcaggccttagccaacatgcagctgcagcagcacacagcctttctccccccaggctcaatactatgtatgactcccgcaaccagtgtggatacccacaatatctgtaggacaagcgattag

SEQ ID NO: 231214 - DNA, 1167 bp, synthetic construct
  misc_feature 1..1167: note = Description of Artificial Sequence: Synthetic coding sequence
  source 1..1167: mol_type = other DNA
atggccgtcagcgtgacacctatccgcgacacgaagtggctgaccctcgaggtgtgtagggagttccagagaggaacctgttctcgacccgacacagagtgcaagttcgcccacccatcaaagtcttgccaggtggaaaatggaagggtcattgcatgcttcgactcacttaaaggtcggtgctcgcgtgaaaattgtaagtacctacacccccctccccatctgaaaacccagttggaaatcaacggaaggaataatttgattcaacagaaaaatatggccatgcttgcccaacagatgcagttggctaacgccatgatgccaggtgctcccctgcagcccgtgcccatgttttctgttgcaccatccctcgctacaaatgcctcagcggctgcattcaacccatacttgggacccgtttctccttctttggtgcccgctgaaatcctcccaacggcaccaatgctggtgacaggaaacccaggcgtacccgtacccgcagcggcagcggcagcggcacaaaaactgatgcgcacagaccgcctggaagtctgcagagaataccaaagagggaattgcaatcgcggagaaaatgactgcagatttgcacaccccgctgatagcactatgattgacaccaacgacaacacggttacagtctgcatggattacataaaaggacgctgctccagggagaagtgcaaatatttccatcctcctgcccatcttcaggctaaaataaaagctgcccagtatcaagtcaaccaggctgcggctgcccaggcggctgccacagccgctgctatgacccagtccgcagtcaagagcctgaaacgtcccttggaagccacattcgacctcgggatccctcaggcggtgcttccacctctcccgaagaggcctgccctggaaaagaccaacggcgcaacagctgtgtttaacacaggtatttttcaataccagcaggccctggccaacatgcagctgcagcagcacaccgccttcctcccacccgtcccaatggttcatggtgccaccccagccactgtgtctgccgcaaccacctcagccacatctgtgccttttgctgccacggccacggctaaccagatacccatcataagtgctgaacacttgacgtctcacaagtatgtgacgcagatgtag

SEQ ID NO: 231215 - DNA, 1023 bp, synthetic construct
  misc_feature 1..1023: note = Description of Artificial Sequence: Synthetic coding sequence
  source 1..1023: mol_type = other DNA
atggctgtgtctgttaccccgattcgcgatacaaaatggcttacactcgaggtgtgccgggagtttcagagaggcacgtgctcaagaccagacaccgaatgcaagttcgcacacccatccaaatcttgccaggttgagaatggaagagtgatagcctgtttcgattccctcaagggaaggtgctcacgtgagaactgcaagtacctccacccacctccacatctgaaaactcagttagagatcaatggacgaaataatcttatccagcagaaaaatatggctatgctggcccagcagatgcaactcgctaatgcaatgatgccaggcgctccactccagcctgttccaatgttttcagtggctccatccctggccaccaatgccagtgccgcagcatttaacccttacttaggcccagtgtctccttcactggtaccggctgagatcctccccaccgctccgatgctggtcacggggaatcctggagtaccggttcctgccgcagccgctgcagccgctcagaagcttatgagaactgaccgcttggaggtctgcagggaataccagcgagggaactgtaaccgtggggagaacgattgtagattcgctcatcccgctgattcaacaatgatcgatacgaacgacaatacagtgacagtatgcatggattacattaaaggcaggtgctcacgggagaaatgtaaatattttcatcccccagcacacctgcaggctaaaattaaagctgcccagtaccaggtaaaccaggccgcagctgcccaagctgccgctacagccgctgctatgttcccctggtgcacagtactacgacagcctctgtgtccacagcaacagcacctcccgcaagtgtttcccagtttacagcagccacaacccactagccccatactcgatgccagcacacttcttggggctacttcatgccctgcagctgcgggaaagatgatccctattatcagtgctgaacatctcacttctcacaaatacgtaacgcagatgtag

SEQ ID NO: 231216 - DNA, 909 bp, synthetic construct
  misc_feature 1..909: note = Description of Artificial Sequence: Synthetic coding sequence
  source 1..909: mol_type = other DNA
atggccgtgtccgtcacgcctatccgtgataccaaatggcttactctggaggtatgtcgagagtttcaacgcggaacctgcagtcggccagacaccgagtgtaaattcgcgcatccatcaaaatcttgtcaggtggaaaatggaagagtgattgcctgcttcgactcacttaaggggagatgtagcagagaaaattgcaaatacctgcatccgccaccacacttgaaaacgcagctggagattaatggcaggaacaatctaatccagcagaagaatatggccatgttggcccagcagatgcaactcgccaacgctatgatgcctggagcccctctccagcccgttgtttgccgggagtaccaaaggggaaattgcaacaggggggagaatgactgccggttcgcgcaccctgctgatagtacaatgattgacacaaatgacaatactgtaacggtgtgcatggattatatcaagggccgatgtagccgtgaaaagtgcaaatacttccacccaccagctcatctgcaggccaagattaaggcagctcagtaccaggtcaatcaggccgctgccgcacaggccgctgcaaccgctgctgccatggggattccacaggccgtattaccccctctccctaaaaggccagcgctcgagaaaaccaatggcgctaccgccgtttttaacaccgggatttttcagtatcagcaggctctggctaatatgcagctacagcagcacacagccttcctgccccctgtgcctatggttcatggcgcaacaccagcaactgtaagtgcagcgacgacttcagccacttccgtgccctttgccgctactgctaccgccaaccagatccccatcatttctgcggaacacctgaccagtcacaagtacgttacccaaatgtag

SEQ ID NO: 231217 - DNA, 1029 bp, synthetic construct
  misc_feature 1..1029: note = Description of Artificial Sequence: Synthetic coding sequence
  source 1..1029: mol_type = other DNA
atggctgtgagcgtgacccctatccgggataccaagtggctaaccctcgaagtgtgtcgcgagttccagcgagggacatgttctcggcctgatacagagtgcaaatttgcacatccgtcaaagagttgccaggtagagaatggcagagtcatcgcgtgtttcgatagcttgaagggcaggtgcagtagagaaaactgtaagtatctgcatcccccaccacacttaaagacccagctggagattaatgggagaaataacctcatacaacagaagaatatggcaatgctggcacagcagatgcaactagccaatgcaatgatgcccggagcaccactgcaacctgtccccatgttttcggtcgcccctagtctcgccacaaacgccagcgctgccgctttcaacccgtatctggggccagtcagcccgtcacttgtaccagccgaaatcctgccaaccgcccctatgcttgtgaccggaaaccccggtgtgccggttcccgcagccgctgccgcagccgcacagaaactgatgaggaccgaccgacttgaagtttgtcgggaataccagagaggcaattgcaacagaggggaaaatgattgccgtttcgcacaccctgccgactccaccatgatcgacacaaacgataacactgtgactgtgtgtatggactatatcaaggggaggtgtagccgcgagaaatgtaagtacttccaccctcctgcgcacctccaggctaaaatcaaggcagcccagtaccaggtaaatcaggcagctgcagcacaggcagccgctacagcggctgcaatgggcatcccacaagcggtgctcccccctctcccaaagagacctgccctggaaaaaactaatggcgctaccgccgtgttcaatactgggatttttcagtaccaacaggcattggccaatatgcagctccagcagcacactgcattccttccacccggatcaatcctgtgtatgacacctgcaaccagcgtcgatacccataatatttgtaggaccagcgactag

SEQ ID NO: 231218 - DNA, 1032 bp, synthetic construct
  misc_feature 1..1032: note = Description of Artificial Sequence: Synthetic coding sequence
  source 1..1032: mol_type = other DNA
atgggtaggtgttctcgggaaaattgtaaatatctgcaccctccgcctcatttaaagacacagctggaaatcaatggacggaataacctgatacaacagaagaacatggccatgctcgcccagcaaatgcagctggctaacgccatgatgcctggggctccactgcagcctgtgcctatgttctccgtggccccttccctggccactaacgccagtgccgctgcattcaacccttaccttggccctgtgtctccatccctggtgccggctgagattttgcctaccgctcctatgctggtgacagggaaccctggcgtgcctgtgccggcagcggctgccgcagccgctcagaaattgatgagaaccgatcgtctggaagtatgcagagagtaccagaggggcaattgtaatcggggtgagaacgactgtcggtttgcccacccagcggacagcacgatgatcgacactaatgacaatactgtaaccgtatgtatggactatattaaggggagatgtagtcgggagaaatgcaaatactttcatccccctgcacacttacaggctaagattaaagctgctcagtatcaagttaatcaagctgcagctgcccaggccgctgccactgcagctgcgatgactcagagcgctgtcaaatctcttaaacgtccactagaagccacgtttgaccttggcattccacaggctgtgctaccccctctgccaaaaaggcctgctttagagaaaactaacggcgctactgccgtgtttaacacaggaatttttcaataccagcaagccctcgcaaatatgcagctacaacaacacaccgcctttctgcctcctggcagcatcctgtgtatgacgcccgcaacttcggtggtgcccatggtccacggggcaacccctgcaacagtgagcgcagccacgacgtccgctacgtcagttccatttgccgctaccgcgacagctaatcaaataccaatcatttcagccgagcatctcacatctcataagtatgtgacacagatgtag

SEQ ID NO: 231219 - DNA, 945 bp, synthetic construct
  misc_feature 1..945: note = Description of Artificial Sequence: Synthetic coding sequence
  source 1..945: mol_type = other DNA
atggctgtgagtgtcacgcctattcgagataccaaatggcttaccctggaggtgtgcagggagtttcagcggggaacatgctcgagacccgacaccgagtgcaagtttgcccatcctagtaaaagttgccaagtggaaaatggcagggtgatcgcctgtttcgactcactgaaaggcagatgctccagggaaaattgtaaatatctgcacccgccaccacaccttaagactcagctggaaattaacggcagaaacaatctgatacagcaaaagaacatggcgatgctggcacaacaaatgcaactcgccaatgctatgatgcctggtgctcctctgcagcccgtagtgtgtagagaataccagcgcggaaactgtaacaggggcgaaaatgactgccgatttgctcatcccgctgatagtactatgatagatactaatgacaacacagtgacagtttgcatggactatattaagggcagatgctcacgcgagaagtgcaagtatttccaccctccagcacatctgcaggccaagatcaaagccgctcagtaccaggtgaaccaggctgctgccgctcaggccgctgccacagccgctgccatggggattcctcaagctgtcctcccgcctctaccaaagaggccagccctagaaaaaaccaacggagccacagcagtgtttaacacagggatcttccaatatcagcaggcacttgccaacatgcagctgcagcaacataccgctttcctgcccccaggttctatactgtgtatgactcctgctacctccgtggttccaatggtgcatggtgcaacacctgctacagtgtccgccgctaccacatccgcgacatctgtgcctttcgccgctaccgccaccgctaaccagattcctattattagtgcagaacatcttacctcccacaagtatgtgacacaaatgtag

SEQ ID NO: 231220 - DNA, 1005 bp, synthetic construct
  misc_feature 1..1005: note = Description of Artificial Sequence: Synthetic coding sequence
  source 1..1005: mol_type = other DNA
atgaccgccgttaatgtggccctcataagagatactaaatggctaaccctggaagtgtgtagggagtttcagcgcggaacttgctcgcgcgcagacgcagactgtaaattcgctcatccaccaagagtgtgccatgtggagaatgggcgtgtggttgcttgtttcgactcgctgaaggggcgatgcacaagggaaaattgtaagtatctgcatcctccaccacacctgaagactcaacttgagataaatggtcgcaataacctgatccagcagaagactgccgcagcaatgtttgcccaacagatgcagctcatgctccagaacgcacaaatgagctcattaggaagctttccgatgacgcccagcatccctgcaaaccctcccatggcatttaacccatacatcccgcatcccggaatgggactggtgcctgccgagctcgtaccaaacacccctgtgctcatcccagggaacccgcctttggctatgcccggagcggtgggccctaagctgatgagaagcgataagcttgaggtttgtagagagtttcaaagaggcaactgcactcgaggcgaaaatgattgtagatacgcccatccaaccgatgcgagtatgatcgaagctagtgataatactgtcacgatctgtatggattatataaagggaaggtgctcacgcgaaaagtgcaagtattttcaccccccagcccacttacaggccaggctcaaagctgcgcatcaccagatgaaccactccgccgcaagtgccatggcactcactaacctgcaacttccccagcccgcttttattcctgccggacctatcctgtgcatggctcctgcctccaatatcgtgccaatgatgcacggtgcaacacccactacagtgagcgccgctaccaccccggctaccagcgtcccgttcgctgctcccacaaccgggaatcagatacctcagctatcaatcgatgaacttaatagctccatgtttgtgtctcagatgtag

SEQ ID NO: 231221 - DNA, 777 bp, synthetic construct
  misc_feature 1..777: note = Description of Artificial Sequence: Synthetic coding sequence
  source 1..777: mol_type = other DNA
atgtttgcccagcagatgcagctgatgctgcagaacgcccagatgtcctccttggggtcattccccatgactccatcaatccctgcgaatcctcctatggccttcaatccttatattccccatcccggtatggggctggtgccagccgaactggtccccaacacgcccgtgctcatccctggcaatcctccactcgccatgccaggtgccgtgggccctaaactgatgcggtccgataaactagaggtctgtcgtgagtttcagagaggcaactgtacacgcggagagaatgattgccgttacgctcatcccactgacgccagtatgatcgaggcaagtgacaacactgtgaccatttgcatggactacattaagggtcgatgcagcagagaaaagtgtaagtactttcacccccctgcgcacctgcaggccagacttaaggcagcacatcaccaaatgaatcacagcgctgcaagtgcaatggctcttcagcctggtaccttacaactcattcctaagcgttcagcattggagaagccaaatggcgcaacgccagtgttcaaccctactgtttttcattgtcagcaagccctgacaaatctgcaacttccccagcccgctttcattccagccggtcctatcctgtgcatggcccctgcttccaacatcgtccccatgatgcatggagcaaccccaaccacagtgtccgctgctaccacccccgctacctctgtgcccttcgctgctcccacaacagggaaccaactgaagttctag

SEQ ID NO: 231222 - DNA, 915 bp, synthetic construct
  misc_feature 1..915: note = Description of Artificial Sequence: Synthetic coding sequence
  source 1..915: mol_type = other DNA
atggaaagggcctcaaagaacttgaagggcagatgcacccgcgagaactgcaagtacctgcatcctccccctcaccttaagacccagctagaaattaatggcagaaacaatctcattcaacagaaaacagctgccgctatgttcgctcagcaaatgcagctgatgctgcagaatgcgcagatgtcctccctgggatctttcccaatgaccccttcaatcccggctaatccaccgatggcatttaacccttatatcccacatcctggaatggggctcgtgcccgctgagctcgttccgaacacgcctgtgctgatccctggtaacccccctttggcgatgcctggcgcagtgggccctaagttgatgcgatccgacaaactcgaggtctgccgggaattccagagagggaattgcacacgcggagaaaatgattgccgatacgcacatcccacggatgctagtatgatcgaggcgtccgacaatacagtgactatctgtatggactatattaagggacggtgtagccgcgagaaatgtaaatattttcatccgcctgcgcatttgcaggcaaggctcaaggcagcccatcatcagatgaatcacagcgccgcatctgctatggcactgcagcctggcaccctgcagctcatccccaaacgttccgcacttgaaaaacccaatggcgctacgccggtctttaaccctactgtcttccactgccagcaggcccttacgaaccttcagctccctcagccagccttcatccccgctggtcccatcttgtgtatggccccagccagtaatatagtgcctatgatgcatggcgcaaccccaacaaccgtcagcgccgcaacaacaccggctacgagcgtgccctttgcagcaccaacgaccggcaaccagctaaagttctag

SEQ ID NO: 231223 - DNA, 1065 bp, synthetic construct
  misc_feature 1..1065: note = Description of Artificial Sequence: Synthetic coding sequence
  source 1..1065: mol_type = other DNA
atgacagcggtgaacgtagctctgattcgagatactaaatggctgacacttgaagtttgcagagagtttcagcgaggcacatgctctcgagctgacgccgactgcaaatttgcacaccctccaagagtgtgccatgtagaaaacggcagagtggttgcctgttttgatagccttaaggggaggtgtactcgcgagaactgtaagtacctccatccacctccgcatctgaagactcagctggaaattaacggtcgaaataatctgattcagcagaaaacggctgctgcgatgttcgcacaacaaatgcagcttatgcttcagaacgcccaaatgtcgagcctcgggagtttcccaatgaccccatcaattccggctaacccacctatggctttcaatccctacataccacatcccggaatgggactcgtccctgccgaactggtccccaacacgcctgtgcttatccccggaaacccccctctggctatgcccggtgccgtgggtccaaaacttatgcgctctgacaagctggaagtgtgtcgcgaatttcagcggggaaattgtactagaggcgagaacgattgcaggtatgcccaccccacagatgcctcaatgatcgaggcttccgataacactgtcactatttgcatggactatattaagggacgctgttcaagagaaaaatgcaagtacttccatccaccagcccacttgcaggccaggcttaaggcagcacaccatcagatgaaccactctgccgcatcagctatggccctgcaaccaggcacacttcagctgattccaaaaagatcagcccttgaaaaacctaacggggcaacaccagtgttcaaccctaccgtcttccattgccagcaggcactgacgaaccttcagttgccccagccagcgttcatccctgccggaccgatcctctgtatggctcccgcttcgaatatcgtgccgatgatgcatggcgctactcccacgacagtaagcgctgctaccaccccggcaacatccgtgccttttgcggctccaactacaggtaaccagctaaaattttag

SEQ ID NO: 231224 - DNA, 1029 bp, synthetic construct
  misc_feature 1..1029: note = Description of Artificial Sequence: Synthetic coding sequence
  source 1..1029: mol_type = other DNA
atgactgcagtaaatgtggctttgatccgggacacaaagtggctaaccctggaagtgtgtcgcgagttccagagaggcacctgttcgcgagcagacgcagattgtaagttcgctcacccgccacgtgtctgccatgtggaaaatggccgagtcgttgcttgtttcgattcactgaaaggccgatgtacgcgggagaactgcaaatatttacatcccccaccccacctcaagactcagctggagattaatgggaggaataatcttatccagcagaagacagcggcagcaatgtttgctcaacagatgcagttgatgctgcaaaacgcccagatgtcctccttggggtcatttccaatgacaccatccattcccgctaacccaccaatggcatttaatccgtatatccctcaccccggaatgggcttagtgcccgcagaactggtgccaaacacccccgtgttgattcccggaaatccccctcttgctatgcctggcgctgtggggcctaagctgatgaggagtgataagctcgaagtttgcagggaatttcagcggggaaattgcaccagaggtgaaaacgactgtagatacgcccatcccaccgatgccagcatgatcgaggcatctgacaataccgtgacaatctgcatggactatataaaaggaaggtgctccagagaaaagtgtaaatatttccatccacctgcccaccttcaagctaggctcaaagccgctcatcatcagatgaatcacagtgcagccagcgccatggctctgcaacccggaaccttgcaactgatcccaaagagatccgccttggaaaaacctaatggtgccacacccgtgtttaatcccaccgtcttccattgccaacaggctttgactaacctccagcttcctcagcctgcgtttattcccgctgtcccaatgatgcatggcgctacccctaccacagtcagcgcggcaacaacgcccgctacctcagtaccgtttgctgccccaaccacaggaaatcagttgaaattctag

SEQ ID NO: 231225 - DNA, 777 bp, synthetic construct
  misc_feature 1..777: note = Description of Artificial Sequence: Synthetic coding sequence
  source 1..777: mol_type = other DNA
atgttcgcgcaacagatgcaactgatgctccagaacgcgcagatgagcagtttgggctcattccccatgacccccagtatccctgccaatccacctatggcctttaatccttacatcccgcacccaggaatgggactggtccctgcagaattggtacctaacacacctgtcctgatccccggaaatcctccactggccatgcctggtgctgtcggccctaagttgatgcgctcagacaaacttgaggtgtgtcgggaatttcaacgagggaattgtacccggggagaaaatgactgccgatatgcgcaccctacagacgcaagcatgatagaagcctccgacaataccgtgactatatgcatggactacattaaaggcagatgctcccgggaaaagtgcaagtacttccacccccctgcgcacctgcaagcccgactgaaggctgcacaccaccaaatgaatcacagtgcagcttcggcaatggctctgcaaccgggaactctccagttaattccaaaaagatcagccctggagaagcccaatggagccacccccgtgttcaaccccacggtcttccactgccaacaggcacttaccaatctccagctccctcagccagctttcattccggctgggcctatactgtgcatggccccagcttctaacattgtcccaatgatgcacggagcgacccccactaccgtgtccgccgcaacaacccctgccacttctgtgccgttcgctgccccaacaaccggtaatcagctcaaattttag

SEQ ID NO: 231226 - DNA, 672 bp, synthetic construct
  misc_feature 1..672: note = Description of Artificial Sequence: Synthetic coding sequence
  source 1..672: mol_type = other DNA
atgttcgctcaacagatgcagctgatgctccagaacgcccagatgagttctcttggatctttcccgatgacaccttccatcccggctaacccacctatggcctttaacccttatatccctcaccccggtatgggcttagtgcctgccgagctggttccaaacactccggtgcttatccctggaaaccctccattggccatgccaggagcagtggggccaaagcttatgaggtcagacaagcttgaggtctgccgcgagttccagcgtggcaactgcacacggggagagaacgactgtcgctatgcccacccgaccgatgcatcgatgattgaggcctcagataataccgtaacaatctgtatggactacattaaaggacgctgtagcagagagaaatgtaaatacttccatccccctgcacatctgcaggcccgtctgaaagccgcacaccaccaaatgaatcatagcgctgcctctgctatggcactgcagccgggaactctgcagttgatccccaaacgttccgccttggagaagcccaatggagctaccccagttttcaacccaacagtttttcattgccagcaggcgcttaccaatctccagctccctcagcccgcttttattcctgctggcccaatcctgtgcatggcaccagcatccaatatctag

SEQ ID NO: 231227 - DNA, 729 bp, synthetic construct
  misc_feature 1..729: note = Description of Artificial Sequence: Synthetic coding sequence
  source 1..729: mol_type = other DNA
atgttcgcacagcaaatgcaactgatgctccagaacgctcagatgtcctcacttggctcatttcctatgactcctagcataccagctaacccccctatggctttcaatccatatatcccacatcctggcatggggttggtgccggctgagctcgtcccaaatacacccgtcctgattcccggaaatcctccactggccatgcccggtgctgtgggtccaaaactgatgaggagcgacaaactcgaggtctgcagggagttccagagaggcaattgtacccgaggtgaaaacgattgccgctacgcccaccccactgacgcgtcaatgatcgaagccagcgacaatacagtaaccatctgcatggactatatcaaagggcgatgttcacgagagaagtgcaaatatttccatcctccggctcacctacaagccagactcaaggccgctcaccaccagatgaaccacagtgccgcaagtgccatggcgctacagccgggaactcttcaattaatacctaaaagatctgcacttgaaaaacctaacggcgctacgcccgtcttcaatcccaccgtgttccactgtcaacaggcactcaccaacctgcaactaccgcagccagccttcatacctgccggtcccatcctgtgcatggcccctgcctccaacatcgtcccaatgatgcacggggctacacccaccacagtcagcgctgccaccacacccgcatag

SEQ ID NO: 231228 - DNA, 453 bp, synthetic construct
  misc_feature 1..453: note = Description of Artificial Sequence: Synthetic coding sequence
  source 1..453: mol_type = other DNA
atcaaaggacgctgcagccgcgagaaatgcaaatactttcatcctcctgcacacctgcaggccagacttaaggcggcacatcatcagatgaaccactcagccgcaagcgctatggccctgcaacctggcacactgcaactaattcccaagcggagcgccttagaaaagcctaatggagccacacctgtgtttaatccaaccgtcttccattgtcaacaggcactgacgaacttgcagctaccccaaccagcgttcattcccgcaggacccatcctgtgcatggcgcctgcctcaaatatcgttcctatgatgcatggcgctactcctacgactgtgtccgctgctaccactcctgctaccagcgtgcctttcgctgctccgaccaccggaaatcagatcccacagctgagtattgacgagctgaattcctctatgtttgtctcacagatgtag

SEQ ID NO: 231229 - DNA, 879 bp, synthetic construct
  misc_feature 1..879: note = Description of Artificial Sequence: Synthetic coding sequence
  source 1..879: mol_type = other DNA
atggagagagcttccaagaacctcaagggaaggtgcacaagggagaattgtaagtatttgcaccctccccctcatctgaagacccagcttgaaattaacgggcgtaacaacctgattcaacaaaaaactgctgcagctatgtttgcccagcagatgcaacttatgctgcagaatgctcaaatgagctcgctggggtcatttccaatgaccccctctataccagcaaaccccccaatggcttttaacccttatattccccatccaggaatgggactcgtgccagctgaacttgtgcccaacactccagtcctgattccaggaaaccctcccctagctatgcccggagccgtgggacctaaactcatgcggtcagacaagctcgaggtttgcagggaattccagcgcggaaactgcacccggggagaaaacgattgtcgttatgctcaccctacagatgcctcaatgattgaagcctccgataacactgtgacaatctgtatggattacatcaagggaaggtgcagtcgagaaaaatgtaagtattttcacccaccagcacacctgcaggccaggcttaaagccgcacaccaccaaatgaaccattcagccgctagtgcgatggccctccaaccaggaacactccagctgatcccaaagcgcagtgcgcttgagaagcctaacggagccacgccagtatttaatcccacagtcttccactgtcagcaggccctaaccaatctgcagctgccacagccagctttcatacccgcagtgcctatgatgcatggggctacccctaccacagtttctgccgctacaacgccagccacttccgtgccattcgcggctccaacgaccggcaatcagctcaagttctag

SEQ ID NO: 231230 - DNA, 1377 bp, synthetic construct
  misc_feature 1..1377: note = Description of Artificial Sequence: Synthetic coding sequence
  source 1..1377: mol_type = other DNA
atggaactggaaaagcgcgaaaagcggagcttgctgaacaaaaatctggaagaaaagctgaccgtaagtgctggaggatcagaagctaaacccctgatttttacattcgtacctacggtccgaaggcttccaacccatacacagctggccgacaccagtaaatttctcgtcaagataccggaggagtcatctgataagtctcctgagactgttaaccgcagtaagtctaatgattacctgaccttgaatgctggttctcagcaggagagagaccaggccaagctgacttgcccaagtgaggtctctggaacgattctgcaggaaagagagttcgaggccaacaagctacaaggtatgcaacagagcgatctgtttaaggccgagtacgtcctgattgtggacagcgaaggggaggacgaagctgcatcgcgaaaggtggagcagggtcccccaggaggaattggcacagctgctgtgaggccaaagtctcttgctatctcttccagtctggtaagtgacgtcgttcggcctaaaactcagggcactgacttaaagacatcctcccatcctgaaatgctgcatggaatggcccctcagcagaagcatgggcagcaatacaagactaagtcatcttacaaggcttttgctgcaatccctacaaatacgcttctgctggaacaaaaggctcttgatgagcccgctaaaaccgaatccgtatctaaggataacacgctcgagccaccggttgaactatatttccctgctcagttacgccaacagacggaggagctctgtgccaccattgacaaggtgttgcaggactctctgtcaatgcatagcagcgatagccccagcagaagtccaaaaactctgctagggagtgatactgtaaagacacctaccacgctgccgcgtgctgctggacgcgagactaagtatgctaacttgagctctccttcatccactgtctcggagtcccagctgacaaaacccggtgtgataaggcctgtgcccgtgaagagcaggatcctacttaaaaaagaagaagaggtgtatgagcctaatccattcagtaagtacctcgaagacaatagtgaccttttcagcgagcaggacgtgaccgtgccacccaagccggtgagcctccatcccctgtaccagacaaaactgtatcctcccgcaaagagcttacttcacccccagacactgtcacacgctgactgtttagcccctggacccttctcccacctctcatttagcctgtccgacgagcaagaaaacagtcacaccctactgagtcacaatgcctgtaataaactaagtcatcccatggtagcaatccccgagcatgaggcactcgacagtaaagagcagtag

SEQ ID NO: 231231 - DNA, 873 bp, synthetic construct
  misc_feature 1..873: note = Description of Artificial Sequence: Synthetic coding sequence
  source 1..873: mol_type = other DNA
atgacctcgtgcattctaagtgggagcatccaaactacaccacaggtgtccgccggtggttccgaggctaagcccctgatcttcacttttgtcccaactgtacggaggctcccaacccacacgcaactagctgacacatctaaattcttggtgaaaataccagaagagtcaagcgataagagccctgagactgtcaaccgaagcaagtccaacgattacctcacactcaatgccggatcccagcaggagagagatcaggcgaagcttacttgtccatcggaagtaagtggcacaatcctgcaggagcgggagttcgaagccaataaattgcagggcatgcagcagtcagaccttttcaaagctgagtatgttctgattgtggattccgagggagaggacgaggccgcaagtaggaaggtggagcagggtcccccagggggaattggcactgccgcagtgcgccctaaatccctggctatcagctctagcctcgtgagcgatgtggtccgcccaaagacacaaggcaccgacctgaagacaagcagccacccagagatgctgcatggaatggccccacagcagaagcatgggcagactccaacaaccctgcctagagctgccggtcgggaaacgaaatacgcaaacctgtctagtccttcctctacagtgtctgaatcccagctgaccaagccgggagtgataagacctgtgcccgttaagagtcgaatcctcttgaaaaaagaagaggaagtttacgaacctaatccattttctaaatatttagaggataactcagacctattttctgaacaactgagtcaccccatggtggccattccagaacacgaagccctggactctaaggagcagtag

SEQ ID NO: 231232 - DNA, 705 bp, synthetic construct
  misc_feature 1..705: note = Description of Artificial Sequence: Synthetic coding sequence
  source 1..705: mol_type = other DNA
atgtgctcctggtatctaggctttgagtgttcatctaaatccaacgattacctcacgttgaacgctggttctcagcaagaaagagaccaggccaagcttacttgccccagtgaggtctctgggaccatacttcaggagagagaattcgaagctaataaactgcaggggatgcagcagtctgatctgttcaaggcagaatatgtgctcatagttgatagtgagggcgaggacgaggccgctagcagaaaggtggagcagggcccaccgggagggatcggtacagccgctgttcggccaaagtcgcttgccattagctcctcactcgtatccgacgtcgtgaggccaaagacacagggcactgatctgaaaacttctagccacccagagatgctgcacggaatggcccctcaacagaaacatggccagacacctaccacccttccaagggccgctgggagagagacaaagtacgctaaccttagctctccctccagcaccgtctccgaatctcaactgacaaaacccggtgttatccgtcccgtccccgtgaaatcacggatactcctgaagaaagaggaagaagtgtacgagccgaacccattctccaagtatctggaagacaatagcgatctcttcagtgaacagctgtctcatcccatggtggcgatcccagaacacgaagcattagactccaaggagcagtag

SEQ ID NO: 231233 - DNA, 489 bp, synthetic construct
  misc_feature 1..489: note = Description of Artificial Sequence: Synthetic coding sequence
  source 1..489: mol_type = other DNA
atgcagcagtctgacctttttaaggcagagtacgtgctcatcgtggatagcgaaggagaggatgaggccgcatcccggaaagtcgagcagggaccacctggcggtattggaacagctgcagtgagacctaagagccttgctatcagcagctcgttagtcagcgacgtcgtcagacccaagacacaggggaccgacctgaagactagctcccacccagagatgcttcacggaatggctcctcaacagaagcacgggcagcagtataagaccaaaagctcctacaaggcctttgccgcaataccaaccaatacactcttgttggagcagaaagctctggacgagcccgctaaaaccgaaagtgtcagcaaagacaatacactggagcccccagtcgaaacccccaccacactcccccgagctgcaggcagggagacaaagtacgcgaacctgtcgtctccgtcctctacagtttctgagtctcagttgtag

SEQ ID NO: 231234 - DNA, 2208 bp, synthetic construct
  misc_feature 1..2208: note = Description of Artificial Sequence: Synthetic coding sequence
  source 1..2208: mol_type = other DNA
atggccgctgggggagccgtggctgcggcacccgaatgcagattgttaccttatgccctgcataaatggagcagcttcagctctacatatctccccgaaaacatcctggtggacaagccgaacgatcagtctagtagatggtctagcgagagcaattacccaccgcagtacctcatcttaaagctggagcgaccagcgatcgtgcaaaatatcaccttcggtaaatacgaaaaaacacacgtatgcaacctgaaaaagttcaaagtgttcggcggtatgaacgaggagaatatgactgaacttttgtcctcagggttgaaaaacgactataacaaggagaccttcaccctaaagcataaaatagatgagcagatgtttccttgtcgatttatcaagatcgtgccactcctcagttggggaccttcattcaatttctcaatctggtacgtggaactgtccggaatcgacgatccagacatcgtccagccttgcctgaactggtatagcaaataccgagaacaggaagctattaggctgtgcctgaagcacttccgccaacacaattacacagaggccttcgagtccctgcaaaagaagaccaaaattgctctggagcaccctatgttgaccgatatccacgataagttggtgctcaaaggcgattttgatgcctgtgaggagctgatcgagaaagccgtgaacgatggcctcttcaatcaatatattagtcagcaggagtataagcccagatggagtcagattatcccgaaatcaaccaagggagacggcgaagacaaccgcccaggtatgaggggagggcaccagatggtcatcgacgtccagacagagaccgtgtacttgtttggcggttgggatggaacacaggacctggctgacttctgggcatacagtgtgaaggaaaatcaatggacttgtattagtagagacacagagaaagagaatgggccatctgcacgcagttgtcataagatgtgcatcgacattcagcgcaggcagatctatacactgggaaggtacctcgattccagcgtcaggaactccaaaagtctgaaaagcgacttctacaggtatgatatagacaccaatacctggatgctccttagcgaagatacagctgctgacgggggtcccaaattggtgttcgaccaccagatgtgcatggactctgaaaagcatatgatctacacctttgggggaaggatactcacgtgcaatgggtctgtggacgactcaagagccagtgaaccacaatttagtggactgtttgccttcaactgccaatgtcagacctggaaactgctgagggaagatagctgtaacgctggtcctgaagatatccaaagcaggatcggtcactgcatgctctttcactctaaaaacagatgcctgtacgtttttggtggacaaagatcaaagacgtacctcaatgatttctttagctatgatgtggactccgaccatgtcgatataattagcgatggaacaaagaaggacagcgggatggtgcctatgacgggctttactcagagggccactatagaccctgagctgaacgaaatccacgtactctctgggctgagtaaagacaaagaaaaacgggaggagaatgtgaggaattctttctggatttacgatatcgtgaggaactcctggtcttgcgtctacaaaaatgaccaggccgctaaagacaatccaaccaaaagcttgcaggaagaagagccatgcccacgatttgctcatcagttggtgtatgacgagttacacaaagtgcactatctgttcgggggtaatcccggaaaatcctgttccccaaagatgcgacttgatgacttttggtctctgaagctatgtcgcccatccaaagactatctcttgcgacactgcaagtacctgataagaaagcatagatttgaggaaaaagcccaggtagaccctctcagtgctctgaagtatttgcagaatgacttgtacattacagtggatcatagcgatccagaggagaccaaagagtttcaactcctggcgtcagccctcttcaaatccggaagcgatttcactgccttaggtttctcagacgtggaccacacgtatgcccagagaactcagctctttgataccctggtgaatttttttccagactcaatgacacccccaaaaggcaatctggtagatctcataactctttag

SEQ ID NO: 231235 - DNA, 558 bp, synthetic construct
  misc_feature 1..558: note = Description of Artificial Sequence: Synthetic coding sequence
  source 1..558: mol_type = other DNA
atgacaggattcacacagcgcgctactattgacccagagcttaatgaaatccacgtgctgagtggcctctctaaagataaggaaaagcgcgaggagaatgtccgcaactccttttggatctacgatatagtgcggaattcctggagctgcgtctacaaaaatgaccaagccgcaaaagataacccgactaaatcgctccaggaggaggagccatgtccccgatttgcgcaccaattggtgtacgacgagctgcacaaggtccattatctgttcggcggaaacccaggaaagagctgctctcctaaaatgaggttggatgacttttggtctctaaagctgtgccgccctagcaaagattaccttctgagacactgcaaatacttgataaggaagcaccggtttgaggagaaagcccaggtcgatccactttctgccctgaaatatctgcagaatgacctctacatcactgtcgaccactctgaccccgaagaaaccaaagaggcatttcttatgtggatcacacctatgctcaaggaactgagttccttgactccctag

SEQ ID NO: 231236 - DNA, 3060 bp, synthetic construct
  misc_feature 1..3060: note = Description of Artificial Sequence: Synthetic coding sequence
  source 1..3060: mol_type = other DNA
atgatggccgctgcagctgccgcagctgctggctcttccagctcaggaggtgggggaggcggatcgggatccagctcaagctcctccgacacttcctctaccggtgaagaagagcggatgcggaggcttttccaaacctgcgatggggatggcgacggatacatatctcgaaatgatctgctaatggtgtgtagacagttgaatatggaagaatcagtcgcggaaattatgaatcaattaggggcagacgagaacgggaagatctcctttcaggattttacccgatgcaggatgcagctggttagagaaatacggaaagaagaggttgatctttctgcaaagagcgacaacagctgtactaaaaagctgcgcgaccgcatcgcatcctggccaactagttccgacaactctctgggtgctctctccgcagccagagaatcttgggagtatgatagtggggctcgagatctgcaaagccccgacgtgcagagccagagtgccctacagaaattgctggagtatgggggatcatctcttcaccagcaggctgcactgcataaactactgactcagtctccgcatatcggcaattccgtgggcggaagctatctcgagttagcaaacaccctgcactccgccgcactggctagcctgaagggtgacattgttgagttgaacaaacgactccagcagaccgaacgcgagagggacttgctggagaaaaaactagctaaagctcaatgcgagcagtctcatctgatgcgcgaacacgaagacgtgcaggagcgcaccaccctcagatacgaagagcgcatcactgaactacactccgtcattgcagagctgaacaaaaagatcgaccggctgcagggcactacaattcgagaggaagatgaatatagtgagctacgcagcgagcttagccaatctcagcacgaggttaacgaagattcacggtccatggatcaggatcaaacctccgtctccatcccagagaaccaatccaccatggtgacagccgacatggataactgtagcgaccttaattccgagctgcaacgggtgctcactgggttggagaacgtggtgtgtggcaggaaaaagtcgagctgttctctctccgtcgccgaggtcgacaagcacatcgaacagctcaccaccgccagcgaacactgcgacctcgcaattaagacagtggaggagattgagggggtgctcggcagagatttgtatccgaacctggccgaagagaggagcagatgggagaaggagcttgccggactgcgcgaggaaaacgagtctctgaccgccatgctttgctcaaaggaggaagaactgaatagaacgaaggccaccatgaatgcaatcagagaggagcgggatcgtctaagacggagagtcagggaattgcaaacaagattgcagtcagtgcaggccactggaccctcatccccaggtagactaacgtcaacaaaccggcctatcaacccttcaactggagagctgtctacgagcagcagctccaacgatatccctatcgccaaaatcgcagaaagggtgaaactcagtaagacacgttcagagtccagctcttcagataggcccgtgcttgggagcgagatcagctcgatcggagtgtcatcatccgttgcggagcacttggcccattcactgcaggactgttccaacatacaggagattttccagaccctgtactctcatggcagcgcaatttcagagagcaaaatccgggaatttgaggtggagacagagcgactgaactccagaatcgagcatttaaaatcccagaacgacctgctgacaattactctcgaagagtgtaaaagcaacgctgaacggatgtcgatgttagtgggaaaatacgagagtaatgccacagcccttcggctggctctgcagtacagtgagcaatgtattgaggcttatgagctactccttgccctcgccgagtccgaacagtcacttatactcggacaatttagagcggctggcgtgggcagctcgccaggtgatcagagtggggacgaaaacattacccagatgctgaagcgagctcacgactgtcgcaagacagccgaaaacgccgcaaaggccctgctgatgaagctggacggctcatgtggtggtgccttcgcagtcgcgggttgctcagtgcagccctgggagtcactatcttctaatagtcataccagtacaaccagctcaaccgcctcctcgtgcgacactgagttcaccaaagaagatgaacaacgcctcaaggattacatccagcagcttaaaaacgaccgggcagcagtcaagttaacaatgttagaactggagtcaatccacatcgatccgctgtcttatgacgtgaagccaaggggggattctcagcggctggacctggagaatgccgtgctcatgcaggagctaatggccatgaaggaagaaatggcagaactcaaagcacagctctacctcctagagaaagagaagaaggctcttgagctcaaactgtcaactcgagaagctcaagagcaagcctaccttgtccatattgagcaccttaagtcagaagttgaggaacagaaagagcaacgcatgcgatctctgagcagcactagctccggctccaaagacaaaccaggtaaagaatgtgccgatgcagcctcccctgcattgagtctcgccgaactgaggacaacatgcagtgagaacgagctggccgcagaatttactaatgccattagacgcgaaaaaaagttaaaggccagggtccaggagcttgtctctgcccttgagcgcttgaccaagtccagtgagatcagacatcagcaaagcgcagagtttgttaatgacctcaagagagcaaactcgaatctcgttgccgcttacgagaaggccaagaaaaagcaccagaacaaactgaaaaaactcgaatcacagatgatggcgatggtcgaacgtcatgagacgcaggtccggatgctgaaacagcgtattgccctcctcgaggaagaaaactcaaggccccatactaatgaaacctccctgtag

SEQ ID NO: 231237 - DNA, 564 bp, synthetic construct
  misc_feature 1..564: note = Description of Artificial Sequence: Synthetic coding sequence
  source 1..564: mol_type = other DNA
atgagtgggggaggcaccgaaacacccgttggctgcgaagccgcaccgggtggtggaagtaaaaagcgggactctctcggcaccgcaggatccgcacatctgatcatcaaagaccttggcgaaattcacagcaggctcttagaccaccgtccagtcatccaaggagaaaccagatactttgtaaaggagttcgaagaaaaaaggggtttgcgagaaatgagggtcttagagaacctgaagaatatgattcatgagaccaacgagcacactctgcccaagtgtcgcgacaccatgagagactccctgtcccaggtccttcagaggctacaagccgcaaacgactccgtgtgcaggctccagcagagagagcaagagcggaagaagatccactccgaccatctggtagcttcagagaaacaacacatgctgcaatgggataatttcatgaaggagcaacccaacaaaagggccgaggtggacgaggagcatagaaaggccatggagagacttaaggagcagtatgccgaaatggaaaaggacttagcaaaattcagtacattttag

SEQ ID NO: 231238 - DNA, 372 bp, synthetic construct
  misc_feature 1..372: note = Description of Artificial Sequence: Synthetic coding sequence
  source 1..372: mol_type = other DNA
atggaaaagaggggtctgcgggaaatgagagtgctggaaaacctaaaaaacatgatacacgagacgaacgagcacaccttacccaagtgtcgtgataccatgcgggatagcctttcccaagtgctgcagaggctgcaagctgctaacgactcggtctgtcgactgcaacaacgagaacaagaaaggaaaaagatccatagtgaccacctcgtggcttcagaaaagcaacatatgctgcagtgggataattttatgaaggaacaaccaaataagagggcggaggtggacgaagaacacaggaaggcgatggagaggttgaaggagcaatatgctgagatggaaaaagacctggccaagttctctaccttctag

SEQ ID NO: 231239 - DNA, 3987 bp, synthetic construct
  misc_feature 1..3987: note = Description of Artificial Sequence: Synthetic coding sequence
  source 1..3987: mol_type = other DNA
atggagagcagagaccccgctcagcctatgagccccggtgaagcaacccagtcgggagcgaggccggctgataggtatggattacttaagcattctagagagtttctcgacttcttctgggatattgcgaagcccgaacaggagactagactggccgctacagagaagctgctggaatacttacgaggcaggcctaagggatctgagatgaaatatgcactaaagcgcctgatcacagggctgggcgtcggcagggagacagcacggccttgctattcactcgcactggcacagctgctgcagtcgtttgaggacctgcctctatgtagtatcctgcagcagattcaggagaaatatgacctgcatcaagtgaaaaaagcgatgctgagaccagcacttttcgccaacttgtttggggtgttggcactctttcaaagtggtcgcctggtcaaggaccaggaagcactgatgaagtccgtgaagctgctccaggctcttgctcagtaccaaaaccatctgcaggagcagccccgaaaggcccttgtggacatcctttcagaagtgagcaaggccaccttgcaggagatcctgccagaggttctgaaagcagacctcaacatcatcctttcttcacccgagcaactagaactcttcctgctggcacagcagaaggtgccaagcaaactgaagaaacttgtggggagcgtcaacctgttcagcgatgagaatgtcccccgtctggtgaatgtgcttaagatggcggcaagctctgttaagaaagatcggaagctgcctgccattgcactggacctgctgcgcctggcactgaaggaggacaagtttcccagattctggaaagaggttgttgaacaaggcttactcaaaatgcagttttggccagcgagctatttgtgcttccgcctattgggcgcagcactccctctcttgactaaggagcagctgcacctggtgatgcagggcgatgttattaggcactatggggagcatgtttgcaccgcaaagttgcctaagcaatttaaattcgctcctgaaatggacgactacgtgggaacctttctcgaagggtgccaagacgatcctgaaaggcaactcgctgtgctcgtggctttctctagtgtgacaaaccagggactgccggtgacgccgacattctggcgcgtggtgcggttcctatccccacccgcactgcagggatacgtggcctggctgcgcgctatgttcttacagcccgatctcgactcactcgtagacttctctacgaataaccagaagaaggctcaggatagctcacttcatatgccagaaagagccgtattccgcttacgaaagtggattattttccgacttgtgagcatagtcgacagccttcacctggaaatggaggaggctttaactgagcaggtcgccaggttttgtctcttccactcgttcttcgtgaccaagaaacctacaagccagatacctgaaaccaagcatcctttcagtttccctcttgagaatcaggcaagagaagccgtttcgagtgccttctttagcctgctacagacattaagcacacagtttaaacaggccccaggacagacccagggaggccagccttggacctatcacctggttcaattcgcggacctgctcttgaatcatagtcacaatgttactacggtgaccccgttcaccgcccaacagagacaggcctgggatcgaatgcttcaaacgctaaaagagctggaggcccattctgcggaagccagagcggcagctttccagcatttactgttgctcgtaggtattcacttgctgaagtccccagcagaaagctgcgacttgctgggggatattcagacttgcatccgtaaaagtcttggcgaaaagcctagacgaagtcgcaccaaaacaatcgatccacaggagcccccttgggtggaggttctggtcgagattctgctggccctacttgcccagccctcccacctcatgaggcaggttgcacgctcagtgtttggacatatttgtagccacctgaccccaagggccctgcaacttattttggatgtgctgaatccggagactagtgaagacgaaaacgaccgcgtagtggtgaccgacgattccgacgaaaggcgtctgaagggtgccgaggacaaaagcgaagagggagaggacaataggtcatccgaaagcgaggaagagtctgagggagaggagtcagaagaggaagaacgggacggtgacgtggatcagggtttccgagaacaactgatgaccgtattacaggccggaaaggctctgggaggggaggattcagaaaatgaggaagagctgggagatgaggcgatgatggctttagatcagtctcttgcctctctgtttgctgagcaaaagttaaggatacaggctcgccgagacgaaaagaataaactgcagaaggagaaggccctgcggcgagatttccagatcagggtccttgacttagtcgaggtcctcgtgaccaaacaaccagagaacgcacttgtgcttgagctgctggaacccctcttgagtatcatcagaaggagcctgcgatcttcctcgtccaagcaggagcaggacctgttgcacaaaactgccagaatcttcactcatcatctgtgtagggccaggcggtattgccatgacttgggcgaacgcgctggggcactccatgcacaggtcgagagactggtgcagcaagcaggtaggcagcctgactcaccaactgctctctaccacttcaatgcatctctgtacctcttgagggtgctgaaggggaatacggccgagggctgtgtgcacgaaacccaggaaaagcaaaaggctggcaccgacccctcgcatatgccaaccgggcctcaggccgcttcctgtctcgatctcaatctggtgacccgggtatacagcactgccctgagcagctttctcacaaagcgcaacagcccactcacggttccgatgtttctgtcactgttctcccgccaccctgttctctgccaaagccttctgccaattttggtccaacacataaccggcccagtgcgtcctaggcaccaagcgtgcctcttactgcagaaaacactcagcatgcgcgaggtacggtcttgtttcgaagacccagaatggaagcagttaatgggacaggtgctggctaaagtgacggagaacctcagagtcttaggggaggctcagacaaaggcgcagcaccagcaggcccttagcagtctggaactgctgaatgtcctatttcggacctgcaaacacgagaagctgacccttgacctgacggttctgttaggcgtgttgcaaggtcagcagcagagcctgcagcaaggggcacattccacggggagtagccgactccatgacctgtattggcaggccatgaaaacgcttggggtacagcgcccaaagcttgaaaagaaggatgccaaggaaattccttccgctactcaaagcccaataagcaaaaagaggaagaagaaggggtttctccccgaaaccaagaagcgtaagaaacgaaaaagcgaggacggcacccctgcggaggatggcacacccgctgcaacggggggaagtcagcccccttccatgggcaggaaaaaacgcaacaggactaaagcaaaggttccagctcaggccaacggcacccctacaacaaagagcccggctcctggcgctccaacacggagccctagcaccccggctaagtcccctaagctccagaaaaaaaatcagaagccttcacaggtgaacggtgcacctggcagtcctacagaaccggctgggcagaagcaacaccagaaagcgttgcccaaaaaaggtgtactgggcaagagtcctctctccgctttggcacggaaaaaggcaagactgtctctcgtgatcagaagtccatctctcttgcaaagtggcgctaaaaaaaaggcccaagttaggaaagccggaaaaccgtag

SEQ ID NO: 231240 - DNA, 3999 bp, synthetic construct
  misc_feature 1..3999: note = Description of Artificial Sequence: Synthetic coding sequence
  source 1..3999: mol_type = other DNA
atggagtctagggaccctgcacagcccatgagccccggtgaagcgacacaaagtggcgctaggccagcagataggtatggtctgctgaaacatagcagagagttcctcgattttttctgggacatcgccaagccagagcaggagacgaggctggctgccacagagaaattactggagtacctgagaggcagacctaaaggctcagagatgaaatacgccctgaagaggctcatcactggactgggagtggggagagaaacggcccgaccatgctacagcctggctttggctcaactcttgcagtctttcgaggacttgcctctgtgctcgatcctacaacagatccaggagaagtacgacctgcaccaggtcaaaaaggccatgctgagaccagcattattcgccaatttattcggcgttctcgccctgttccagtcaggacgtttggtgaaggaccaggaggctttgatgaagtctgtaaaactactgcaggctctggcccagtatcagaaccacctccaggagcagcccagaaaggccctggtggacatcctgagcgaggtttccaaagccacccttcaggagattttaccagaagtgcttaaagctgatcttaatataattttgagttcacccgagcagctcgagctgttcctgctcgcacagcagaaggtgccctccaagctgaagaagctagttggcagcgtgaatcttttctcagacgagaacgttcctaggctcgtcaatgtgctgaagatggcagcaagctctgtaaagaaggatcggaaactcccagcaatcgccctggacctcttgaggctggcactaaaggaggacaagttcccgaggttttggaaggaggttgtggagcagggtttactgaaaatgcagttctggcccgcttcttatctgtgttttcggttgttgggtgcggcactcccattgttaaccaaggaacagctgcatctggttatgcaaggtgatgttatcagacactacggggaacacgtttgcacagccaagctgcccaagcagtttaaatttgctccagagatggacgactacgtggggacgttcctggagggctgtcaagacgaccctgagcgtcagctggccgtactagtcgcgttctcctctgtgactaaccaggggctgcccgttacaccaactttctggcgggtagtgcgctttctgtcgccaccagctctgcagggttacgtcgcctggctccgcgctatgttcctgcagcctgacctggacagcttagtggatttctccacgaacaaccagaagaaggctcaggattcctcccttcatatgccagagcgggcagtttttcggttgcgtaagtggatcatcttccgcttagtttctatcgtggactctctgcacctcgagatggaggaggccttaaccgagcaggtggcccgattttgcttgttccatagttttttcgtaaccaaaaaacctacttctcagatcccagaaacaaaacaccctttctcctttcccctcgaaaatcaagcccgagaagcagtgagcagcgcattcttctccctcttgcagactctaagtacgcagtttaaacaggcccctggccaaacgcaggggggtcagccctggacgtaccacctggtgcagtttgctgacctcctgctcaaccacagccataacgtaaccaccgtcacccccttcaccgcgcaacaacggcaggcgtgggaccgcatgctccagactttgaaggaactggaagcacactcagctgaggcccgtgcggctgcctttcagcatctgcttttactggtgggaatacacctgttaaagtcacccgcagagtcatgcgatcttcttggggacatccagacctgcattagaaaatcactcggagagaaacctcggaggtcccggaccaagactatagacccacaggaaccgccatgggtagaagtcctggttgagatcctgctggcactcttagcccaacctagtcacttgatgcgacaggtagcgagatcagtcttcggccacatctgttctcaccttacccccagggctctccagctgatcctggacgtgctcaatcctgaaacctccgaagatgagaacgatagagtcgtggtgactgacgacagcgacgaacgcagacttaaaggcgctgaagacaagtctgaagaaggcgaggataatcgctcttccgagtcagaggaagaatcggaaggcgaggagtcagaagaagaggaacgagacggtgacgtagaccaggggttcagagaacagcttatgacagtacttcaggctggcaaggccttggggggagaagacagtgagaacgaagaagagttgggcgatgaggctatgatggccctggaccagtcactcgcgagcctttttgctgagcaaaagctgcgaattcaggccaggcgggatgagaagaataaattgcaaaaggaaaaagcactgcggagggatttccagatccgtgtcctcgatctggtggaggtgttggtaacgaagcagccagaaaatgctctggttctagagcttctcgagccgctgctctcaatcatccggaggagtctgcgttctagcagctccaagcaagaacaggatctcttacacaagactgcccgaatctttacacaccacttatgccgcgcacggcgatattgtcatgacctgggtgagagagccggagcattgcacgcacaggtcgaacggttggttcagcaggcagggcgacagcccgactctcccactgctttatatcacttcaacgcctcactgtatttacttcgtgtgttaaaaggaaatactgccgagggatgcgtccacgagactcaggaaaaacagaaggcaggaacagatccaagccacatgccgaccggtccccaggccgcttcatgcctggacctgaacctcgtgacaagagtttattcaactgccctgtcatcattcctgacgaagcgcaatagtccactgaccgttccgatgtttctgagccttttcagtaggcacccagtcctatgtcagagtttactcccgattttagttcagcatattacaggtccagttcggcctagacaccaggcgtgcctgctgctccagaagactctttccatgcgcgaggtgagatcctgttttgaagacccagaatggaagcaattaatgggacaggttctcgctaaagtcaccgaaaatctcagggtgctgggcgaagcccagaccaaagcccagcatcagcaggcacttagcagtctggagctacttaatgttctgtttcgaacatgtaagcacgaaaagctaacgcttgacttgacggtgctgctgggagtgctgcaggggcagcagcagagcctgcagcagggagctcatagtacagggagcagtcgtctgcatgatctgtactggcaggccatgaaaactctgggtgtgcagagacccaagcttgagaagaaggacgcaaaggagatcccatcagctactcagagtcctatctccaaaaaacggaagaagaaggggttcctgccggaaacaaagaagcgcaaaaagaggaagagcgaggatgggactccagcagaagacggaaccccagccgcaacagggggttcacaacctccctctatggggaggaaaaaacggaaccggaccaaggcaaaagttcctgctcaggccaacggtacacctactactaagagtcctgctcctggcgcacctactcggagcccatcaaccccggctaaatcacccaagctgcaaaagaagaatcaaaaaccctcacaagtgaacggcgcacctggatcacccactgagcctgcagggcagaaacagcaccagaaagcattgccaaagaaaggtgtcctcggtaagagtccgctgagcgccttggctagaaagaaagctaggctctccttagtgatccgcagcccttcactgctgcagtctggtgccaagaagaaagcacaaaccttgagatttacaatttcttctagcaaaaagtag

SEQ ID NO: 231241 - DNA, 1812 bp, synthetic construct
  misc_feature 1..1812: note = Description of Artificial Sequence: Synthetic coding sequence
  source 1..1812: mol_type = other DNA
atggaatcacgagatccggctcaacctatgtccccaggcgaagccacccagagcggggcaaggccagccgatcgctacggcctgctcaaacactccagagaatttcttgattttttctgggatatcgccaaaccagagcaggaaacaagactggccgctacagagaagttactggagtatcttcgagggagacccaaaggttccgagatgaagtacgccctgaaacgcttgatcacaggcctgggtgttggccgagagactgcacgcccatgctattcactggctctggcacaactgctgcagagcttcgaagacctgcccctgtgcagcatcttacagcaaatacaagaaaagtacgacctgcaccaggtaaagaaagccatgctccgacctgcgctctttgcgaacctattcggtgtactcgcgctcttccagagcggccgtctggtaaaagaccaagaggcactgatgaagtctgtaaagttgctgcaggcccttgcccagtatcagaatcatttgcaagaacagccacgcaaagcccttgtggatattctctcagaggtgtctaaagctacgctgcaagaaatcttgcctgaagtgctgaaggccgacttaaacatcatcctgtcttcccctgaacagttggagctcttcctgctcgcccagcagaaagttccctcgaagcttaaaaagctcgtcggttcagtcaatttgttttccgatgaaaacgtcccgagactggtgaacgtgctgaaaatggccgcaagctcagtaaagaaagaccgtaagctcccggcaatcgctctggatcttctgcgtctggcacttaaggaggacaaattcccgaggttttggaaggaggttgtagaacagggcttgttgaaaatgcaattctggccagcaagctacctatgtttcaggctgctcggagcagcactgcctctgctgacaaaagagcaactgcacctggtgatgcagggcgatgtgataaggcattatggagaacacgtgtgcacagcgaagctccccaaacagtttaaattcgcacctgaaatggatgactacgtcggtaccttcctcgagggctgtcaggatgatccagaacgccagctcgcagtgctggtggccttctcttctgtgaccaatcagggcctgccagtgaccccgacattttggcgtgtggtgaggttcctctccccccctgcactccagggctatgtggcctggctgcgggctatgttcctgcagcctgaccttgacagccttgtcgattttagcactaataatcaaaaaaaggctcaagatagcagtttgcatatgcccgaaagggctgtttttaggcttaggaagtggataatctttcgtctggtgtccatcgtggacagcctgcatttagagatggaagaagctttgacggagcaagtagcaaggttctgcctgttccatagcttttttgtcacaaagaaacctacatcgcagataccggaaactaaaccacaggagagaagcgaggggcctgcccagcctcctcatgcacccggaggcccagagaggccaaaactcgagaagaaagacgcaaaggagattccctcagccgaggatgggacacctgcagccaccggaggatctcagcccccaagcatggggcgtaagaagagaaatcgcaccaaggccaaggtgccggcacaggccaatggaacgcccaccaccaaatcgcctgcgccaggtgcccctacacggtcaccatccaccccagccaagagtccaaagctgcaaaaaaaggctcaagttcggaaagccggaaagccctag

SEQ ID NO: 231242 - DNA, 2487 bp, synthetic construct
  misc_feature 1..2487: note = Description of Artificial Sequence: Synthetic coding sequence
  source 1..2487: mol_type = other DNA
atggccgcagaggaggccgacgtcgatatcgagggggatgtcgtggctgctgcgggtgctcagccaggttcaggggagaacaccgcctccgttctgcagaaagaccactacctggatagtagctggcgcaccgagaatggcttgataccatggacccttgataacacaatatcagaagagaatagagcagtcatcgagaaaatgttgctcgaggaagagtactatctgtcaaagaagtcacagccagaaaaggtgtggctggaccagaaggaagacgacaagaagtatatgaaaagcctacagaagacggccaagattatggtgcactcacccacaaaaccagctagttattcagtgaagtggactatcgaagagaaagaactttttgagcagggacttgccaaattcggacgccgttggactaagattagcaagctgataggatctcgcaccgtgttgcaagtgaaatcctatgccaggcaatattttaagaacaaggtgaaatgcggcctggacaaagaaacacctaatcagaagacgggacacaatctacaagtgaagaacgaagataaaggcactaaggcctggaccccctcctgtctgaggggcagggctgaccctaacctaaatgccgtcaaaatcgagaagctaagtgacgatgaagaagtcgatatcactgacgaagttgatgagttatcttcccagacaccgcagaagaacagttcctccgatcttcttctggattttcccaatagcaaaatgcatgagacgaatcagggcgagttcataacctcagactcacaggaagccctcttcagcaagtcctcacgcggatgcttacaaaacgaaaaacaggatgagaccctgtctagctctgagatcacactgtggaccgagaagcagtcgaatggggacaaaaagtctatagaactcaatgatcaaaagttcaacgagctgatcaagaactgcaataagcacgacgggagaggaataatagtagatgccaggcagctcccaagtcctgaaccgtgtgaaatacaaaagaatcttaacgataacgaaatgcttttccatagctgccaaatggtcgaagagtcacatgaagaagaggagttgaaaccaccagaacaggagatcgaaattgatagaaacatcatccaggaagaggaaaagcaggctatcccagagttctttgaaggacggcaagctaagactcctgaaagatatcttaagattagaaactacatccttgaccagtgggaaatatgcaaaccaaagtacctaaataagacttctgtgagacccggtctgaaaaattgcggcgatgttaactgtattggaagaatccatacttacctggaactcattggcgcaattaatttcggatgtgagcaggcagtgtacaacaggcctcagactgttgataaggtgcgcattcgggataggaaagacgcggtcgaggcgtaccagctggcacagcgcctgcagtctatgcgaacccggaggcgcagggtgcgggacccatggggaaactggtgcgacgcaaaggatctcgaagggcagacctttgaacatctcagtgccgaggaactggcgaagaggcgcgaagaagagaaggggcgacccgtaaaatctttgaaggtgccaaggcccacgaaatcatcttttgaccccttccaacttattccttgtaatttcttctccgaagaaaagcaggagcctttccaagtgaaagtggcgagcgaggcccttctgattatggatcttcatgctcacgtgagtatggctgaagtcattggcctgctcggaggaaggtactctgaggtagacaaagtggtggaggtctgtgctgcagagccatgtaatagcctgtctaccggcctgcagtgtgagatggaccctgtgtcccaaacgcaggcatccgaaaccctcgcagttagggggttttccgtcattgggtggtatcactcacaccctgctttcgaccctaatccctctctgagggacatcgatacacaggcaaaataccaaagctacttcagtcgtggcggagccaaattcattggcatgatcgtgagtccgtacaacagaaataatcctcttccatattcccagattacttgcctcgtgatctcagaggagatctcacccgatgggtcataccgactgccctacaagtttgaggtccagcaaatgttggaggaaccccaatggggactggttttcgaaaagaccaggtggatcatcgaaaagtatcgcctcagtcacagctccgtccctatggataagatcttcagaagggatagtgacctaacctgtctgcagaagctacttgagtgcatgcggaaaaccctcagtaaagtgaccaattgcttcatggccgaggagtttctgacagaaattgaaaacctgtttttatctaactataagagcaatcaggagaatggcgtgacagaagagaactgtacaaaggaactcctgatgtag

SEQ ID NO: 231243 - DNA, 843 bp, synthetic construct
  misc_feature 1..843: note = Description of Artificial Sequence: Synthetic coding sequence
  source 1..843: mol_type = other DNA
atgccaaagaaggcaaaaccaaccggctccgggaaagaggaggggccagcaccatgtaagcaaatgaagctggaggccgctggtgggccatccgcccttaacttcgatagccccagtagtctttttgaatcactgataagcccaataaaaacagaaacattcttcaaagaattctgggagcaaaagcctctgctgatccagcgcgacgaccctgcccttgcaacttactacggcagtctgttcaagctgactgatctcaaaagcctttgcagcagaggcatgtactacggaagagatgtcaatgtgtgccggtgcgtgaatggaaaaaagaaggtgctaaacaaggatggcaaggctcattttctccaacttcgcaaggatttcgatcagaagagggctacaatccagttccatcaaccccagcggttcaaggacgagctgtggcgaatccaagagaagttggagtgctactttgggagcctcgttggcagcaacgtttatattacacctgccggaagccagggacttcctccccactacgacgatgtcgaagttttcatactccagttggagggggagaaacattggaggctgtaccatcctaccgttcccctcgcaagggagtactccgtcgaagctgaagaaagaatcggccgaccagtgcatgagttcatgctgaagcctggagatctactctacttccccaggggaacaatccaccaggccgataccccagctggattagcccacagcacccacgtgacaattagtacctatcagaacaatgacgccggagccaggatgcgtcggtgcgacctgcgcgcaatcgccccacagaaatag

SEQ ID NO: 231244 - DNA, 1398 bp, synthetic construct
  misc_feature 1..1398: note = Description of Artificial Sequence: Synthetic coding sequence
  source 1..1398: mol_type = other DNA
atgccaaaaaaggccaagcccactggctcaggcaaggaagaaggaccagcaccttgtaaacagatgaagcttgaggccgcaggcggtccgtcagccctcaatttcgacagcccttcctcgcttttcgaaagcctgatttcccccattaaaacagaaactttcttcaaggagttctgggagcagaagccattactgattcagcgggatgatcctgccctagctacatattatggaagcctgttcaagttgacagacctgaaatcactttgcagccgcggtatgtattacggccgagatgtgaacgtgtgcagatgtgttaacgggaaaaagaaggtgctgaataaggatggaaaagcacattttctgcagcttaggaaggattttgaccagaagcgcgctaccattcagttccatcagcctcagcggtttaaggatgagttatggcgaattcaagaaaaattggaatgttactttggcagtcttgttggctccaatgtgtatattacccctgccggttcacagggccttccccctcactacgatgatgtggaggtgttcatactgcagttggaaggagaaaaacactggcggctgtaccaccctaccgtccccctagcccgtgagtatagcgtggaagccgaggaaagaatcggacggcctgtgcatgagttcatgctgaaaccgggtgacctgttgtactttcctcggggaacaatacaccaagcggatacacctgcgggtctagcccattctacacacgtaacaatcagtacctaccagaataattcctggggtgactttcttttggataccatctccgggctggtattcgacacggcaaaggaagatgtggaactgcgaaccggcatccccaggcagcttctactgcaggtggagtcaacaacggtcgcaacccgcagactctcgggctttctccgaacattggccgatagattggaaggcaccaaggaactgttgtccagcgacatgaagaaggactttataatgcacagactgccgccttattctgccggagacggggcagaactgtcaaccccaggagggaagctccccagactggactctgtggtgcggttgcagtttaaggaccacatcgtccttactgtccttcccgaccaggatcagtctgatgaagcccaggagaaaatggtatatatctatcactctttaaaaaactcaagggagacccacatgatgggcaacgaggaggaaacagagtttcacggcttacgtttccccctctcccacctggacgccctgaaacagatttggaattcccctgcaattagcgtgaaagatctgaaactgacgacagacgaggaaaaggagtctctggtactaagcctgtggaccgaatgcctgatccaggtggtttag

SEQ ID NO: 231245 - DNA, 1395 bp, synthetic construct
  misc_feature 1..1395: note = Description of Artificial Sequence: Synthetic coding sequence
  source 1..1395: mol_type = other DNA
atgccaaagaaggccaagccaaccgggtccggcaaggaagaaggccctgccccatgtaagcaaatgaaactggaggcggcagggggtccatctgcactgaactttgatagcccctcctcactgttcgagtctctgatctcccctataaagacagaaaccttcttcaaagaattttgggagcagaaacctctgctcattcagagagatgatccagcactggctacttattacgggtctctatttaagctgactgaccttaaaagcctttgctctcgaggaatgtactatggtagagatgttaacgtgtgccggtgcgtgaacggtaaaaaaaaggtacttaacaaggatggaaaagcacacttcctgcagctgcgaaaggacttcgatcagaagagagctaccattcaatttcatcagccccaacgctttaaagacgaactgtggcgaatccaggaaaagctcgagtgttatttcggttctctggtggggagcaacgtctatatcacgcccgctggtagccagggactgccgcctcactacgacgatgtagaggtctttatcctgcagctggagggagaaaaacattggagactttaccacccaaccgtacctcttgccagggagtattccgtagaggccgaggagcgtattggtagacctgtgcatgaattcatgctcaaacctggtgatctgctgtattttccccgtgggaccattcatcaggcggatacgcccgcaggactggcgcactcaacacatgtaacaatttcgacataccagaacaactcatggggagacttcctcctcgacaccattagtgggctggtgtttgacacagctaaagaagatgtggagcttagaacaggcatccccagacagctgcttctggtggaaagtaccactgtggctacccgaaggcttagcgggtttctgcgaacactcgcagacaggttggaaggcacaaaggaactactgtctagcgatatgaagaaagattttattatgcatcgattacctccgtatagtgccggagatggggctgagctgtctacccccggaggaaaacttccaaggttagacagtgtggtacgcctacaattcaaagaccatatcgtgttgacagtactgccggatcaagaccagtcagatgaggctcaagaaaaaatggtgtacatctatcacagcctaaagaacagtcgtgaaacgcacatgatgggaaatgaagaagagacggagtttcacggcctgagattcccactgagtcatctggatgctctgaagcagatttggaattcgcctgccatttcggtcaaggatcttaagctaacaactgacgaggagaaagaaagtctggtgctgtctttatggaccgagtgcctcatacaggttgtatag

SEQ ID NO: 231246 - DNA, 1398 bp, synthetic construct
  misc_feature 1..1398: note = Description of Artificial Sequence: Synthetic coding sequence
  source 1..1398: mol_type = other DNA
atgcctaaaaaagctaagccgaccggttctgggaaggaagaaggacccgctccatgcaagcagatgaagttagaggcagctggtgggccaagtgctttgaatttcgactctccctctagcttatttgagagtctgatttccccgatcaagacggagacctttttcaaggagttttgggagcagaaaccactcttaattcagcgcgatgatccagccctcgctacgtattatggctcgctgtttaaactgaccgatctgaaatcactatgttcccgaggtatgtactatggacgagacgtgaatgtgtgtcggtgcgttaacgggaagaaaaaagtgctgaacaaggacgggaaagcccattttctccagctgaggaaggattttgaccagaagagggccaccatccagtttcatcaaccccagcggttcaaggacgaactgtggaggatccaggaaaaattagaatgctactttggcagtctcgttggaagcaatgtgtatataacccctgctggtagccagggtctgccccctcattatgacgacgtggaagttttcattctgcagctggagggggaaaagcactggaggctgtaccatcctacggtgccactggccagagagtacagcgtggaagccgaagaacgcatcggcagacctgtgcatgagtttatgctcaaacctggcgacctgctctatttccccagagggaccatccaccaagctgatacccccgcaggtctggcccactctactcatgtaactatttctacctaccagaataactcctggggcgatttcttactcgatactatctctggactggttttcgacaccgccaaagaggacgtggaattgaggactgggatccccaggcagctcctattacaggtggaatctactaccgttgctactcgacgcctgagtgggtttctcaggaccctggccgaccgcttagaaggcactaaagaactgcttagtagcgatatgaagaaagattttattatgcacagacttcccccatactctgctggtgacggggcagagctgagcactcctggaggcaagctgcctcgcctggactcagtggtgcggctacagttcaaggatcacattgtcctcactgtgcttccagatcaggatcagtcagacgaagctcaggagaagatggtttacatctatcactccctgaaaaactcgcgggaaacacatatgatggggaatgaagaagagaccgaatttcacgggttaaggttccccctgtcccacctggacgcacttaaacagatctggaactcaccggcaattagcgtcaaagacttgaaacttacgacagacgaggagaaggaatccctggtgctttcattgtggacggagtgtctaattcaggtggtgtag

SEQ ID NO: 231247 - DNA, 636 bp, synthetic construct
  misc_feature 1..636: note = Description of Artificial Sequence: Synthetic coding sequence
  source 1..636: mol_type = other DNA
atgcttctccaagtgccatgcaatagttggggggacttcctgctggacaccattagcggactggtcttcgacactgccaaggaggatgttgaacttcgcaccggaatccccaggcaactgttgctccaggtggaaagcactactgtggcaactagacgcttaagtgggttcctgcgcactctcgccgaccgtctggaaggcactaaagaacttctctcatctgatatgaaaaaggattttatcatgcataggctgccaccctactcggctggcgacggagccgagttaagcacccccggaggtaagctgccgaggctggacagcgtggttaggttacagtttaaagatcacatagtgctgaccgtgctgccggatcaggaccagtctgacgaagcacaagaaaagatggtttacatctatcatagtctgaagaattcccgggaaactcacatgatggggaatgaagaggagacagagtttcatggcctccgctttcctttgagtcacctggatgccctgaagcagatctggaacagccccgctataagtgtcaaagatttgaagctgacgacggacgaagaaaaggaatccctcgtgcttagcctttggaccgaatgtcttattcaagtggtgtag

SEQ ID NO: 231248 - DNA, 339 bp, synthetic construct
  misc_feature 1..339: note = Description of Artificial Sequence: Synthetic coding sequence
  source 1..339: mol_type = other DNA
atgcctaaaaaggctaaacctactggaagcgggaaggaagaggggccagccccttgtaagcagatgaagctggaggcagcagggggtccatcagccctgaactttgactccccttcgtccctgttcgaatccctaatctcccccatcaagacagagactttctttaaagaattttgggagcaaaagcccctgttgattcaacgggatgaccctgccttggctacttactatggaagtctttttaaactgaccgacctgaagagcctttgcagcaggggcatgtattacggccgagatgtgaacgtttgcagatgtgtcaacggaaaaaagaaggtgtag

SEQ ID NO: 231249 - DNA, 459 bp, synthetic construct
  misc_feature 1..459: note = Description of Artificial Sequence: Synthetic coding sequence
  source 1..459: mol_type = other DNA
atggggcctccttctctgcattcacccacgccgtcactggggcctctgggggcattagtgctgagcagccagcatactagccccgatagctgtaaatctccctggacgctgaaagccgttcgcgcagcgaggcaggccgctgacttcaccctcaaagtggaggtggagtgcagctccctccaggaggcagtccaggcggctgaggcaggggctgacttagttcttctagacaatttcaagcccgaggaacttcaccctactgcgacggtcctcaaagcacagtttcccagcgttgccgtggaagctagtggtggcattaccctggacaacctgccccaattctgcgggccacacattgacgtaatttccatgggcatgcttacacaagcagccccagctctggacttttccttgaaactgtttgccaaggaagtagcccctgttccaaagattcactag

SEQ ID NO: 231250 - DNA, 1434 bp, synthetic construct
  misc_feature 1..1434: note = Description of Artificial Sequence: Synthetic coding sequence
  source 1..1434: mol_type = other DNA
atgttccctgtcttcccgtgcacactgctggccccacctttcccagtgctcggtctggacagtagaggcgttggagggttgatgaacagcttccctcccccacagggccacgctcagaatccactgcaggtgggggctgagctccagtcccggttctttgcttcccagggctgcgcgcagagcccgttccaggctgcgccagcacctccgcctacaccccaggctcccgctgccgagcctcttcaggtggacctgctccctgttctcgccgctgcacaggaaagcgctgctgccgctgctgctgcagcagccgctgcagccgcagtggcggcagcccctcctgcccctgccgcagccagcacagtcgatacagctgctctgaagcagccgcctgcccctccacctccccctcccccagtcagtgcgcctgccgctgaagccgctcctcctgcatccgccgcaacgatcgccgcagctgctgccaccgctgtggtcgcgccaaccagcaccgtcgccgttgctcctgtggcctcagcgctagagaaaaaaacaaagagtaagggcccttatatttgcgcgctgtgtgcaaaagagttcaagaatggatataacctgcggagacacgaggcaatccatactggggctaaggctggacgtgtgcctagcggagcaatgaaaatgcccacaatggtgcctctgtcgttgctgtccgtgcctcagctatcaggagccggaggagggggaggtgaggccggagctggcggaggcgctgcagcagtggccgcaggcggagtggttaccaccacagctagcggtaaaaggatccgcaagaaccacgcatgtgagatgtgtggcaaggcattccgagatgtataccacttgaaccggcacaagctctctcactccgatgagaagccataccagtgccctgtgtgccagcagcgttttaagagaaaggatagaatgagctaccacgtccggtcacatgatggagcagtccacaaaccttacaattgtagccattgtgggaaatcgttttcccgccctgaccacttgaatagccacgtccgccaggttcacagtaccgagcgcccttttaagtgtgaaaagtgtgaggccgcttttgcaaccaaggaccgccttcgggcacatacagtgagacacgaggagaaagtgccctgccatgtctgcggtaaaatgctgtctagtgcatacatctctgaccacatgaaagtccactcacaaggcccacatcacgtgtgcgaattgtgcaataagggcacaggggaggtctgcccgatggccgcagctgctgccgcagccgctgctgccgctgccgcagcagtggctgctccccctaccgctgtgggctcactgagcggtgctgagggggtcccagtgtcttcacagcctttaccaagtcaaccttggtag

SEQ ID NO: 231251 - DNA, 759 bp, synthetic construct
  misc_feature 1..759: note = Description of Artificial Sequence: Synthetic coding sequence
  source 1..759: mol_type = other DNA
atgaagatgccgacaatggtgcccttgtccctactgtccgtcccacagttatcaggtgccggtggagggggtggggaagctggggcaggcggaggcgctgctgcggtggccgctggaggggtggttacaaccactgcatccggaaagcgaattaggaaaaaccatgcttgtgagatgtgtggaaaggcatttagagatgtgtatcatttgaaccgacataaattgtctcattccgacgagaagccctatcagtgcccggtgtgccagcagcgcttcaagagaaaagaccgaatgagctaccacgtcagatcccaccggagatgtgctaaaccatacaactgcagccattgcggaaaatcattcagccgaccagaccatctcaacagccatgtgcggcaagtgcatagcacagagcggccattcaaatgcgaaaaatgcgaagccgcttttgcgaccaaggacaggctccgcgcacacaccgtcagacacgaagagaaagtgccttgtcacgtatgtgggaaaatgcttagcagtgcatatattagcgaccatatgaaggtccactctcaggggccacatcacgtatgcgaactctgtaataagggtaccggcgaggtgtgcccaatggccgcagccgctgctgcagctgcagccgcagccgctgccgcagtggcagccccacctaccgccgtgggctcgctgtccggagccgaaggcgtcccagtttcatctcagcccttaccctcacagccatggtag

SEQ ID NO: 231252 - DNA, 1365 bp, synthetic construct
  misc_feature 1..1365: note = Description of Artificial Sequence: Synthetic coding sequence
  source 1..1365: mol_type = other DNA
atggatcccagtaattggtcaagctttattttccagggtcacgctcagaacccgctccaggtaggcgcagaactgcaatcccgattcttcgcctcccagggatgcgcccagtctcctttccaagctgcaccagctcctcctcctacacctcaagccccagcagcggagccattacaggtcgacctcctccccgtcttggccgcagcccaagaaagtgctgctgcagccgcagctgccgctgccgctgctgccgctgtcgctgcggcaccacctgcacctgctgctgcttctacggtagataccgcggctctgaaacagccgccagcaccacccccaccgccaccaccagtcagcgcccctgccgctgaagccgctcctccagctagtgccgcaaccatcgcagccgctgctgcaacagccgtagtagcgccaaccagtacggtcgctgttgccccagtcgcaagcgcactggagaaaaaaaccaaatcaaaaggtccctatatttgtgccctctgcgcgaaggagttcaagaacggttataacttgagaagacacgaagccatccataccggtgcgaaggcaggcagggttccttcaggtgccatgaagatgcctacgatggtaccactttctctgctgtccgtaccccaactgtcaggggcagggggaggcggaggcgaggctggcgctgggggaggtgcagccgcagtggccgctggaggtgttgtcactacgacagcgagtggaaagaggatccgcaaaaaccatgcttgcgagatgtgtgggaaggcttttcgcgatgtttatcatttgaacaggcacaagctgagccacagcgatgagaagccttaccagtgtccagtctgtcagcagaggttcaaacggaaagatcgcatgtcctaccacgttaggagccacgatggagcggtgcacaagccatacaattgctctcactgtggaaagtcattttcacgccctgatcacctgaactctcacgtccggcaggttcactccaccgagcggccttttaagtgcgagaagtgcgaggcggcttttgccaccaaagaccgcctccgagcccatacagtacgccacgaggagaaagtgccttgtcacgtgtgcggcaaaatgctctctagcgcttatatcagtgaccacatgaaggttcatagtcagggtccacatcacgtttgcgagctgtgcaacaagggcaccggagaagtctgtcctatggctgccgcagcggctgcagccgcagctgctgccgcagcggctgtggctgctccccctactgctgtgggctcactttccggggcagagggcgtgcccgtctcctctcagcctttgccttctcagccatggtag

SEQ ID NO: 231253 - DNA, 2955 bp, synthetic construct
  misc_feature 1..2955: note = Description of Artificial Sequence: Synthetic coding sequence
  source 1..2955: mol_type = other DNA
atgagagcacctgctagaggcacaggctgctgtggacgcagcgggggtagatggctagcgggagctgcccagcccaggtgtctttgggctggcggagcagggcagcgatttatggtgcctggaggcaccatgaagtccctgaaaaaagatagccgtctgcgaatcacacccacccgtttgctggaggcaagcgagaatgtcaaggagaaaaaaagggctaagggcccagagcagcctaccccaaccatccaagaggaacccgagccagtttccaatgtactccaaggcgatgacattctggctcttgctattaaaaaggaggaccttaaggaacagcatattccaagactcactgagaaagaggacaagagagtgatcactcaaaaattcatcatcaggaaactcaagcctatggatccgcgaagaaaggtgtgccatctggtggcgaggcctgctaaccctgatgaagctactaaaccactggattattccgggccaggggattcattcgatggatcagaccaaattctgcctcatcatatactgggcagcctacaggacttcaaacgcatcgcgttggcacgagggaacacacaactcgccgaacgtattcccacaagcccctgtttgatgaccctgatttcagccgagggagagagcaagcaaaaagcccctaaggaggagaagcgaccaccttgggctccccctccgcaacacaacttcttaaaaaattggcaacggaataccgcgctgcgtaaaaagcagcaagaggccttgtctgaacacttgaagaagcccgtcagtgaactgctgatgcataccggggaaacttaccggcgtatacaagaggaaagggagttgattgattgcactctcccaacgaggcgggaccgaaagagttgggaaaatagtggcttttggagcagactggagtatctgggggatgagatgacgggcctggtaatgacgaaaactaagacacagcgaggtctaatggagccgatcacacacatccgtaaaccacattcaattagagtagagacagggcttcctgcccagagagacgcctcctaccgctacacgtgggacagatcactgttcctcatctataggcgcaaagagctccagaggatcatggaggagttggattttagccagcaagacatagacggcctcgaggtcgtgggcaaaggatggccatttagcgcagtgaccgtagaggattacactgtgtttgagaggtcccaggggagcagctcagaggacacggcttacctgggcactttagcctcatcctctgacgtgagtatgcccatcctggggcctagcctactgttctgcggtaagcccgcatgctggatcagggggtcaaacccacaagataaacgccaggttggaatagctgctcacctgaccttcgaaacattagaaggagagaaaactagttcagaactgaccgttgtgaataatggcacagtggccatttggtacgactggagacgccagcatcagcccgacacttttcaggacctcaagaagaatagaatgcagagattttactttgacaatagagagggcgtcatcctgccaggagagattaagacgtttacctttttctttaaatccctcactgccggtgtgttccgggaattttgggaatttcggacgcacccaaccctactaggcggagctatccttcaagttaatctgcacgctgtgagcttgactcaagacgtgtttgaagacgaaaggaaggtgcttgagtccaaacttacagcacacgaagcggtcaccgtggtgagagaagtcctacaggagctccttatgggagtcctcactcccgaacgtaccccctctcccgtggatgcctatctgaccgaggaagacttattcagacacagaaaccctcccctgcactacgaacatcaggtggtgcagtctcttcatcagctgtggaggcagtatatgaccttgccggcaaaggctgaagaagcaagacccggagacaaagagcacgtttcacccatcgccactgagaaggcctctgtaaatgctgaactgctcccgaggtttaggtcccctatctccgagactcaggttccacgtcccgagaatgaagctctgagagagagcggatcccaaaaggccagagtgggtaccaaaagcccgcagagaaaatcaatcatggaagaaatcctggttgaggagtcacccgacgtggatagcacgaagagcccctgggagcccgacgggttgcctttattagagtggaacttatgcctggaggactttcgtaaggccgtcatggtgctgcccgacgaaaatcaccgcgaggacgccttgatgcggcttaacaaagccgctctggaactctgtcagaaacccaggcccttgcagtctaacctcctccaccaaatgtgtctccaactctggagagacgtcatcgattcactggtcgggcacagtatgtggctgaggtctgttctcggcctgcccgagaaagagacaatttatctgaacgtcccggaggagcaagatcaaaaatccccgcctattatggaagtgaaggtccctgttggcaaagccggaaaagaagagaggaaaggagccgcacaggagaagaaacagctgggcattaaggataaggaggataaaaaaggtgccaagcttttgggcaaggaggatcgtccaaactccaagaaacacaaggctaaggacgacaagaaggttattaaaagcgcctcccaggatagattctcactggaagacccgacgccagatataatactcagtagccaagaaccgatcgatcctctggttatggggaaatatacacaatctctccattcagaggtgcgcggattactcgatactctggtgaccgatcttatggtgctggcggacgagctatcacccatcaaaaatgtggaggaagcactcagactgtgccgatag

SEQ ID NO: 231254 - DNA, 2829 bp, synthetic construct
  misc_feature 1..2829: note = Description of Artificial Sequence: Synthetic coding sequence
  source 1..2829: mol_type = other DNA
atggtgcctgggggtacaatgaagtcattgaagaaggattcgcgattgagaattacacccaccagattattagaagctagtgagaacgtgaaggaaaagaagcgggcaaagggtccagagcagcctacacccactatccaggaggagccagaacccgtcagtaacgtgctgcagggtgacgatatattggcattagcaatcaaaaaagaggacctcaaggagcaacacatccccagattgaccgagaaagaggataaacgggtgatcactcagaagtttatcattagaaaactgaagcctatggatccacggaggaaggtctgtcacctggtggcaagacccgcaaacccggacgaagcgacaaagcccctagattatagtggcccaggggacagctttgatggatctgatcaaatactgccacaccatatcctgggatcacttcaggactttaagaggatcgccctggccaggggaaacacgcagctcgccgagcggatccctaccagcccctgcctgatgacactcatatccgcagaaggagagtcaaagcaaaaggcacctaaggaagaaaaacgtcccccatgggcccctccgcctcagcacaacttcttgaaaaattggcagcgtaataccgccttgaggaaaaagcaacaggaggcactttccgagcacctgaaaaagccagtgtcagagctactgatgcataccggggaaacatataggcgcattcaggaggagcgtgaactaatcgattgcaccctgcccaccagacgtgatcggaaaagttgggaaaattccggtttctggagcagactcgagtatctgggagacgaaatgacaggcctcgtgatgacaaaaaccaagacacagagagggcttatggaacccattacgcatattaggaagccacattccattagggtggaaacaggtttaccagcccagcgcgacgccagttaccgatatacctgggatagatcactgtttctaatttaccgcaggaaggaactgcaacgtattatggaagagctggacttctctcagcaggatattgatggactagaagtcgtcggtaaagggtggcccttttctgctgtgactgtggaagattatacggtctttgagaggtcccaggggagctcttctgaggacactgcatacctgggcaccctggcaagctccagcgatgtgagcatgcccattcttggaccctcgttgcttttttgtggcaaacccgcatgctggatcagaggttccaaccctcaagataagagacaagtgggtatcgccgctcacctgaccttcgagaccttagagggagagaagacaagctccgagttaactgtagtgaataacggtactgttgccatttggtacgactggcggcgacaacatcagcctgatacctttcaggacctgaagaagaacagaatgcaaaggttctactttgataatagggagggcgttatattgcctggagagataaagaccttcaccttcttcttcaaatcactgaccgcgggtgtcttccgagagttttgggaatttcgtactcacccgacactcttgggcggtgcaattctgcaggttaaccttcacgcagtaagcctgactcaggatgttttcgaggatgaaaggaaggtactcgaaagtaaactgacagcccatgaggctgtcaccgtggttcgggaggttctgcaagaactcctcatgggagtcctgactcccgagcgtacccctagtcccgtggacgcttatctgaccgaggaagatctgttcaggcatcgaaatccacccttgcactatgagcaccaggtagtgcagtccctgcatcagctgtggagacagtatatgaccctccctgcaaaggccgaggaagcacggcctggagacaaagaacatgtcagtccaatcgccactgagaaggcatctgttaacgcagaattgctgcctcgctttcggtctcctatttccgaaacccaggtgccgcgacccgaaaatgaggccttgcgtgagtccggcagccagaaggccagggtggggaccaagagtccccagagaaagagcattatggaagaaatcctggtggaggaatcccctgatgtcgactctacaaaatctccttgggagccagacgggctgcctttattagagtggaacctgtgcctcgaggacttcagaaaggccgtgatggtcctccccgatgaaaatcaccgggaggatgctctgatgaggctgaacaaggcggctttagaactctgtcaaaaaccccgtcccttgcaaagcaatcttctgcaccagatgtgtttacagctgtggcgtgatgtgatcgattctctggtgggccattctatgtggttgcggtccgtgctgggtttaccagaaaaggaaactatatatctgaacgtgcccgaagagcaggatcagaagagccctcccataatggaggtaaaagtgcccgtcggaaaagcagggaaggaagagcgaaaaggagccgctcaggagaagaagcagctggggattaaagataaggaagacaagaagggggctaagcttcttggaaaggaagatagaccgaattccaagaaacacaaggctaaggatgataagaaggtcataaaatcagcatcccaggatcgattctccttggaagatccgactcctgacattatcctctcttcgcaagagccaatagaccccctggtgatgggaaagtacacgcagagtctccatagcgaggtacatcctgggagatgcgttccatgggagaataccatgcagggagcattcccatctacgactcgttgcgggggttcatgtctgtag

SEQ ID NO: 231255 - DNA, 1992 bp, synthetic construct
  misc_feature 1..1992: note = Description of Artificial Sequence: Synthetic coding sequence
  source 1..1992: mol_type = other DNA
cgaagccggggagctgaagcaacagagtccaaactttcaggtggattcaggtggacccagaaaacaagtccgactcagggggatagcgctatcactcattccctctacaggatgattttcctgaccgctctgccccttttttggatcatgatatctgcttcacgagggggtcattggggcgcttggatgccctcctccatttccgcgttcgaaggcacttgcgtttcgatcccttgtcgctttgactttccagacgagctgaggcctgctgtggtacatggggtctggtactttaattctccataccctaagaactatcccccagtggtgtttaagtcaagaacgcaagttgtccacgagtcctttcaggggagatcccgcctcttgggagatctgggcctgcgaaattgcaccctgctactctcaaacgtttcccctgaactcggcggtaaatattattttcgcggtgacctaggcggatacaaccaatacacattttccgaacactccgtgttggacatagtgaatacaccaaacattgtagtgcccccagaggtggttgccggaaccgaggtcgaggtcagttgcatggtgcctgataattgcccagaactgagacccgaactgtcctggctgggccacgaagggcttggggagccagccgtgctcggtagactgcgtgaggacgaaggcacctgggtgcaggtgagcttactccatttcgtgcccacgagggaggccaatggacacaggttgggatgtcaagcttccttcccgaacaccactctccagttcgaaggttacgcctcaatggatgtcaagtatcctcccgtgatcgtcgaaatgaactcttctgtcgaggctatagaggggtctcacgtgagtttgctgtgtggcgctgacagcaatcccccaccgttactgacgtggatgcgagatggaacggtcctgcgcgaagcagtagctgagagtctcctcctcgaattggaggaggtaacacctgccgaggatggcgtttatgcttgtctggctgagaacgcatacggccaggataataggactgtgggactctcagttatgtatgcaccctggaagccaaccgtaaacggcacgatggtagccgtagaaggcgagactgtttccatcttgtgttctactcagtccaacccagatccaatcctgacaatttttaaagagaaacagatcctaagcaccgtaatatacgaatcggaactgcaactggagctccctgctgtgtccccagaggacgatggtgagtactggtgcgtggcagaaaatcagtatggccaaagagcaacagcttttaatctttcagtagagtttgcaccagtcctgcttctggaaagccattgtgcggctgcccgtgacactgtacaatgtctatgtgtggtgaagtccaatcctgagccttctgtcgcctttgagctgccatctaggaacgtgactgttaacgaaagcgaacgggagtttgtgtatagtgagcgatcaggtctcgtgctgaccagtattctcaccttgcggggacaggcgcaggctccacctagagtcatatgtacggccagaaatctttacggggcaaagagcttggagcttcccttccagggcgcacacagacttatgtgggccaagataggcccagtgggagctgtcgtggccttcgcaatccttatcgccatcgtttgttatatcacacagacccggagaaaaaagaacgtgacggagagccctagcttttctgccggtgataacccccctgtgctcttctcaagcgatttccgcattagcggagctccagagaaatatgagtcggaacgaaggttaggcagtgaacggagacttcttggactccgaggagaaccaccagagctggacctcagttactcccatagcgatctgggaaagcgaccaacgaaagattcgtacactcttaccgaggaattggcggagtacgcagagattcgggtcaagtag

SEQ ID NO: 231256 - DNA, 1749 bp, synthetic construct
  misc_feature 1..1749: note = Description of Artificial Sequence: Synthetic coding sequence
  source 1..1749: mol_type = other DNA
atgatttttcttacagccttgcctctattctggatcatgatctctgccagtcggggtggacattggggggcttggatgccatcttctatcagtgcttttgaagggacatgcgttagcattccatgcagattcgattttcctgatgaacttagacctgccgttgtgcacggggtgtggtattttaacagtccatatccaaagaattatccgcctgtagtctttaaatcaagaacacaggtggttcacgagagctttcagggaagatcccgcctgctgggagacttagggctccggaactgtacccttctactgagcaacgtttcccctgagcttggcggtaaatactacttccgaggagatctgggtggatacaaccagtatacattttcagaacactccgtgcttgatattgtgaatacaccaaatattgttgtgcctcccgaggtggtggcgggaactgaggtggaagtgtcttgcatggtgcctgacaattgccctgaattaaggccagaattaagttggcttgggcacgagggtctcggggagcccgctgtactcggacggcttcgagaagacgagggaacctgggtgcaggtgagcctgctccactttgtgccgacgagagaagcaaatggccatcggttaggatgtcaggcaagcttccccaataccacactgcagttcgagggctatgcgagcatggacgttaagtacccgcctgtgatagtcgagatgaacagttccgtcgaagcaattgaaggctcccatgtctcactgctgtgcggtgccgatagcaatccccctcccctgttgacttggatgcgagatggaacagtcctacgtgaggcagtggccgagtcactcctgctagaactcgaggaagtgaccccagccgaggacggcgtgtacgcctgcttggctgagaatgcttatggtcaggataaccgtaccgtgggcctgagtgtaatgtacgccccttggaagccaactgtcaacggcaccatggtggccgtagaaggagaaacagtgtccattctatgttctacccaatctaatccggaccccattttgaccattttcaaagaaaaacagatactgtctaccgtgatttatgagagtgaactccaactggagctgcccgcagtcagcccagaggacgacggagagtattggtgtgtcgctgagaaccaatacgggcagcgggctacagccttcaacctgagtgttgaatttgccccagtgctcctattggagagtcattgtgcggcagcaagggacaccgtgcagtgcctctgtgtagtgaaaagtaaccctgaacccagtgttgcatttgaactccccagccgcaacgttactgtcaatgagtctgaacgtgagtttgtatatagtgagcgcagcgggctggtcctgactagcatcctgacactgcgcggacaggcccaggccccacccagagttatttgcaccgcccgaaacctgtacggagctaaaagccttgagttgccctttcagggggcacatcgtcttatgtgggcaaagatcggccctgtcggtgccgtggttgccttcgccatattaatagctattgtgtgctatattacacagacacgccgaaaaaagaatgtgactgaaagtcctagtttttctgccggtgacaacccaccggtgctcttcagttccgacttcagaatctcaggagcgccagagaagtatgagtcgaaggaggtgtcaacactcgagagtcactag

SEQ ID NO: 231257 - DNA, 1881 bp, synthetic construct
  misc_feature 1..1881: note = Description of Artificial Sequence: Synthetic coding sequence
  source 1..1881: mol_type = other DNA
atgatattcctcacagcactgccattgttctggatcatgattagcgcttcacgcggtgggcactggggtgcctggatgccttctagcatttccgccttcgagggtacatgcgtgtcaatcccatgccgttttgactttcctgacgaactgcgcccagcggttgtgcacggagtctggtatttcaatagtccctatccaaaaaactatcctcccgtggttttcaaatcccggacacaggtagtccacgagtccttccaaggccgaagcagactcctgggcgacctcggtctgaggaactgtactctccttctcagcaacgtatcacctgaactcggcggtaaatattacttccgtggggatctcggtggctataatcagtacacgttctcagagcacagtgtcctggatatcgtgaatacaccgaatatcgtggtgccccctgaagtcgtggctggcacggaggtggaggtatcttgtatggtccctgacaattgcccagaactacgccctgaacttagttggctgggacacgaaggcctcggtgaaccagcggtgctcggcaggctgagggaagacgaaggaacctgggtacaagtctcactgctccatttcgtgcccactagggaggctaacgggcatcgtctggggtgccaggcgtcctttcccaatactacgcttcaatttgaagggtatgcttccatggatgttaaatacccccctgtgattgtggaaatgaacagtagcgtggaagccatcgagggtagtcacgtctcgttgctctgtggtgcagatagcaacccacctccactgctgacatggatgagagacgggaccgtattacgggaggctgtggctgagtctctgctcctggaactggaagaagtcacccccgctgaagacggggtctatgcctgcctagccgaaaacgcgtacggccaagacaaccgaacagtaggcctgtctgtcatgtacgctccgtggaaaccaacagtgaatggcactatggtggccgtggagggcgagactgtctctatcctctgcagtactcagagcaatccggaccctatattaaccatattcaaggaaaaacaaatcctgagcacagtgatttacgagtctgagctacagctcgagctgcctgcagtctcaccagaagatgatggtgaatactggtgcgtggccgaaaatcagtacggccagcgtgccactgcctttaacctgtcggtggagttcgctcccgtgctgctcctggaaagccactgtgcggctgccagggacacggtgcagtgtctgtgcgtggtgaagtctaatcccgagccctcagtggcattcgagctgcctagcagaaacgtgactgtgaacgagagcgaacgcgagttcgtgtattccgagaggtccggcctggtactcacatccattctcacattgcgaggtcaagcccaggcaccaccaagggtgatctgcaccgcaaggaacctgtacggcgctaagtcactcgagctcccattccagggcgcacatcggcttatgtgggcaaaaatcggtccagtgggcgctgtggtcgctttcgctattctgatcgcaatcgtgtgttatatcactcagaccagacgtaagaaaaatgttaccgaatcaccctctttttccgccggtgataacccccctgtcctgttttcaagcgatttccggatcagcggtgccccagaaaagtacgagagtgagaggcggctcggctctgaaaggaggctgctgggattaagaggtgaaccccctgaactggatctgtcctatagccactcagacctgggcaagagaccaacaaaggattcatacactctgactgaggagctcgcagagtacgcagagatacgggttaaatag

SEQ ID NO: 231258 - DNA, 1806 bp, synthetic construct
  misc_feature 1..1806: note = Description of Artificial Sequence: Synthetic coding sequence
  source 1..1806: mol_type = other DNA
atgcccagctcgatttctgcctttgagggcacctgcgttagtatcccctgtagattcgatttcccagacgaactgagaccggctgtggtgcacggagtctggtactttaattcgccatacccaaagaactaccccccagtcgtgttcaaatcacgcacacaggtggtccatgagtcctttcagggaaggagtagactgcttggcgatcttggtcttaggaattgcacactcctgctgtcaaacgtttcaccagaactgggcggtaaatactacttcaggggtgatctgggtggatacaatcagtacacttttagcgaacacagcgtactggatatcgtgaatactcctaatatcgtggttccccctgaggtagtggcagggactgaggtggaggtctcctgtatggtgccagacaattgtccggagctgcgccctgaattgtcttggctaggacatgagggtctgggcgagccggctgtactcgggagacttcgggaggatgagggcacatgggtgcaggtgagcctcctgcacttcgttccgaccagagaagctaatggccatcgactcggctgccaggccagctttcctaatactacactgcagttcgaagggtatgccagcatggatgtaaagtatcctcccgtgatcgtcgaaatgaattctagtgtcgaggccatagagggatcccatgtttcccttctgtgcggagctgactctaaccctcccccattgctcacctggatgagagacgggacggtgctacgcgaggctgtggcagagagtctgctgctcgagctagaagaagttacgccagctgaggacggcgtctacgcttgtctggccgagaacgcttatggccaggacaacagaaccgtgggcctcagtgtcatgtacgcaccttggaagcctactgttaacggcaccatggtcgctgtggaaggcgagactgtgagtatcctgtgctcaacacagagcaatccagaccccatccttacaatttttaaggagaagcagatcttatccaccgttatatacgagagtgagctccaactggagctgccagccgtctctcctgaggatgatggagaatattggtgcgttgccgaaaatcagtacggccagagagccaccgcatttaatctgagtgttgaattcgcaccggttttgttactggaatcgcattgcgccgcagctcgtgacactgtccagtgcctctgcgtggtgaaatccaacccagaacctagcgtcgccttcgaacttccttccaggaacgttaccgttaacgagtccgagcgggagtttgtctattccgaacgcagtggactggtactcacatcaattttgacgctacggggtcaagcccaggcaccacctagagttatttgcactgcgaggaacctatacggagccaaatccctggagctgcctttccaaggtgcccacagattaatgtgggcaaaaattggccctgttggggcagtggtggccttcgctatccttattgccattgtgtgttatatcacacagacgagaaggaagaagaacgttacggagagtccaagtttttctgcaggtgacaacccaccagtactgttctcctctgatttccgtatttccggcgcacccgagaagtatgagtcagaaagaagactgggtagcgagcggagacttttgggactgaggggcgaaccccctgagctggacctgagctactcgcatagcgacctcggaaagcggccaactaaggattcgtataccttgactgaagagctggcagagtatgccgaaattagagtgaagtag

SEQ ID NO: 231259 - DNA, 915 bp, synthetic construct
  misc_feature 1..915: note = Description of Artificial Sequence: Synthetic coding sequence
  source 1..915: mol_type = other DNA
atgggaaatcatgcaggaaagagagagctcaacgctgagaaagcttccactaactctgagactaatcgcggagaatctgagaagaagagaaacctcggagaactcagcagaaccaccagtgaggataacgaagtgtttggtgaagcagatgccaaccaaaacaacggaactagttctcaagacacagcagtgacagattctaagcgcactgccgatccgaagaatgcttggcaagatgcgcacccagctgacccaggctcccggcctcacctgatcaggctgtttagtagagacgccccaggacgggaggacaataccttcaaagacagaccatcggagagcgatgaactccaaactattcaggaagatagtgcagcaacctctgaatccctggatgtgatggccagccagaagaggcctagccagaggcacgggagcaagtacctggccacagccagcactatggaccacgcccgacacggatttctgccaaggcatcgcgacacaggcatcctggactccataggcaggtttttcggcggagaccgtggtgcgccaaaaagaggttcaggaaaagactcccatcatccagctaggaccgcccattatggatcactgcctcagaagagtcacggacggacgcaggacgaaaatccggtcgttcacttctttaaaaatatcgtgacccccaggacacccccaccatctcagggtaaagggcgtggccttagtttatcccggttctcatggggggctgaaggacagaggcctgggttcggttacggaggacgggcaagcgactacaagtccgctcacaaaggattcaaaggcgtggacgcccaaggaaccctatctaagatcttcaaactgggcggacgcgatagccggtctggctcgccaatggcccgacggtag

SEQ ID NO: 231260 - DNA, 561 bp, synthetic construct
  misc_feature 1..561: note = Description of Artificial Sequence: Synthetic coding sequence
  source 1..561: mol_type = other DNA
atggcatcacaaaaacgtccctcacagagacacggatctaaatacttggctacagcttctactatggaccatgccaggcacgggtttctgcctagacatcgagacaccggcattttagacagtatcggacggtttttcggcggagataggggggcacccaaaaggggtagtggtaaagtgccctggttaaaacccggaagatcccctttgcctagtcacgctcggtcccagccgggtctgtgtaacatgtataaggattctcatcaccctgcgaggacagcccactacgggtcactgcctcagaagtctcatggcagaactcaggatgagaaccctgtggttcacttttttaagaatatcgtgactcccagaacaccacctccatctcagggtaagggcgcagaggggcagcgaccgggatttgggtacggcggaagagcttctgactacaaatctgctcacaagggctttaaaggcgtggatgcccaggggacactgtccaagatcttcaagctcgggggaagggatagtcgtagtgggagccccatggctagacggtag

SEQ ID NO: 231261 - DNA, 594 bp, synthetic construct
  misc_feature 1..594: note = Description of Artificial Sequence: Synthetic coding sequence
  source 1..594: mol_type = other DNA
atggcctcacaaaagcgcccatctcagagacacggctctaagtacctcgcaaccgcaagtaccatggatcacgcccgacatggcttcctgcctcggcaccgggatactgggatactggactctatcgggaggttctttgggggtgacaggggtgcgccaaaacgaggatccgggaaagtaccctggcttaaacctgggaggtcccctcttccttcccatgcccgaagtcaaccgggtctttgcaacatgtacaaagactcccaccacccagctaggacggctcattacggctcccttccacagaagtcacacggtaggacccaggatgaaaatcccgtggtacatttcttcaaaaacatcgttacccctaggaccccccctccctcccagggtaaggggcgaggtctgagcctgagccgattttcttggggggctgagggtcaacgaccgggatttggctatggtggcagagcctctgattacaaaagcgcacacaagggatttaagggagtggacgcccagggcaccctcagcaagatctttaagttgggcggtagagacagtcgcagcggtagtcccatggcgaggcgctag

SEQ ID NO: 231262 - DNA, 594 bp, synthetic construct
  misc_feature 1..594: note = Description of Artificial Sequence: Synthetic coding sequence
  source 1..594: mol_type = other DNA
atggggaatcatgctggcaagcgtgaacttaatgcggaaaaggcctctacaaactccgaaaccaatagaggtgaaagcgagaagaaacggaacctaggcgaattgtcccgcacaactagcgaggacaatgaagtgttcggcgaggccgatgccaatcagaataacgggactagctcccaggacaccgctgtgacagactctaagcgaacagcggaccccaaaaacgcgtggcaggatgcccaccccgcagaccccggtagccgaccccaccttatccgtctttttagccgagacgcacctggtcgggaggataacacctttaaggacagaccatctgaaagtgatgagctgcaaaccattcaggaggatagtgctgcgacttctgagtcgctagatgttatggctagtcaaaaacgcccttctcaacggcacggatccaaatacctggccaccgcatccaccatggatcacgctagacatgggttcctgccaagacatagggatacggggatactcgattcaattgggcgatttttcgggggagatcgcggagccccaaagcgtgggagtgggaaggttagctcagaagaatag

SEQ ID NO: 231263 - DNA, 594 bp, synthetic construct
  misc_feature 1..594: note = Description of Artificial Sequence: Synthetic coding sequence
  source 1..594: mol_type = other DNA
atgggcaaccacgccggtaaaagagaactcaatgctgaaaaagcgagtaccaactctgaaaccaacaggggggagtccgagaagaaacgcaacttgggcgagctgagtaggaccactagtgaggacaatgaagtctttggggaagctgatgctaaccagaacaacggcaccagttctcaggacacagccgtcacagacagcaagcgtacggccgaccccaagaacgcctggcaggatgcacatccagcggatccaggctcacgccctcacctgatcagacttttttctcgggacgcccctgggagggaggacaacaccttcaaagacagaccttccgagagcgatgaactccagacaatccaggaagattccgcagcaaccagcgagtcgctcgatgtcatggcatctcagaaaaggccgagtcaaagacatggatcaaaatacttggccacagcctctactatggatcacgcaagacacgggttcctgccccgtcaccgagataccggtatattggacagtattggaaggttcttcgggggagatagaggagcccctaaaaggggttcaggtaaggtgtcgtcagaagagtag

SEQ ID NO: 231264 - DNA, 483 bp, synthetic construct
  misc_feature 1..483: note = Description of Artificial Sequence: Synthetic coding sequence
  source 1..483: mol_type = other DNA
atggcctcgcagaagcggccttctcagcgacatggctcgaaatacctggctactgcttcaacaatggatcatgcacgtcacgggtttcttcctcggcaccgcgatactggaattctcgattcaattggaagattcttcggaggggaccggggagccccaaaaagaggatctggaaaagatagtcaccatccagccaggacagcccactacggctctctcccccagaaatcgcacggacgcacccaggacgaaaaccctgtagttcacttctttaaaaacatcgttacccctaggactcctcccccttcccaaggaaaaggcgcagagggacagcggccaggctttggctacgggggacgagcttcggactacaagagcgcccataagggttttaaaggtgtagacgcgcaagggactctgtctaagatattcaagctgggcggaagagattctagaagcggatctcccatggcaaggcgttag

SEQ ID NO: 231265 - DNA, 516 bp, synthetic construct
  misc_feature 1..516: note = Description of Artificial Sequence: Synthetic coding sequence
  source 1..516: mol_type = other DNA
atggcctcacagaaaaggcctagtcagcgtcatggatctaagtacctggccactgcctccaccatggaccacgctcgtcacggctttctgccgcgtcaccgcgacaccggcatactggactccataggcagatttttcggtggggacaggggggcaccaaagcgcggttctgggaaagactcccatcatccagccaggaccgctcactatggctcactccctcagaagtcccacggtaggactcaagacgagaacccggtggtgcatttcttcaagaacatcgtcacacccaggacaccacctcctagccagggaaagggtcggggtctttcactttctcggttttcctggggcgctgagggccagaggccgggattcggatatgggggaagggcatctgattataagtctgcacataaaggattcaagggagtggatgcccaggggaccttaagcaagatatttaaactgggcggaagagattctcgctccggatctcctatggcacgccgatag

SEQ ID NO: 231266 - DNA, 261 bp, synthetic construct
  misc_feature 1..261: note = Description of Artificial Sequence: Synthetic coding sequence
  source 1..261: mol_type = other DNA
atggccagccagaaaagaccttcacagcgacacggatcgaaatatctggctaccgccagcacaatggatcacgcaaggcatgggtttctgcctcgtcacagagatactggcatcctagattccatcggcaggttttttggcggtgatcggggtgccccaaaacgcggttccggaaaagattcccatcatcccgcaaggactgcacattacggcagcctgccgcagaaatcccacggaagaacacaggacgagaatccgtag

SEQ ID NO: 231267 - DNA, 888 bp, synthetic construct
  misc_feature 1..888: note = Description of Artificial Sequence: Synthetic coding sequence
  source 1..888: mol_type = other DNA
atggcaagtctgtcgagaccctccctgccttcatgtctgtgctcatttttgctcctgcttctactgcaagtcagctcatcgtacgcaggacagttccgagtaatcggccctagacatccaattcgtgcactcgtcggcgacgaagtagagctgccctgccgcatttcacctgggaagaatgctactggtatggaggtgggctggtaccgcccacccttcagccgtgtggttcatttatacaggaacgggaaggatcaagacggagaccaggctcccgaatatagggggaggacggagttgttaaaagatgccatcggagaaggaaaggttacattgcggataaggaatgtcaggttcagcgacgaggggggttttacctgcttcttcagagatcattcataccaagaagaagccgctatggagttgaaggtggaagatccgttttactgggtgtcccccggagtgctggtgctccttgccgtcctacctgtgctgctgcttcaaattaccgtgggcttagtttttctgtgccttcagtacaggctgcgcggaaagttacgggctgagatcgagaatctgcaccgtacctttgacccccactttctgagggtgccctgctggaagataaccctgttcgttatcgtgcccgtcttggggccactcgtggcgttgataatctgttataattggctgcatcgacgactggcaggtcagttcttagaggagctccggaaatttagctcgttgtgctacaagcagaggataaagtctcaagaaagagagacagaggcaacacgaggcagagggggactgctccgtgaccatatccctagaggaaaggaggaactggagtcccttgggggtgggaaaaccccccctggcagatag

SEQ ID NO: 231268 - DNA, 642 bp, synthetic construct
  misc_feature 1..642: note = Description of Artificial Sequence: Synthetic coding sequence
  source 1..642: mol_type = other DNA
atggcctccttatcaaggcctagcctgccatcatgcctgtgctccttcctgctgctcctgctcctgcaagtctcgtcatcttatgcagggcaatttagagttataggccctcgccatccaatccgagcactggtgggagacgaagtcgaactgccttgtcggatctcgcccggtaagaatgcgactggaatggaggtgggatggtatcgacctccttttagtcgcgtggttcacctgtataggaacgggaaggatcaagacggcgatcaggccccagagtatcggggacgcacagaattattaaaagatgctattggtgaagggaaggtgacccttcgaattagaaatgtgcggttttctgacgagggaggattcacctgcttttttcgtgaccactcgtaccaagaggaggccgctatggaacttaaggtggaagaccctttttactgggtgtctcctggcgtgctcgtgctgctcgctgtcctccccgtgctgcttctccaaattacagtcgggctggtgtttctttgtctgcagtataggctgagggggaaactgcgcgctgagattgaaaatttacatagaacttttgggcagttcctggaagaattgctgtttcatctcgaagccctgtccggctag

SEQ ID NO: 231269 - DNA, 396 bp, synthetic construct
  misc_feature 1..396: note = Description of Artificial Sequence: Synthetic coding sequence
  source 1..396: mol_type = other DNA
atggccagtttgagccgacctagcctgccgtcctgcctatgctcgttcctacttttgctcctcctgcaggtgtcctcatcgtatgcggaccccttctattgggtatcaccaggagttctggtgctccttgccgtcttgcccgtcctcttactgcaaataaccgtagggttaatcttcctttgcctccaataccgtctcaggggtaagctgagggccgagatagaaaatctgcacagaaccttcgatcctcactttctaagggtaccctgctggaagatcacactcttcgtcatcgtgcccgtgctgggccctctcgttgccctgataatttgctataactggctgcatcgcagactggccggacagttcctggaagaattgcgcaacccgttctag

SEQ ID NO: 231270 - DNA, 621 bp, synthetic construct
  misc_feature 1..621: note = Description of Artificial Sequence: Synthetic coding sequence
  source 1..621: mol_type = other DNA
atggctagtctctccaggccaagcttaccgtcctgtctttgctccttcctgctcttgctgctacttcaagttagctcatcatatgcgggtcaatttagggtaattgggcctaggcatcctatacgagccttagtgggagatgaagtagaactgccatgccgcatctcgccgggaaagaacgccaccggtatggaggtggggtggtaccggcctccgttttctagggtcgtgcatctctaccgtaacggaaaggaccaggatggggatcaggcccctgaataccgtggcagaacagagcttctcaaagatgctatcggcgagggcaaggtgacattaagaatacgaaatgtgagatttagcgacgagggcggatttacctgcttctttcgcgatcattcctatcaggaggaagccgctatggagttgaaggtggaggaccctttctattgggtgtcccctggggtgttagtgttactggcggttctgccagttcttctgctccagatcacagtgggtcttatctttctctgcctacaatataggttaagaggtaaactacgggctgagatcgagaacctgcatcgcacctttgtgttccatctggaggcgctgtccggctag

SEQ ID NO: 231271 - DNA, 759 bp, synthetic construct
  misc_feature 1..759: note = Description of Artificial Sequence: Synthetic coding sequence
  source 1..759: mol_type = other DNA
atggcttcgttgtccagaccttccctgccctcctgtctttgttcgtttctgctactgttgcttctccaggtgtcaagtagctatgcaggccagttccgagtaattggcccacgacatcctatacgtgctcttgtcggggacgaggttgagttgccttgccgcatttccccgggaaaaaacgccacgggtatggaggtcggatggtatcgaccacctttcagtcgagtggtgcatctctaccgtaacggtaaagatcaggacggggaccaggctcctgagtatcgcggacggaccgaactgctgaaggatgccatcggggaggggaaagtgactctgcgaatccgcaacgtgaggttctcagacgagggtggcttcacatgctttttcagggatcatagctatcaggaggaggccgcaatggaactcaaggttgaggaccctttttattgggttagccccggagttctggtactgctagcagtattgcctgtgctgttactgcagataacagtaggactgatatttctttgccttcagtaccggctgcggggaaaattgcgagccgagattgagaacctgcaccggaccttcgacccacattttctcagggtgccctgctggaaaataacactctttgtgattgttcctgtccttggtccattggtagcactgattatatgttacaactggctgcaccggagactcgcgggacagtttctcgaggagctactgttccatctggaggccctgagcgggtag

SEQ ID NO: 231272 - DNA, 516 bp, synthetic construct
  misc_feature 1..516: note = Description of Artificial Sequence: Synthetic coding sequence
  source 1..516: mol_type = other DNA
atggcatctttgagcagacccagtctgcctagctgtctgtgtagctttctgctgctgttgcttctacaggtgtcctcttcttatgcgggacagttcagagtgataggacccaggcaccccataagggcgctggtgggcgatgaagtagagctgccctgcaggatctcccccggaaagaatgctaccgggatggaagtaggctggtatcgccctcccttctccagagtggtccacctgtaccggaacggcaaggatcaggacggtgatcaagcgcctgagtaccgcggtaggacggaattgttgaaggacgctattggcgaggggaaagtgaccctgcggattcggaatgttagattctcagatgaaggcggattcacatgttttttcagagatcactcttaccaagaagaggcggctatggaactaaaagtggaggtcagccacagcgtgacccaggattggctgcagtggcacgatcacggtagcctgcaaccaccccctccacgcctcaagtag

SEQ ID NO: 231273 - DNA, 744 bp, synthetic construct
  misc_feature 1..744: note = Description of Artificial Sequence: Synthetic coding sequence
  source 1..744: mol_type = other DNA
atggctagcctgagccggccttccttgccgagttgtttgtgctcatttctcctgctgctgctcctccaggtctcgagctcttacgcgggacagtttcgggtgataggtccccgacacccaattcgcgcactggtcggggacgaagtggaactgccatgccgcatttcacccggaaagaatgcgaccggcatggaggttggatggtatcgcccacctttctctagggttgtgcatctttacagaaacgggaaggaccaggatggcgaccaggccccagaatacagaggccgtacagaactgttaaaagacgctatcggcgaaggtaaagtgactctgcgcatccggaacgtcagatttagcgacgaaggcggatttacgtgctttttcagagatcacagctaccaagaggaagcagccatggaacttaaagtggaagatcccttttattgggttagcccgggagtgctggtgcttttggcagtgctacccgtgctgctccttcaaattactgtagggttgatattcctgtgcctccagtaccgcttaaggggcaagctccgggctgaaattgaaaacctgcatcgaaccttcgaccctcactttctgagagttccttgctggaaaattacccttttcgtcattgtgcccgtcctcggcccactggtggctttgattatctgctacaattggctgcacagaagactggcgggtcagtttctcgaggaactacgcaatcctttttag

SEQ ID NO: 231274 - DNA, 396 bp, synthetic construct
  misc_feature 1..396: note = Description of Artificial Sequence: Synthetic coding sequence
  source 1..396: mol_type = other DNA
atggctagtctcagccgtccctctttgccatcatgtctttgctccttcctgctgcttttgctacttcaggtgagttcaagctacgcagatcctttctactgggttagccctggagtcctggttctcctggccgtccttcccgtgctgcttttacagattactgttggactggtctttctatgcctacaataccgcctccgaggcaaactgcgggctgagatagagaatttgcatcgtacctttgatccgcatttcctcagagtcccctgttggaagattacactctttgtgattgtgcccgtcctcgggcctcttgtcgccctcattatctgctataattggttgcacagaaggctcgcaggacagttcctggaggagcttcggaatcccttttag

SEQ ID NO: 231275 - DNA, 744 bp, synthetic construct
  misc_feature 1..744: note = Description of Artificial Sequence: Synthetic coding sequence
  source 1..744: mol_type = other DNA
atggccagtctgagccgccctagtctcccgtcgtgcctgtgctcattcctcctgttgctcctgctgcaagtctcaagttcatacgccggtcagtttcgagtgattgggccacggcaccccatcagggctttagtcggagacgaggtcgagctcccctgtaggatctctcctggcaagaacgcaaccggcatggaagtgggatggtatagacctcccttcagccgtgttgtccatttgtacagaaacggcaaggaccaggatggggaccaggctcctgaataccggggaaggacagagctcttgaaggacgcgatcggagagggtaaagtgactctgaggatccggaacgttagatttagcgatgaagggggtttcacttgcttctttcgcgatcactcctaccaggaggaagccgctatggagttaaaggtcgaggatcccttctactgggtctctcctggcgtgctcgtactgctggcggtgcttccagtgctgctcctacagatcacagtggggctcgtgttcctttgtctgcagtataggcttaggggaaaactccgcgctgaaattgaaaatttacatcgaaccttcgacccccattttctgagggtgccctgctggaagatcaccctatttgtcatcgtgccagtcttaggccctttggtggctttgatcatctgctacaattggctccataggcgcctagcaggacaatttttggaggagctgcgcaacccattctag

SEQ ID NO: 231276 - DNA, 744 bp, synthetic construct
  misc_feature 1..744: note = Description of Artificial Sequence: Synthetic coding sequence
  source 1..744: mol_type = other DNA
atggcttcattgtctcgccctagcctccccagctgtctatgctctttcctgctgttgctgctcctgcaggtctcaagctcctacgccggacagttcagggtcatcggtcccaggcatcccatcagagcgctcgtgggggacgaggtggagctcccctgtaggatcagtccgggtaaaaatgccacagggatggaggtaggatggtataggccacctttcagtagagtcgtgcacctgtatcgaaatggcaaggatcaggatggtgaccaagcccctgagtatagagggagaacagagctcctgaaagacgccataggtgaaggcaaagtgacacttagaatccggaatgtaagattctccgatgagggcggttttacctgcttctttagagaccactcctatcaggaggaggcagccatggaactgaaggtcgaggaccctttctactgggtatctccaggggttttagtgctgctggctgtcttaccagtcttgcttttgcagatcacagtgggcctggtgttcttgtgcctgcagtacagactgcgaggaaagctgcgtgccgagatcgaaaatcttcaccggactttcgacccccatttcctgcgcgtgccctgctggaaaatcactctgtttgtaattgtccccgtattgggccctctggtggccctgatcatatgttataattggctgcatcggaggttagctggccagttccttgaggaactaagaaatccattttag

SEQ ID NO: 231277 - DNA, 690 bp, synthetic construct
  misc_feature 1..690: note = Description of Artificial Sequence: Synthetic coding sequence
  source 1..690: mol_type = other DNA
atggctagtctgagcaggccttcgctacctagctgcctgtgctcttttttgctgttgctcttgctccaggtctcctccagctacgctggccagttcagggtgatcgggcctcgtcacccaatccgagccctggtaggcgacgaggtggagctcccctgccgaatttctcctggcaagaatgctaccggaatggaggttgggtggtatcggccaccctttagtcgggtagtgcacctgtatagaaacggaaaagaccaggacggcgatcaggccccagaatatcgcggaagaacagagctattgaaggacgcaatcggtgagggaaaagttacactgcgcattaggaacgtgcgatttagcgacgaggggggtttcacatgcttctttcgcgaccattcctaccaggaggaagccgcaatggagctgaaggtggaggacccattctattgggtgagcccgggagtgcttgttttgcttgcggtcctgcccgtcctgctgcttcaaatcaccgttgggctggtctttctctgcctgcaatataggcttagggggaagctccgcgcagaaatagaaaatttgcatcgcaccttcgagtcgttcggcgtactgggaccacaggtgaaagaaccaaagaagactggacagttcctggaagaacttttattccacctggaagcgctatctgggtag

SEQ ID NO: 231278 - DNA, 642 bp, synthetic construct
  misc_feature 1..642: note = Description of Artificial Sequence: Synthetic coding sequence
  source 1..642: mol_type = other DNA
atggcgagtctcagtcgccctagtctaccaagttgcttgtgctctttcctgctgctactcctcctccaggtatcttcatcatacgccggtcagtttagggtcattgggccaagacaccccattcgggctctggtgggcgatgaggtggagctaccctgccgaatatcccctggcaaaaacgcaactggaatggaagtggggtggtaccgtccacctttctcacgcgtggtccacctgtaccggaacggcaaagaccaagatggtgatcaggccccagagtatcgcggaagaactgaactcctgaaagacgcaattggggagggaaaggtgaccctgagaatacgtaacgttcgcttttctgatgagggcggtttcacgtgtttctttagagaccacagttatcaggaggaagccgctatggagctcaaagtcgaggatcccttctactgggtctctcccggagtcctggtcctgctggcggtcctgccagtgttgcttctgcagataactgttgggctcatctttctctgtctgcagtatcgcctgagagggaaattgcgggctgagatagaaaacctgcaccggaccttcgggcagttcctcgaagaactgctgtttcacctggaggccctgagcggctag

SEQ ID NO: 231279 - DNA, 675 bp, synthetic construct
  misc_feature 1..675: note = Description of Artificial Sequence: Synthetic coding sequence
  source 1..675: mol_type = other DNA
atggcctcactgtcacgtcccagcctaccttcttgcctttgttcatttctactgcttctgctcctgcaggtctcttcctcctacgccggtcagttcagggtgattggacctcggcacccaattcgcgcattagttggggacgaagttgagctgccttgcagaatctcccccggaaaaaacgcaactgggatggaggtgggttggtacagaccccctttctcacgagtggttcatctgtaccgaaatggcaaggaccaggacggagaccaagcccctgagtacagagggagaactgagctcttgaaggatgcaatcggagagggaaaagtcacgcttcgtatccggaacgttcgcttctcggacgaaggcggattcacctgctttttccgcgaccactcgtaccaggaggaggccgcaatggaactaaaagtggaagacccattctattgggtgtcacccggagtgctcgtcctcctagctgtgctcccagtcttattgctgcagatcaccgtcgggctaatcttcctttgtttgcagtatcgactgcgtggcaaactccgcgcagaaatagaaaacctgcatagaacattcgagagttttggagtgctggggccacaggtcaaggaacccaagaagaccggacagttcctcgaagagttgcgcaatcctttttag

SEQ ID NO: 231280 - DNA, 675 bp, synthetic construct
  misc_feature 1..675: note = Description of Artificial Sequence: Synthetic coding sequence
  source 1..675: mol_type = other DNA
atggcgtctttgagtcgcccttcgcttccttcttgtctctgtagcttcctcttgcttctcctgctgcaagtgtcaagctcatacgctggccagttccgggtaattggcccacggcacccaattagggcacttgtgggcgatgaagtggaactgccatgcaggatctcaccgggaaagaatgctacaggcatggaggtgggctggtatagacccccttttagcagagtggtgcatttatacaggaatgggaaggatcaggatggggatcaggcaccagagtataggggcaggaccgaattgttaaaagatgcgattggcgagggaaaggtcaccctgcgcatccggaacgtgcggttcagcgacgagggaggtttcacttgttttttccgggaccactcttatcaggaggaggccgctatggaacttaaggtggaagatccattttactgggtgtctcctggcgtgctggtactgctagccgttctacctgtcctgttgctgcaaataaccctaggcttggtctttctctgcctccagtacaggctgcggggtaagctgagagccgagatcgagaaccttcaccgcaccttcgagtcatttggggtcttaggccctcaggttaaagagcctaaaaaaacaggtcaattcctggaggaacttagaaaccccttctag

SEQ ID NO: 231281 - DNA, 690 bp, synthetic construct
  misc_feature 1..690: note = Description of Artificial Sequence: Synthetic coding sequence
  source 1..690: mol_type = other DNA
atggccagcctgagccgcccaagcctccccagttgtctgtgctcatttctcctcctactgctgctgcaggtctctagctcatatgccggacaatttcgggtgattggtcctcggcatcctattagggccctggtaggagacgaagtcgagttgccatgtcgcatcagtcccggaaagaatgcaacaggaatggaggtcggctggtataggcctcccttctcaagagtcgtgcacctctatagaaacggtaaggaccaggacggcgaccaggcccctgaatacagaggcaggacggaactcctgaaggatgcaattggcgaggggaaggtaacgctgaggattcgcaacgttcggttctctgacgagggaggttttacctgtttctttcgggaccactcttatcaggaggaggctgcgatggaactgaaagtggaggatcctttttactgggtaagtccaggggtgctagtgctcctcgccgtcctgcccgttctcctcctgcagattactgtgggtttagtttttctgtgtctccaataccgtctgcggggaaaactgcgcgctgagatagagaatcttcatcggaccttcgaatcatttggtgtgcttggtcctcaggtcaaagagcctaagaagacaggccagttcttggaggagttgctctttcatctggaggccttaagtggctag

SEQ ID NO: 231282 - DNA, 642 bp, synthetic construct
  misc_feature 1..642: note = Description of Artificial Sequence: Synthetic coding sequence
  source 1..642: mol_type = other DNA
atggcgtctttgtcgcggcctagccttccctcatgcttatgcagttttctgctgctgctcttgctccaagtatccagtagttacgctggccagtttcgggtgatcggtcccaggcatcccattagggcattggtgggcgatgaggtcgaacttccatgccggataagtcccggaaaaaacgccactggaatggaggtcggctggtacagaccacccttttcacgggtcgtgcacctgtataggaatggaaaggatcaggacggcgaccaggcaccggagtatagaggcaggaccgaattattaaaggatgccataggagagggcaaagtgacgcttcgaatacggaacgtgagattcagcgatgaggggggattcacatgcttctttcgcgatcactcctaccaggaagaagcggctatggaactcaaggtggaggatccattttactgggtgtctccaggcgtgctggtgctacttgccgttttaccagttcttcttctgcaaattaccgtgggcctcgtctttctgtgtctgcagtacaggttgcgcggaaaactcagagctgagatcgaaaatttgcacaggacatttgggcagttcctcgaggagctgctgttccacttagaggcactgtccgggtag

SEQ ID NO: 231283 - DNA, 540 bp, synthetic construct
  misc_feature 1..540: note = Description of Artificial Sequence: Synthetic coding sequence
  source 1..540: mol_type = other DNA
tgacagtttcgagtgatcggccctcgtcatccaatccgcgctctcgtgggggacgaagtggaactaccttgccgcataagcccagggaaaaacgcgactggcatggaggtgggctggtaccgaccacctttctctcgcgtagtccacctgtatagaaacgggaaggatcaggatggagatcaagcccctgagtaccgaggcagaaccgaactgctgaaggatgccatcggagaaggaaaagtcacgctgcgaatccgtaacgtgaggtttagcgatgaaggcggttttacctgttttttcagagaccattcatatcaagaagaggccgctatggaactaaaagtagaagaccccttctactgggttagccccggagtgttggtcttgctggctgtgctacccgtcctgctgctccagattaccgtcgggctggtcttcctatgtctacagtacagactcaggggcaagcttagagctgaaatcgagaatctccacaggaccttcggccagttcctggaggagctgcgaaaccccttttag

SEQ ID NO: 231284 - DNA, 396 bp, synthetic construct
  misc_feature 1..396: note = Description of Artificial Sequence: Synthetic coding sequence
  source 1..396: mol_type = other DNA
atggcctccctttctcggccatccctccccagctgcctctgtagcttcctgctcctcctgttgctgcaggtgagtagcagttacgctgatccattttattgggttagtccaggcgtgctagtccttctggccgtgctgcccgtcctcctgctccagattaccgtgggcctcgttttcctgtgcttgcagtacaggctccggggaaagttgagggcagaaatcgaaaacctgcatcgcacttttgacccccactttctgcgggtcccctgttggaagatcaccctgttcgtgatcgtgccggtactgggaccattggtggctttaataatatgctataactggctccaccggagattagccggtcagtttttggaggagctgagaaacccattttag

SEQ ID NO: 231285 - DNA, 615 bp, synthetic construct
  misc_feature 1..615: note = Description of Artificial Sequence: Synthetic coding sequence
  source 1..615: mol_type = other DNA
tctctaagccgacctagtctgccctcatgtctgtgttcatttcttctgttactgctactgcaggtgtcttcatcctatgcaggccagttcagagttattggccctaggcacccaatccgagccttggtgggcgacgaagttgagttaccatgccgcatttcaccaggtaaaaatgctaccggtatggaggttggttggtacaggcctcccttctctcgggtggtccatctttatcggaacgggaaggaccaggacggtgatcaggctccggagtacaggggacggacagagctactcaaggatgcaataggtgagggtaaggtaacattaagaattcggaatgtgaggtttagcgacgaggggggatttacctgcttctttagagatcacagctaccaggaggaagccgcaatggaacttaaggttgaggatcccttctattgggtaagccctggcgtactggtgcttctggccgttctcccggtcctgctgctgcagataaccgtaggtctcgtattcctgtgcttacagtaccgcttacggggaaaactgcgggctgagatcgagaacctccaccggactttcgtcttccatctcgaggccctttcaggatag

SEQ ID NO: 231286 - DNA, 396 bp, synthetic construct
  misc_feature 1..396: note = Description of Artificial Sequence: Synthetic coding sequence
  source 1..396: mol_type = other DNA
atggcctccctgagtcgcccttctctaccatcttgcctttgttctttcctgcttttactcctcttacaggtttcttcaagctatgctgatcctttctactgggtgtctcctggcgttctggtgttattagccgtcctcccagtcctgctcctccaaatcacgctcggcctggtcttcctctgcctgcagtataggctgagaggtaaattgcgcgcagagatcgaaaatctccaccggacatttgatccccacttcctgagagtgccctgctggaagattactttgttcgtcatagtacctgtcctgggaccactggtggcactgattatctgttacaactggttgcaccggcgactagctggccaattcctggaggagctgcggaatccgttttag

SEQ ID NO: 231287 - DNA, 675 bp, synthetic construct
  misc_feature 1..675: note = Description of Artificial Sequence: Synthetic coding sequence
  source 1..675: mol_type = other DNA
atggcgtccctctctcgcccatcactcccgagctgtctatgttctttcctgttgctgttattgctccaagtgtccagctcttacgcaggacagttccgagtcataggacccaggcaccctattcgcgcattggtaggagacgaagtggagctcccatgccgtatctccccaggaaagaacgccaccgggatggaggtaggctggtatcggccaccattctcaagagtggtccacttataccgcaatggcaaagaccaggatggcgaccaggcgcctgaatatcgaggtagaaccgaactgttgaaggatgcaattggtgaaggtaaagtgactcttcgcatccgaaacgtcagattttctgacgaaggtgggtttacctgtttcttccgtgaccactcttaccaagaggaagccgctatggaattaaaagtggaagacccattctactgggtttcccccggagtcctcgtactgctggcagtgctgcccgtcttgctcctgcagattacagtgggtctggtgtttctttgccttcaatacagactgagaggcaagcttagagccgaaatagagaacctccatagaacttttgagtccttcggcgttctgggcccacaggttaaggaaccaaaaaaaaccggtcaatttttagaagagctccggaaccctttttag

SEQ ID NO: 231288 - DNA, 675 bp, synthetic construct
  misc_feature 1..675: note = Description of Artificial Sequence: Synthetic coding sequence
  source 1..675: mol_type = other DNA
atggcctccctgtcgaggccaagtctccctagctgcctatgcagttttttgttgttgctgctgttacaagtttcttcttcttatgctggccagttcagagttattggccctcggcatcctattagagccttagtgggagacgaggtagagctcccgtgtcggattagtcccggaaaaaacgcaaccggcatggaagtcgggtggtacagacctcccttcagtagagtcgttcacctctaccggaatggtaaggaccaggacggggatcaggcacccgaatatcgaggacgtactgagctcctgaaggacgcgatcggcgaaggcaaggttaccctccgcattcgaaatgtcagattcagcgatgaaggtggctttacatgcttctttagggaccattcctatcaagaggaggcggctatggaactcaaggttgaggaccctttctactgggttagcccaggggtcctggtgctgctggcagttcttcccgtgctacttctccagataaccgttggcctggtgttcctgtgcctgcagtatagactcagaggcaagctccgggcagaaatagaaaatctgcatcggaccttcgagtctttcggagtacttggtccacaggtgaaggagcccaagaaaaccggtcaattccttgaggagctcaggaacccattttag

SEQ ID NO: 231289 - DNA, 675 bp, synthetic construct
  misc_feature 1..675: note = Description of Artificial Sequence: Synthetic coding sequence
  source 1..675: mol_type = other DNA
atggcgtcactttccagaccttccctcccctcctgcctgtgctcttttctcctccttttactgctgcaagtgtccagctcctacgccggacaatttcgggtgattggacccagacatccaatccgcgctctggtaggagacgaagttgagctgccttgccggatttccccaggaaagaatgctacaggcatggaagtcggttggtaccgaccacccttctctcgcgtggtgcacctgtaccgcaacggtaaagatcaggacggtgaccaggcccctgaatacaggggtagaacagagcttctgaaggacgcaatcggagaaggcaaggttaccctgcgcatcaggaatgtccgattcagtgacgaggggggattcacctgcttcttccgcgatcacagttaccaggaagaggctgccatggagctgaaggtcgaagacccattctactgggtttctcctggggtactggtcctgctggcagtgctgcccgttctccttctacagattacagttgggctggtgtttctgtgcttgcagtatcgtctccggggaaagctgcgcgctgagattgagaacctgcacagaacctttgagagttttggagtcctaggccctcaggtgaaagaaccaaagaagactggccagtttttggaggagctgagaaaccctttttag

SEQ ID NO: 231290 - DNA, 759 bp, synthetic construct
  misc_feature 1..759: note = Description of Artificial Sequence: Synthetic coding sequence
  source 1..759: mol_type = other DNA
atggccagcctttctcgacctagtttgcctagttgcctctgcagtttcctgctcttactcctgttgcaagtgtccagttcttatgccggtcagttccgcgtgattggacccagacatccgataagggccttggtgggggacgaggtggagctcccctgtaggatctctccaggcaagaacgccaccggaatggaggtgggatggtaccggccaccattttcccgcgttgtacacctctatcggaacggaaaggatcaggatggagatcaggccccagaataccgtggacggaccgaattgctgaaagacgctatcggcgaaggcaaggtcacattaagaatacgcaacgtgagattctcagacgaagggggttttacttgcttctttagggatcacagctaccaggaggaggcagcaatggagctaaaagtggaagaccccttctattgggtgtccccgggtgttcttgtgctgttggccgttttgcctgtcttgctgttacagatcacagttggcttagtgtttttatgcctgcagtatcgactgcggggaaaacttagagcggaaatagagaatctgcacagaacattcgatcctcacttcttgcgtgttccctgctggaaaattaccttgtttgtcattgtccccgtccttggacctctggttgcgctcattatctgctataactggctgcacaggcggttggcaggacagttcctcgaggagcttctgtttcatctagaagccctgagcggatag

SEQ ID NO: 231291 - DNA, 744 bp, synthetic construct
  misc_feature 1..744: note = Description of Artificial Sequence: Synthetic coding sequence
  source 1..744: mol_type = other DNA
atggcatccttgtcccggcctagtctgccctcttgtctatgcagcttcctacttctgctccttctgcaggtttcctcttcatatgccggacagtttagggtgataggtccaaggcatcccattagagctctggtcggcgatgaagtcgagcttccttgccgcatctcgcctggaaagaacgccacggggatggaggtggggtggtacagacccccattttctcgggtggtacacctgtaccgtaacggaaaagatcaggatggcgatcaagcacctgaataccgaggcaggacagaactcctgaaggacgccattggagaaggcaaggtcacactgcgcatcaggaacgtgaggttcagtgatgaggggggatttacttgtttcttccgggaccatagctatcaggaggaagctgccatggagctaaaagtagaggatcctttctattgggttagcccaggcgtgttggtgttgctcgcggttcttcccgtactgctgctacagatcacagtcggactggtgttcctttgtctccagtatcgcctacggggaaagctgagagccgagatcgagaacctccacagaacattcgatcctcattttctgagagtgccatgctggaagatcactttgttcgtaattgtgcccgtcttgggccctctagttgccctcatcatatgctataattggctccacagaagactggctggacagttcttggaggaattgagaaaccccttctag

SEQ ID NO: 231292 - DNA, 540 bp, synthetic construct
  misc_feature 1..540: note = Description of Artificial Sequence: Synthetic coding sequence
  source 1..540: mol_type = other DNA
tgacaatttagagtaattgggccacgacaccccattcgcgcactggtgggagacgaggtggaactcccctgccgtatttcaccaggaaagaacgcaaccggtatggaagttggctggtatcgcccacccttctctcgtgtagtgcatctgtataggaacgggaaagatcaagacggcgaccaggcccctgaatataggggacggactgaactcctgaaggatgccatcggcgaaggtaaagtcaccctccggattcggaatgtacgatttagtgacgaaggcggatttacatgttttttcagagatcactcctatcaagaggaagctgccatggagttaaaagtggaggatccgttctactgggtttctcccggtgtgctggtactgttggctgtacttccagtcctgctcttacagatcaccgtgggcctggtgttcttgtgcctgcaatatcgtcttcggggaaagctgcgtgccgaaatcgaaaatctccaccgcactttcggacagttcttggaggagctcagaaatcccttctag

SEQ ID NO: 231293 - DNA, 540 bp, synthetic construct
  misc_feature 1..540: note = Description of Artificial Sequence: Synthetic coding sequence
  source 1..540: mol_type = other DNA
taacagttcagagtgattggacccaggcacccaatccgcgctctcgtgggggatgaagtggagttgccatgccgcattagccccggaaagaacgctactggcatggaagttggttggtataggcctccttttagccgcgtggtgcacctgtatcgaaacgggaaggaccaagacggagaccaggctcccgaataccgcggaaggactgagcttctgaaagatgccatcggagaagggaaggtaacccttcgcattcggaacgtgcggttctccgacgaagggggttttacatgcttttttagggatcacagttatcaggaggaagccgctatggagttgaaagtggaagacccgttttactgggtctccccaggggttttagtgttgctggcagtcttgcccgtgctcctgctgcagattacagtgggcctggtttttctatgtcttcaatataggttgcggggtaagctgcgcgcagagattgaaaaccttcacaggacttttggccaattccttgaggagctacgaaatcccttctag

SEQ ID NO: 231294 - DNA, 759 bp, synthetic construct
  misc_feature 1..759: note = Description of Artificial Sequence: Synthetic coding sequence
  source 1..759: mol_type = other DNA
atggcttctctgtccagacctagtctgccttcatgtctgtgctcattccttctgttactcctactccaggtctcctcttcatatgccggacagttccgagtcatcgggcctagacatccaatccgagcactggtaggtgacgaagtggagctcccttgccgaataagtccagggaaaaacgccaccggaatggaggtgggctggtaccgcccacctttctcacgagttgttcatctgtataggaatgggaaagatcaggacggagatcaggctcctgaataccggggacggacagagcttctcaaagacgctatcggggagggtaaggttactctgcggatacggaacgttcgtttttctgatgaaggcggattcacctgtttctttcgcgatcacagctatcaggaagaagccgctatggaactaaaagtcgaagatccgttttattgggtcagccccggtgtcctggtcctcctggctgtgctgcccgttctgctgctacagatcacagttggactggtattcctgtgtctacagtacaggttacggggaaagcttagagctgagattgaaaacctgcacaggacattcgacccgcactttttaagagtaccctgctggaagatcaccctgtttgtgatcgtccccgtgctcggtcctttggttgctctcattatctgctataactggctgcatcgcaggttggctggtcaattcttggaggagctgctgtttcacttagaagctctctctggctag

SEQ ID NO: 231295 - DNA, 690 bp, synthetic construct
  misc_feature 1..690: note = Description of Artificial Sequence: Synthetic coding sequence
  source 1..690: mol_type = other DNA
atggcttccctcagtagaccttccttaccatcatgtttatgcagtttcctcttgctgctcttgctgcaagtttcgtcctcctatgcaggccaatttcgcgtaattggtcctcggcatccaataagagcactggtgggcgacgaagtagagttgccctgtagaatttcgcctggtaagaacgccacggggatggaagtcggatggtaccgcccaccattctctcgagtggtgcatctctacagaaatggcaaagaccaagacggcgatcaggcacctgagtaccgtggtagaacagaactgctaaaagatgcaattggagaggggaaggtcaccctgagaattcggaacgttcgcttttccgacgaagggggttttacttgcttctttcgtgatcactcctaccaggaagaagctgctatggagctaaaggtggaagatccgttttactgggtcagtcctggggtactcgtgctgctggccgtcctaccagtcctcctactccagattactgtggggctggtgtttctgtgcttgcagtaccgcctgcggggtaagttgcgtgcagagatcgaaaatctccatcgaacgttcgagagctttggcgtcctgggaccgcaggtaaaggagcccaagaagacaggacagtttctcgaagaactcttgtttcacctggaggcgctatcaggctag

SEQ ID NO: 231296 - DNA, 888 bp, synthetic construct
  misc_feature 1..888: note = Description of Artificial Sequence: Synthetic coding sequence
  source 1..888: mol_type = other DNA
atggctagtttgtctcgcccaagcctacctagctgtttatgctcgtttctgctgctgcttctgctacaggtctcgagttcttatgctgggcagttccgggtgatcggacccagacacccgatacgtgccctagtgggcgatgaggtagagttgccctgtcggatctccccaggaaagaacgccacgggtatggaggttggatggtaccggcctccctttagcagggtggtccacctgtacaggaatggtaaggaccaggacggtgatcaggccccagaatacagggggcgaactgagcttcttaaagacgcaataggcgaaggcaaggtgacactccgtatccgcaatgtcaggttcagcgacgagggcggatttacctgcttcttcagggatcacagttaccaggaggaagctgccatggaactgaaagtggaggatcccttctactgggtctctcctggggtactcgtgctgcttgctgtcttgcccgttctcctcctccaaatcacagttggccttgtattcctatgcctccaatatcgccttagggggaaacttagagcggagatcgagaatcttcaccgtaccttcgaccctcattttttaagagtgccatgttggaaaatcacactctttgtcattgtccccgtcctagggccacttgtggcactgattatttgctataattggctgcatcgcagactggctggccaatttttggaagaacttcgcaaattctcatctctgtgttataagcaaagaattaaaagtcaggagcgagagactgaggccacccgcggtaggggcggactgctaagagatcacattccacggggtaaggaagagctcgagtcattgggagggggtaaaaccccacccggaaggtag

SEQ ID NO: 231297 - DNA, 642 bp, synthetic construct
  misc_feature 1..642: note = Description of Artificial Sequence: Synthetic coding sequence
  source 1..642: mol_type = other DNA
atggcatcactgtctcggccatctttgccgtcttgcctttgtagtttcctgttactgttactcttgcaggtcagttcttcctacgccggtcagttcagagtcataggtcccaggcaccctatcagggccttagtgggggacgaggtggagctgccttgtagaataagcccaggcaagaacgctactggtatggaggtcgggtggtacaggcccccttttagccgagtggtgcatctttatcgcaatggaaaggaccaagatggagaccaggctcccgagtaccggggtagaactgaactactcaaggatgctatcggagagggtaaggtgaccttgcgcattaggaatgttcggttcagcgacgaggggggttttacctgttttttcagggaccatagttaccaagaagaggcggctatggaactgaaagtcgaagacccattttactgggtgagcccaggtgtgctcgtgctgctcgccgttctccccgtcctgttactccagataactgtcggcctggtattcttatgcctccagtataggctgaggggaaagctcagagccgagattgaaaacttacaccggacctttggccagtttcttgaggagctcctgtttcacttggaggctttatctgggtag

SEQ ID NO: 231298 - DNA, 759 bp, synthetic construct
  misc_feature 1..759: note = Description of Artificial Sequence: Synthetic coding sequence
  source 1..759: mol_type = other DNA
atggcaagcctgagtcggccttctctgccatcatgtttgtgttcttttctactgctccttctcttacaggtgtcaagcagctacgcaggccagttccgcgtaatcggtccacggcaccctatccgggcactggtgggggacgaagtggagctgccttgtagaattagtccaggaaaaaatgccacagggatggaggtcgggtggtataggcctccattttcgagggtggtgcatctgtataggaacgggaaagatcaggatggcgaccaggcccctgagtacaggggcaggactgaactgctgaaggatgctattggcgagggcaaggttactcttagaatccggaatgtccgcttttctgatgaaggcggatttacttgcttttttagagatcattcataccaagaggaagcagccatggagctaaaggtggaggaccctttctattgggtgagtccaggcgtgctagtgctactagccgtcctgcctgtccttttgctgcaaattaccgttggcttggtctttctttgtctacagtaccggttacgcggtaaactgagggcagagattgaaaaccttcacagaacatttgacccgcatttcctgcgggtgccttgctggaaaatcaccttgttcgtgatagtcccagtcctcggccctctggtcgctctaatcatatgttacaattggctacataggaggctggctgggcaattcctggaggaactgttgtttcacctcgaggcattgagcggctag

SEQ ID NO: 231299 - DNA, 540 bp, synthetic construct
  misc_feature 1..540: note = Description of Artificial Sequence: Synthetic coding sequence
  source 1..540: mol_type = other DNA
tgacagttccgcgttatcggcccacgccaccctatacgggctcttgtgggtgacgaggttgaactcccttgccgaattagcccgggaaagaatgctacaggtatggaagtgggctggtatcgaccaccattctccagagtggttcacctgtatagaaacggcaaagaccaagacggcgatcaagcacctgaatacagaggaagaaccgagttgctaaaggacgcaataggtgaggggaaagtgactcttcgcatccgcaacgtgcgttttagcgacgaagggggatttacgtgcttcttcagggatcactcatatcaagaggaggcagccatggaactgaaggtggaggaccccttctactgggtgtctcctggggtgctcgtacttctggccgttctgcccgtccttttactgcaaatcacagtcgggctggtcttcctttgtctgcagtaccggctcagaggcaagctgcgtgcagagattgagaacctccaccgcacatttggccagttcctggaagaactcaggaatcccttttag

SEQ ID NO: 231300 - DNA, 888 bp, synthetic construct
  misc_feature 1..888: note = Description of Artificial Sequence: Synthetic coding sequence
  source 1..888: mol_type = other DNA
atggcaagcctttctcgccctagtctgccttcttgcctgtgctcgtttctcctgctgctcctgctgcaggtgtctagctcctacgcaggccagtttcgggtgattggacccaggcatcctattagagcattggtgggagacgaagtggagctgccttgtagaatctcccctggtaaaaacgcaaccggaatggaggtcggctggtatcggccacctttttcccgtgttgtgcatttgtatcgcaacggcaaggaccaggatggggatcaggccccagagtatcgcggacggaccgagctcttaaaggacgccatcggagaagggaaagttacactccgtataaggaacgtgcggtttagtgacgaaggcggtttcacttgcttctttagggaccacagctatcaagaggaagctgccatggagctgaaagtggaggaccccttctactgggtgtcacccggtgttctggttctgcttgctgttctcccggtactcctgcttcagatcaccgttgggctggtctttctttgcctacagtaccgcctccgtggcaaactacgcgctgagattgaaaatctgcaccggaccttcgacccccactttctgcgtgtgccgtgctggaagatcacactgtttgtgatagttccggtgcttgggcctttagtggcactaattatttgctacaattggcttcaccgacgcctcgcgggacaatttctggaagagctacgcaagtttagtagcctgtgctacaaacagcggatcaagagccaggaaagggagactgaagccacgcgaggccgaggcggattactgagagaccacattcccaggggtaaggaggagctcgaatcactcggagggggaaagacacctccgggaagatag

SEQ ID NO: 231301 - DNA, 888 bp, synthetic construct
  misc_feature 1..888: note = Description of Artificial Sequence: Synthetic coding sequence
  source 1..888: mol_type = other DNA
atggcctctctgtcgcgcccttcattaccctcctgcttgtgttcatttttgctcctactgctgctgcaggtgagctcttcgtacgccggacagttcagagtaatcggacccagacaccctatccgtgccttggtcggtgatgaggtggagctgccctgccgtatttcccctgggaagaacgccaccgggatggaggttggctggtacagacctccttttagcagggtggtgcatctgtatcgcaacggaaaggatcaagatggcgatcaggcacccgagtaccgtggcagaacagagctattgaaagatgctatcggcgaaggcaaggttaccctcagaatccgcaatgtccggttctcagacgaaggtggtttcacttgttttttcagggatcacagctatcaagaggaggcagcaatggagttaaaagtggaagatccgttctattgggtgtcgcctggagtcctggtgttgctggcagtgctgccagtgctgctgctccagatcaccgtggggctcgtcttcttatgcttgcagtatcgactgagaggaaagttgagagccgagatagagaacttgcacagaactttcgatcctcatttcctccgggtgccttgctggaagataacactgttcgttatcgtgccagtgctgggtcccctggtcgctctcattatttgctacaactggctgcaccggcgattagccggtcagtttctggaggaattacggaagttctcatcactatgctataaacaacggatcaagagtcaagagagagaaaccgaggccacccgcggacgtgggggattgctgcgcgatcatataccacgagggaaagaagaattagaatcactgggaggcggaaagacaccccctgggaggtag

SEQ ID NO: 231302 - DNA, 396 bp, synthetic construct
  misc_feature 1..396: note = Description of Artificial Sequence: Synthetic coding sequence
  source 1..396: mol_type = other DNA
atggccagcctctcacggccatccctcccttcctgcctgtgttcttttctgttacttctgctgctgcaggtcagcagctcctacgctgacccattttattgggttagtcccggtgtgctcgtgttgcttgccgtactgccagttctgctccttcaaatcacggtcgggctggttttcttatgtctgcagtacagattgaggggtaagctccgcgcagagattgagaatctgcaccggacttttgacccccactttctacgggtgccttgttggaaaataactttatttgtgatcgtgccagtgctgggacccttagtggcactgataatatgctacaactggttgcatagaaggctggccggtcagttcctggaagaactaaggaaccccttctag

SEQ ID NO: 231303 - DNA, 759 bp, synthetic construct
  misc_feature 1..759: note = Description of Artificial Sequence: Synthetic coding sequence
  source 1..759: mol_type = other DNA
atggccagcttgtctagaccatctttacctagttgcctgtgcagtttcctcttgctgctcttattgcaggtgagcagcagctacgctggacagtttcgagtaattggcccacgccatcccatcagggctttggtgggcgatgaggtagagctgccctgccggatctctccaggcaaaaacgccacaggaatggaggttggctggtatagacctcccttttcacgggtcgtgcacctgtaccggaatggaaaggatcaagatggtgatcaggcacccgagtaccgcggaagaaccgagttactcaaggacgcaattggggaaggtaaagtgacactcaggatccgaaatgtgcggttttccgacgagggtgggttcacctgcttcttccgtgaccacagctaccaagaggaagcggcaatggagctaaaggtcgaggacccattttattgggtgtctccaggcgttctcgtgctgctggcagtcttacccgtgctgctgctccagattaccgttggtctggtgttcctgtgcctccagtatagattgcgcggaaagcttcgggcagaaattgaaaatctgcacagaacatttgaccctcatttcctccgagtcccttgttggaagatcaccctgttcgtgattgtaccagtgctgggacctctcgttgctctcatcatatgttataactggcttcatagacgcctggcaggtcaattcctggaggagctgttgtttcacttagaggctcttagcggctag

SEQ ID NO: 231304 - DNA, 744 bp, synthetic construct
  misc_feature 1..744: note = Description of Artificial Sequence: Synthetic coding sequence
  source 1..744: mol_type = other DNA
atggccagcctgtcccgaccatccctgcccagctgtctgtgttctttcctgttgcttctcctcttacaggtctcatcatcctacgcaggtcagtttcgagtgatcggcccacgccatcccattcgcgctttggttggcgacgaggtcgaattgccttgcaggatttccccaggaaagaatgccacaggaatggaagtgggctggtaccgaccccctttctcccgtgtggtgcatctgtataggaacggcaaggaccaggatggggatcaggcaccagagtacagaggcaggacggagctgcttaaggacgccataggggaaggcaaggtcaccctcaggatcaggaatgtgcggtttagtgacgaaggtgggtttacctgctttttcagggaccactcatatcaagaggaggctgcaatggaactgaaggtcgaggatccattttattgggtttcccctggagtgttggtactcttggccgtattgcccgtactcctgctgcagattacggtcggactggtctttctctgtctgcagtacagactccggggtaagctgagggccgaaattgaaaatctgcaccggacctttgacccccacttcctgagagtgccctgttggaagattactttgttcgttattgtgcccgtccttggacctttagtggcccttatcatctgctacaattggctgcatagaagacttgccggacagttcctggaggagctgcgtaaccctttttag

SEQ ID NO: 231305 - DNA, 615 bp, synthetic construct
  misc_feature 1..615: note = Description of Artificial Sequence: Synthetic coding sequence
  source 1..615: mol_type = other DNA
tccttatcaaggcctagtctgcccagttgtctgtgcagcttcctactacttttgctcctgcaagtctcttcttcttacgctggacaatttagggtcattggtccccgacatcctatccgggcactggttggagacgaagtggagctcccatgccgaatctctcctggcaaaaacgccacgggcatggaggtcggctggtacagacctcccttctcgcgcgttgtgcacctgtatcggaatggtaaagatcaggacggcgatcaggctccagagtaccggggtagaacagagctcctgaaggatgccataggagagggaaaggtgacgctacgtatccggaatgtgagattcagcgacgaggggggatttacatgcttcttccgggaccactcctaccaagaagaagccgctatggagctgaaagtggaggatcccttttattgggtctcacccggtgtgctagtgctgctggcggttctccctgtgcttctcttacaaatcactgtagggctcgtcttcctatgtttgcagtacagattgagaggtaagctccgggcagaaattgaaaatcttcacaggacctttgttttccatcttgaagcgttgtccggctag

SEQ ID NO: 231306 - DNA, 888 bp, synthetic construct
  misc_feature 1..888: note = Description of Artificial Sequence: Synthetic coding sequence
  source 1..888: mol_type = other DNA
atggcttcacttagtaggccaagtctgcccagctgcctgtgctcatttttgctgttactgctcctgcaggtttcaagtagttacgccggtcagtttcgggtgatcggaccgaggcaccctattcgtgctcttgtcggagacgaggtggagctcccgtgcagaatctctccaggaaagaatgcaacaggcatggaggtggggtggtacaggccaccctttagccgtgttgtccatctgtacagaaacggcaaggaccaggacggtgaccaggccccagagtacagaggacgtacagaattgttaaaggacgccataggcgaggggaaagtgactctgcgtataagaaacgtgcgattttctgacgaaggcggttttacttgctttttccgcgaccatagctaccaggaggaggctgctatggagctgaaagtggaggacccattctactgggtgtcaccaggcgtgctcgtgctcctggccgtgctcccagttctgctgctccagatcaccctgggcctggtcttcctttgtctgcagtaccggctacgaggcaaactgagagctgaaatagagaacctgcaccgcaccttcgacccccacttcctgagagtcccttgttggaagataacgctctttgtgatagttccagtgctcggtccgctagttgccctgattatctgctacaattggctgcacagaagacttgccggtcaattcctagaagagttgaggaaattttcaagcctctgctacaagcaacgcattaagagccaggagcgagagactgaggctacccggggaaggggaggcttgcttagagatcacattccacgtggcaaggaggagcttgagtccctgggaggcggaaaaacacccccaggacggtag

SEQ ID NO: 231307 - DNA, 690 bp, synthetic construct
  misc_feature 1..690: note = Description of Artificial Sequence: Synthetic coding sequence
  source 1..690: mol_type = other DNA
atggcaagtctcagccggccttccctgccgtcatgcctgtgttccttcttgctcctgcttttactccaagtctcttcatcttacgctggacagtttagggttattggacccagacacccaatacgagctctcgtaggagacgaggtcgagttaccctgtcggatctctcccggaaaaaatgcaaccgggatggaggtcggttggtatcggcctcctttcagccgagtagtgcacctatacagaaacggcaaggatcaggacggggatcaggctcccgagtaccggggacgcaccgagctgctcaaagatgccattggggaagggaaggtcacgctccgaatccggaacgtgcgtttctccgacgaaggagggttcacatgtttttttagagatcatagctaccaagaggaagcggcaatggagctaaaggtagaggatccgttctactgggtgagcccgggagtgctcgtgctactcgcggtcctccctgtccttctccttcagatcacagttggtttggtgttcctatgtctacagtatagattgaggggcaaactgcgcgctgagatcgaaaaccttcatcggaccttcgagtcttttggtgtgctgggtccacaagtgaaagaacccaaaaaaactggccagttccttgaggagttgctgttccatcttgaggcactgagcggatag

SEQ ID NO: 231308 - DNA, 396 bp, synthetic construct
  misc_feature 1..396: note = Description of Artificial Sequence: Synthetic coding sequence
  source 1..396: mol_type = other DNA
atggcatcacttagcaggccgtccctgccttcttgtctctgtagtttcttattactgttgctactgcaagtttcctcaagttatgccgatcccttttactgggtttcgcccggagtgctggtgttgctcgccgtactgccggtgctgctacttcagattacagtaggccttgtattcttgtgcctccagtaccggctgcgcggaaagctcagggctgaaatcgaaaacctacatagaaccttcgacccacattttctaagggttccatgctggaaaatcactcttttcgtcatcgtgcccgtactgggtccactagtcgccctcattatctgttataattggctccaccgcaggttagcaggccagtttctggaagaattacggaatcctttttag

SEQ ID NO: 231309 - DNA, 540 bp, synthetic construct
  misc_feature 1..540: note = Description of Artificial Sequence: Synthetic coding sequence
  source 1..540: mol_type = other DNA
tagcagtttcgagtgatcggccctcggcatcctatccgggctctggtgggagacgaggtcgagctgccttgtagaatctctcccggaaagaacgccaccggcatggaggtgggctggtaccgacccccatttagtcgggttgtgcatctatatagaaacggaaaggaccaggacggagaccaggcacccgaatataggggcagaacggagcttctgaaagacgccatcggggaagggaaggtcaccctgcgcattcgtaatgtgagattttcagatgagggaggctttacttgtttcttccgggaccatagctaccaagaggaagcagctatggaacttaaagttgaggaccccttttattgggtatctccgggagttctcgtgcttcttgccgtcctcccagtcttattgttgcagatcacattgggtttggtttttttatgtttgcaataccgcttacgcggaaagctgagagccgaaatcgaaaacctgcatagaaccttcggtcagtttctggaagagctgagaaatcccttctag

SEQ ID NO: 231310 - DNA, 627 bp, synthetic construct
  misc_feature 1..627: note = Description of Artificial Sequence: Synthetic coding sequence
  source 1..627: mol_type = other DNA
atggcatccctctctaggccctctttgccctcctgcctatgctcctttcttttacttttgcttcttcaggtgtcttcgtcatatgctggccaatttcgtgtgatcggtcctcgccatcccattagagctttagtaggggacgaagtcgagcttccttgccggatctcaccaggcaagaacgctactggcatggaggtgggctggtatcgcccaccatttagcagagtcgttcatttatatcgcaatggaaaggaccaggacggcgaccaagccccagaataccgcggtagaaccgaattactgaaggacgctattggagagggtaaagtcaccctgcggataaggaatgtgcggttctctgatgaagggggattcacatgtttcttccgcgaccatagttaccaggaggaggccgctatggagcttaaagtggaagaccctttctattgggtgtcccctggcgttctggtcctgctggctgtgctgcccgttttgctcctacagataaccgttggcctaatcttcctttgtctccagtacagactgcgtgggaaactgcgggctgaaatagagaatctgcatagaacatttggtcagtttcttgaggagctgcggaaccccttctag

SEQ ID NO: 231311 - DNA, 744 bp, synthetic construct
  misc_feature 1..744: note = Description of Artificial Sequence: Synthetic coding sequence
  source 1..744: mol_type = other DNA
atggcatccctgtcgcgaccctctctgccctcctgcctgtgttcctttctcctcttactgcttcttcaagtatcttcaagctacgctgggcagtttagggtaattgggccaaggcaccccatccgggcactcgtgggagacgaagtcgaactaccgtgtaggatcagtccaggcaagaacgccaccgggatggaggtggggtggtaccgaccccctttttcacgggttgttcacttatatagaaatggaaaagaccaagacggcgaccaggcaccagaatataggggcagaacagagctgctgaaggacgcaataggggaggggaaagtaactctgaggatccgaaacgtccggttttctgacgagggcggattcacttgctttttccgggaccattcatatcaggaagaggccgctatggagctgaaagtggaagatccgttctattgggtaagccccggagtgcttgtgctgttggctgtgctgccagttctgctccttcagattactgtgggcttggtattcctgtgcttacagtaccgcctgcgaggaaagcttcgggcagaaatcgagaatttacaccgcaccttcgaccctcacttcctcagagtgccttgctggaagattaccctcttcgttatcgttccagttttagggcctctggtggctttaattatatgctacaattggcttcatagaagactggcaggccagtttcttgaggagttaaggaaccctttctag

SEQ ID NO: 231312 - DNA, 396 bp, synthetic construct
  misc_feature 1..396: note = Description of Artificial Sequence: Synthetic coding sequence
  source 1..396: mol_type = other DNA
atggcaagcttatcacggccaagtctcccatcctgtttgtgttcctttctccttcttctcctgctgcaggtgtcaagtagttacgctgacccattctactgggtgagtcccggtgtgttggtcctgctggcagtcctcccggtgctcttgctgcaaatcacagttggcctggtgtttctgtgcctacagtataggttgcgtgggaaactgcgagcggagatagagaatttgcaccgcactttcgaccctcactttctgcgtgttccatgttggaaaatcacactgttcgtaattgtgcctgtgctgggccctctagtcgcgctgatcatatgctataattggttacataggaggctggcgggacagttccttgaagagttaaggaacccattttag

SEQ ID NO: 231313 - DNA, 642 bp, synthetic construct
  misc_feature 1..642: note = Description of Artificial Sequence: Synthetic coding sequence
  source 1..642: mol_type = other DNA
atggcctctttatctagaccctctctgccctcttgcctgtgttcttttctcctcctgctcctgctgcaggtgtcctcgagttacgccggtcaattcagagtcatcggccctcggcacccgatacgcgctttagtcggcgacgaggtggagctgccctgcagaatctcccctggcaaaaacgccacgggcatggaagtcggctggtaccgccctcccttctccagggtagtccatctgtacagaaatggaaaagaccaagacggtgaccaggctccggagtacaggggaaggacagagcttcttaaggacgccatcggcgagggcaaggtgactctgcgcatccgaaacgtccgattttcagatgagggtggattcacctgcttcttccgtgaccactcttaccaggaagaagccgcaatggaactgaaggtggaagaccccttctattgggtaagccctggtgtgcttgtgctgctggcggttctcccagtgctgcttttacagattactgtgggcctggttttcctgtgcctgcagtaccgcctgcgcggaaaacttcgcgcagagattgagaacctccaccgtacgtttggtcagtttcttgaagagctgctgtttcatctcgaagcgctgagcggctag

SEQ ID NO: 231314 - DNA, 615 bp, synthetic construct
  misc_feature 1..615: note = Description of Artificial Sequence: Synthetic coding sequence
  source 1..615: mol_type = other DNA
tccctgagtcgaccatctctccccagctgcctttgcagtttcttgctgctgctgctgctgcaggtctcctccagttatgctgggcagtttagggtgatagggcctaggcatccaatccgggctctggtaggggatgaggttgaactgccttgccgcatctcgcctggtaaaaatgccaccgggatggaggttggctggtaccgcccaccttttagccgggtggtgcacttgtataggaacggtaaagaccaggatggggatcaggctcctgaatacagagggaggacggagctcctaaaagatgccataggcgaggggaaagttacccttcggatacgaaacgttaggttttcagatgaaggcggttttacctgcttctttagagatcattcttatcaggaagaggctgccatggagctaaaagtcgaagatcctttctactgggtgagccccggagtgctagttctcctggccgtgctgcccgtgttactgctgcagataaccctcgggttggtgttcctgtgcttgcaataccgcctgagagggaagctgagagcggaaattgaaaatctgcataggacctttgtttttcacctcgaggctctgtcggggtag

SEQ ID NO: 231315 - DNA, 675 bp, synthetic construct
  misc_feature 1..675: note = Description of Artificial Sequence: Synthetic coding sequence
  source 1..675: mol_type = other DNA
atggctagcctaagcaggcccagtctgcctagttgcttatgctcatttcttcttttactgttgctccaggtgtcgagctcctatgctggacagttcagggtcatcgggcctaggcacccaattagggccctggttggcgacgaagtggaactaccctgccggattagtccgggaaagaacgctactggcatggaggttggatggtaccgaccgccattctcaagagtcgtacacctgtaccgcaatggaaaagaccaagacggtgatcaggcccctgagtacagaggcagaacagagctgttgaaggacgcgatcggagaaggtaaggtcacactcaggataagaaatgtccgcttcagtgacgagggcggattcacatgcttcttccgggaccactcatatcaagaagaggccgcaatggaactgaaggtggaagatccattttactgggtaagccccggagtcctcgtgctgttggccgtactgcccgtgctgctgctgcaaatcacagtgggcctcgtatttctatgcctccaatacagattgcggggaaagctcagagcagagatagagaacctccaccggacgttcgaaagcttcggagtccttggaccacaggtgaaggaacccaagaaaactggccagtttcttgaagaactgcgcaatccattctag

SEQ ID NO: 231316 - DNA, 690 bp, synthetic construct
  misc_feature 1..690: note = Description of Artificial Sequence: Synthetic coding sequence
  source 1..690: mol_type = other DNA
atggcgtccctctcccggccttcccttccaagttgtctctgtagcttcctgctgctgctgctgctgcaggtaagcagcagttacgctgggcagttcagggtaatcgggccaaggcatccaatccgagctcttgtgggagatgaagtggaactaccatgtcgtattagtccgggaaaaaatgctacagggatggaagtggggtggtataggccccctttttcacgagtcgttcacctgtataggaacgggaaagatcaggatggagaccaggctcccgagtacagaggcaggacggaactgctaaaggatgccatcggagaaggaaaagtcaccctacgcatccgcaatgtgcggtttagtgatgaagggggtttcacttgcttcttccgtgatcatagttaccaggaggaagctgctatggaattgaaagttgaggaccccttctactgggtgagccccggagtgctggtccttctggccgtactccccgtgctgcttctgcagataactgtcgggttagtgtttctgtgtcttcagtacaggcttcgcggaaaacttagagccgagatcgagaacctgcaccgcactttcgagagtttcggcgtcctgggtccacaagtgaaggagccaaagaaaactgggcaatttttggaggagctcctctttcacctggaggccttaagcgggtag

SEQ ID NO: 231317 - DNA, 888 bp, synthetic construct
  misc_feature 1..888: note = Description of Artificial Sequence: Synthetic coding sequence
  source 1..888: mol_type = other DNA
atggccagtctcagtagaccctcgttaccatcatgtttatgtagtttcctcctcctcctgctgcttcaggtgagctcttcttatgccggtcagtttagagtaatcggccctaggcatccaatacgggctttggtcggagacgaggtggagctgccatgtcggatctcccccggtaaaaatgcaacaggtatggaagtggggtggtaccggcctcccttttcgagggtggtgcacctgtaccggaacggaaaagaccaggatggcgatcaagcccctgaatatcggggaaggaccgaactgctgaaagatgctattggggagggcaaagtgaccttgaggatcaggaatgtgaggttctccgacgaaggaggattcacctgtttctttcgcgaccattcatatcaggaggaggcagcaatggaactgaaggtggaagatcctttctattgggttagtcccggagtgctggtgcttctcgcagttctgcctgtgttactcctgcaaattaccgtgggcttggtgtttctctgcctgcaatataggctccgtggcaaactgcgggcagaaatcgagaacctgcatcggaccttcgaccctcacttcctcagagtgccttgttggaagattaccctattcgtgatcgtgccggtattaggcccactcgttgctcttataatctgttataattggttgcacaggagacttgccggtcagtttctcgaggagctgaggaagttttcctccctctgttacaaacagaggataaagtcacaagagcgtgagaccgaggccactcgaggcaggggtggcttactccgcgaccacatccccaggggcaaagaggagctggagagcctgggcggaggcaagactccccctggccgttag

SEQ ID NO: 231318 - DNA, 540 bp, synthetic construct
  misc_feature 1..540: note = Description of Artificial Sequence: Synthetic coding sequence
  source 1..540: mol_type = other DNA
tgacagttcagggtgataggtcctaggcatcctatcagggccttagtaggagatgaggtggagttaccctgtagaatttcccccggaaagaacgccaccggtatggaagtgggatggtatagaccccctttctctcgagttgtgcatttgtaccgtaatggtaaagaccaggatggcgaccaagctcctgaataccgagggaggaccgagcttctgaaagatgccatcggagagggcaaggtcactctacgcatcagaaatgtccgctttagcgacgaaggcggattcacatgcttttttcgagatcacagctaccaggaggaggctgccatggaattaaaagtggaggaccctttttactgggtgtcaccgggtgtgcttgttttgctcgccgtgttacccgttctgctcctgcagatcactgtgggcctcgtatttttgtgcctccagtaccggctcagggggaagcttagagccgagatcgaaaatctgcataggacctttggacagttcctggaggagctgagaaaccctttctag

SEQ ID NO: 231319 - DNA, 642 bp, synthetic construct
  misc_feature 1..642: note = Description of Artificial Sequence: Synthetic coding sequence
  source 1..642: mol_type = other DNA
atggctagcctcagccggcctagcctcccctcttgtctctgcagctttttgctgctgttactgctgcaggtcagctctagctacgcaggccagtttcgggttattggcccacgacaccccattagagccctcgtcggcgatgaggtggagctgccctgtagaattagtccaggaaagaatgccactgggatggaggtgggatggtacagaccccctttttccagagtagtccacctatataggaatggaaaggaccaggacggagaccaggccccagagtaccggggacggacagaactactgaaggacgcaatcggagagggaaaggtcacactccggatccgtaatgtccgcttctcggacgaaggtggattcacatgcttcttccgagaccattcttaccaggaagaggccgcaatggaactaaaagttgaggatccgttttactgggtgagtcccggtgtcctggtgttacttgccgtgctgcccgtgttactgctgcagattacagtcgggctggtgtttctgtgtctgcagtaccgactgcggggaaaactcagggccgagattgagaatcttcatagaacatttggccagttcctcgaggaacttctgttccaccttgaggctttgtccggctag

SEQ ID NO: 231320 - DNA, 759 bp, synthetic construct
  misc_feature 1..759: note = Description of Artificial Sequence: Synthetic coding sequence
  source 1..759: mol_type = other DNA
atggcaagcctctcccggccttcattgccgtcttgtttgtgcagtttcctgctcctactgttgcttcaggtatcatcaagctatgcaggacagttccgcgtcatcgggcctaggcatccaatcagagctctggtcggggatgaggtcgaattaccatgtaggatcagccctggtaaaaacgccactggcatggaagtaggctggtaccgccctccgttcagcagggtggtgcatctataccgcaacggaaaagaccaggatggggatcaggctcctgaatatcggggtcggaccgagctgttgaaggacgccattggagaggggaaggtcaccctgaggattcgcaatgtacgtttctctgacgagggcggattcacctgcttctttagggatcattcatatcaggaggaggccgcaatggagctcaaagtggaggaccctttttattgggtctcacccggtgtactggtacttttggccgttttgccagtgctgcttctgcagatcaccgtcggcctggttttcctttgtctgcaataccgtctgcgtggcaagctccgggcagaaatcgagaacctccataggacattcgacccccacttcctcagagtgccgtgctggaaaatcaccctgtttgttattgttcccgtcttgggtcccctcgtggccttgattatttgctataactggctccaccgcaggctagccggacagttcctggaggagcttctgtttcacttagaggccttgtccgggtag

SEQ ID NO: 231321 - DNA, 642 bp, synthetic construct
  misc_feature 1..642: note = Description of Artificial Sequence: Synthetic coding sequence
  source 1..642: mol_type = other DNA
atggcgtctctgtctaggccgtcccttccaagttgtctttgtagcttcctgcttttgctgctactgcaggtctcctcctcttacgccggacagttccgagttattgggcctcgccaccctattcgggcattggttggtgacgaggttgaactgccctgtcggatatccccaggaaaaaatgctacaggaatggaggtgggctggtatcgccctccgttttctcgtgtggtgcacctttatagaaacggtaaggaccaggacggggatcaggcacctgagtaccgcggaaggactgaactgctgaaagacgcgattggcgagggaaaagtgactctacgtattcgaaatgtcaggttttccgatgaggggggattcacatgcttttttagagaccatagctaccaggaggaagcggctatggaactgaaagtggaagatcctttttattgggtgagcccgggagttctcgtattgcttgcggtccttcctgttctgttgctgcagatcactgtaggattggtgtttctgtgcttacagtacaggctgcgcggaaagctgagggccgaaatcgagaatttacacaggacatttggtcagtttctggaggaactcttgtttcacctggaagccctgtccggttag

SEQ ID NO: 231322 - DNA, 675 bp, synthetic construct
  misc_feature 1..675: note = Description of Artificial Sequence: Synthetic coding sequence
  source 1..675: mol_type = other DNA
atggctagcttatccaggccttctttgccatcttgcctttgttctttcctccttctgctccttctgcaagtgtcatcgagttatgctggacaattccgtgtgataggaccacgccaccccattcgcgcacttgtgggggacgaagttgagctgccctgcagaatatcaccgggaaagaacgccacagggatggaagtaggatggtatagacccccttttagcagagtcgtacatctctaccgtaatggcaaagatcaggatggtgaccaggctcccgagtaccgcggacgcaccgaactgctgaaagatgccattggagaaggcaaggttaccctgaggatccgtaatgttcgattctccgacgagggtgggttcacttgttttttcagagatcatagctatcaggaggaagcagccatggagttgaaggtggaggacccgttctactgggtgtcccctggggttctggtcctactggcagtcttgcccgtgctactgctgcagatcactgtcgggctggtctttctctgtctgcagtacaggttgcgaggaaagctgcgggcagagatcgaaaaccttcacaggacgttcgaatcttttggagtactaggaccgcaggtcaaggaacctaaaaagactggacaattcttagaggagctgagaaatccgttttag

SEQ ID NO: 231323 - DNA, 615 bp, synthetic construct
  misc_feature 1..615: note = Description of Artificial Sequence: Synthetic coding sequence
  source 1..615: mol_type = other DNA
agccttagccggcctagcttaccttcctgtctatgctcctttctcctgcttctcctgctgcaggtctcatcatcatacgccggacaattcagagtgatcggtccccgacatccgatcagagccttggtgggtgacgaggttgagttgccttgcagaatttctccaggcaagaatgctacgggcatggaagtcggatggtaccgccctcctttttcacgagtggtccacttgtatagaaatgggaaagaccaggacggcgaccaagcgccagagtataggggacgcactgagttactgaaggatgccatcggagagggaaaagtcactctgagaattaggaatgtgaggttcagcgacgagggcggtttcacgtgtttttttagagatcacagttatcaagaagaagccgcaatggagctcaaagtggaagatccattctactgggtttcgccaggggtgcttgttcttttagccgtgcttcccgtgctgctgctacagatcacggtgggactggtgtttctgtgtttacagtatagattgcggggaaagctgagagcagaaattgagaacttgcatcgcacctttgtcttccaccttgaagcactgtcagggtag

SEQ ID NO: 231324 - DNA, 675 bp, synthetic construct
  misc_feature 1..675: note = Description of Artificial Sequence: Synthetic coding sequence
  source 1..675: mol_type = other DNA
atggcgagcctatctagaccttcattaccctcgtgtctctgtagcttcctgctccttctgttgttgcaagtaagcagttcctatgccggtcagttcagggtgatcgggcctcgtcaccccataagagcacttgtgggagatgaagtggaactgccatgccgcatcagccctggaaaaaatgcaaccggtatggaagtcgggtggtatcgccctccgttctcccgagtggtccatctgtacagaaatggcaaagatcaggacggcgaccaggcccctgagtatcgcggacgaaccgagcttctgaaagacgctattggcgaggggaaggtgactctgaggatcagaaatgtgcgctttagtgatgagggcggatttacatgctttttccgtgaccattcctatcaagaggaagccgctatggagctaaaagttgaagacccattctactgggtttccccgggagtccttgtccttctcgcagtgttacctgtgctactgcttcagatcacggtcggcctggtgttcctctgcctgcagtaccgcttgcggggtaaactgcgcgctgaaatcgaaaacctgcaccgcacctttgagtcctttggggttctcggaccgcaggttaaagagcctaaaaaaactgggcagttccttgaagagctgcgcaatccgttttag

SEQ ID NO: 231325 - DNA, 759 bp, synthetic construct
  misc_feature 1..759: note = Description of Artificial Sequence: Synthetic coding sequence
  source 1..759: mol_type = other DNA
atggcatccctgagccgccctagcctgccaagttgcctgtgctcattcctcctcctgttactactgcaggtttctagcagttacgctggccagttccgagttataggtcccagacacccaatccgagcactggtgggcgatgaagtagaacttccatgtcggatctcgccgggaaagaacgctactggtatggaggtcggctggtatcgccctcccttttcccgcgtcgtgcacctttatagaaacgggaaggaccaggatggcgatcaagcaccggaataccgagggcgaacagaactgctgaaagacgctatcggggagggcaaagttacgttgaggatccggaacgtgcgcttttcagacgagggcggattcacatgttttttcagggaccattcatatcaggaggaggccgcaatggagctcaaagtggaagatccgttttattgggtgtctccgggtgtcctggtactcttggcagtgctcccagttctcctgctgcagattacggttgggctggtatttctctgcctgcagtacagactgcggggtaaattgcgtgccgaaatcgaaaacctgcaccggactttcgacccacacttcctccgcgttccctgctggaagataactctgtttgttatcgtgcccgttttgggacctctggttgcactgatcatatgttataactggctgcatagacgcttagctggccagttcctagaggagctactgttccaccttgaggctctgtccggctag

SEQ ID NO: 231326 - DNA, 744 bp, synthetic construct
  misc_feature 1..744: note = Description of Artificial Sequence: Synthetic coding sequence
  source 1..744: mol_type = other DNA
atggcgagcctctcccgtccaagtctgccttcctgtctttgtagctttctccttttgttgctgctacaagtttcatcctcctatgccggtcagttcagagtcatcggcccaaggcaccctatcagggcacttgtgggcgatgaagtggaactcccatgcaggattagccccggtaagaatgccaccggcatggaggtgggttggtatagaccccctttttctcgcgtggtgcatttgtataggaatggcaaggatcaggacggcgaccaggctcccgagtatcgcggtagaacagagttactcaaggacgccatcggtgaaggtaaggtgacgctccgtattcgcaatgtccgctttagcgatgagggaggttttacttgcttcttccgtgatcattcttaccaggaagaggcagctatggagttgaaagtcgaagatcccttctactgggtgtcacccggtgtgttagtgttactcgccgtattaccggtcctcctgctccagatcactgtgggcctggtttttttgtgtttgcaatataggctgaggggtaaactgagagcagagatcgaaaacctgcaccgcaccttcgacccccactttctgcgggtcccttgctggaagataactttatttgtgatcgtgcctgttttgggcccactggtcgccttaattatttgttacaattggctgcatcgtcggctggcagggcagtttcttgaggaactgcggaatccgttctag

SEQ ID NO: 231327 - DNA, 615 bp, synthetic construct
  misc_feature 1..615: note = Description of Artificial Sequence: Synthetic coding sequence
  source 1..615: mol_type = other DNA
tcgctgtcacgacccagcctcccctcctgcctgtgcagctttctccttctgctgctgttgcaggtgagcagttcctatgccggacagtttcgagtgatcggtcccaggcatcccattcgcgctctggtcggggatgaagttgagctgccctgtcgaatttcccccggtaaaaacgcaactggcatggaagtaggatggtatcgcccacccttcagtcgcgtcgttcacctgtatagaaacggtaaagatcaggacggcgatcaagcccctgagtacagagggagaaccgagctgcttaaagatgcaatcggtgagggcaaggtgacactacgcattcgcaacgtgcgcttttccgatgaagggggtttcacctgtttcttccgcgaccattcttaccaagaggaggctgcaatggaattaaaggtggaagatcccttttattgggtatctcccggagttctcgtgctgttagccgttctacctgtcctgttgcttcagatcacggtaggcctggttttcttatgtttacagtaccgcctccgaggtaaactcagggccgagatagagaacctgcaccgcacatttgtgttccacctcgaagcactgtcaggctag

SEQ ID NO: 231328 - DNA, 888 bp, synthetic construct
  misc_feature 1..888: note = Description of Artificial Sequence: Synthetic coding sequence
  source 1..888: mol_type = other DNA
atggcaagcctgagtaggcctagtctcccgagttgcctgtgcagctttctcttgctcttgctgctgcaggtatcctcaagctacgctggccagttccgagttattggccctcgtcacccaattcgcgctctggtaggcgatgaagtggaactgccatgtaggatttcacctggcaagaatgctaccggcatggaggtgggctggtacaggcccccttttagtcgcgtggtgcatctgtacagaaatgggaaggaccaagacggcgatcaggctccggagtacaggggcaggactgaactgttgaaggacgcaattggggaggggaaagtcacgctgagaattcgtaatgtccgattttctgacgaaggcggattcacctgcttcttcagggatcactcctaccaggaggaggccgctatggaattgaaggttgaggatcctttttattgggtatcaccaggtgttctagtgctcctggcggtactgcccgtgcttctgctgcaaataaccgttggcctcgtctttctctgcctgcaatacagactccgcggaaaactgcgggcagagatcgaaaacttgcaccgtacttttgatccccacttcctcagagtgccctgttggaagattaccttgttcgtgatcgtcccggtgcttggaccactggtagccttaatcatctgctataactggctgcaccgtcgcctcgccggacaattcctcgaggagctgcgcaaattctcatctctctgctacaaacagaggatcaaatcgcaagaacgggaaacagaagccactcgaggcagaggtggactgcttcgggaccacattcccagaggaaaagaggagcttgagtctctgggaggaggcaaaacgcccccaggccgatag

SEQ ID NO: 231329 - DNA, 759 bp, synthetic construct
  misc_feature 1..759: note = Description of Artificial Sequence: Synthetic coding sequence
  source 1..759: mol_type = other DNA
atggccagcctctcccggcctagcttaccatcatgcctgtgctcattccttctacttctcctgcttcaagtctcatcttcatatgccggacagttccgtgtcattggcccaaggcatccgataagggcactcgtgggagacgaagtggaactgccatgtcgcatatcgccaggcaaaaacgctacgggcatggaagtgggctggtacagaccacccttctctcgcgttgtgcacttgtacagaaatggtaaggaccaggatggggaccaggcaccagagtaccgcggacgtacagagctacttaaggacgctatcggcgaagggaaggtaacactcaggatcaggaacgtacgattttccgatgaagggggattcacatgtttttttagggatcactcctaccaggaagaggccgcaatggagctgaaagtcgaggaccccttctattgggtgagcccaggagtcctcgtgttattggctgtgctcccggtgctgctgctgcagattaccctgggactcgtctttctctgcttacagtatcggctacggggtaagctgcgcgctgaaattgagaatctccatcgcacctttgatccccacttcttacgggtcccctgctggaaaatcacattgtttgtgatcgtgcccgtgctggggccacttgttgcgctgattatctgttacaactggctgcataggcggctggccggacagtttttggaggaacttttgttccacctggaggcactgtctggttag

SEQ ID NO: 231330 - DNA, 540 bp, synthetic construct
  misc_feature 1..540: note = Description of Artificial Sequence: Synthetic coding sequence
  source 1..540: mol_type = other DNA
taacaatttagggtgatcgggcctaggcatcccatccgcgcactggtcggagacgaagtcgaacttccgtgtcggatatcaccaggcaaaaacgcaaccggaatggaggtgggttggtatcggcctcctttctcccgcgtggtccacctgtaccgcaatgggaaggaccaggatggcgatcaggcgccagaataccgaggaaggaccgagctcctgaaagatgcgattggggaaggaaaggtcaccctcaggatccgtaacgtcaggtttagcgacgaaggaggctttacctgcttttttcgggaccatagttatcaagaggaggctgccatggaactgaaagttgaagaccctttttactgggtttcgcccggtgttttggttctactagctgtgcttcctgtgttgctgttgcagattacggttggtctggtcttcttgtgcctgcaatatcggttaagaggaaagctgcgggcagagatcgaaaatctgcaccggacattcggccagttcctggaggaactccggaatcctttttag

SEQ ID NO: 231331 - DNA, 396 bp, synthetic construct
  misc_feature 1..396: note = Description of Artificial Sequence: Synthetic coding sequence
  source 1..396: mol_type = other DNA
atggcttctcttagtcgccctagcttgccaagctgtctctgttcttttctgctccttctgttactccaagtgtcgtcatcctatgccgatcccttctactgggtaagcccaggagtactagtgctcttggccgttctgccagttctactgctccagatcactgtgggattggtctttttgtgccttcagtataggctaagggggaagctgcgcgctgaaatcgagaaccttcacagaacatttgacccccatttcctgcgcgtaccttgttggaaaatcaccctgtttgttatcgtgcctgtgctagggcctctggtcgccctgattatatgctacaactggcttcatcgtcggctggctggacagttcctcgaagaactaagaaaccccttttag

SEQ ID NO: 231332 - DNA, 744 bp, synthetic construct
  misc_feature 1..744: note = Description of Artificial Sequence: Synthetic coding sequence
  source 1..744: mol_type = other DNA
atggcctcactctcacgaccgagcttgcctagctgcttgtgctccttcctcctcctccttttgttgcaagtgtcttcttcttacgctggacagtttagagtcatcggtcccagacaccccatacgggctctcgtgggggatgaggtcgagctcccctgtcgtataagcccaggaaagaacgctacgggcatggaggtcggctggtatcggccacccttctctagagtggtgcacttatacagaaacgggaaggaccaggatggggaccaagcgccagagtaccggggtcgcaccgagttgcttaaagacgccatcggtgaagggaaggtgactcttcggatacgcaatgtgcgattctcggatgagggagggttcacttgctttttcagggatcatagctatcaggaggaggcggctatggagttgaaagtcgaggatcccttttactgggtgtctcccggagttttggtcctgcttgccgtcctgccagtgctgttgttgcagataacccttggcctcgtgtttctttgcctccagtacagacttcggggtaaactgagagccgagatagaaaatctgcatcgcacattcgacccacattttctgcgcgtgccttgttggaagattacactgttcgtgatagtccctgttctgggcccacttgtggcactgataatctgttacaattggctgcatcggagactggcaggccagttcctcgaagaactacggaatcccttttag

SEQ ID NO: 231333 - DNA, 642 bp, synthetic construct
  misc_feature 1..642: note = Description of Artificial Sequence: Synthetic coding sequence
  source 1..642: mol_type = other DNA
atggcctccttgagcagaccttccctgcccagctgcctgtgcagcttcctcctcttgttactactgcaagtttcatcctcttatgccggtcaatttagagtcatcggcccacggcatcctatccgggctttggtcggcgatgaagtggagctcccctgccgcatctcccctggaaaaaacgcaactggcatggaggtgggatggtaccgacctcctttcagtagggtggtgcacttgtaccgtaatggtaaagaccaggacggggatcaggcccctgagtatcgcggacggacagagctgctgaaagacgccattggagagggtaaggtgaccttgaggatccgaaacgttaggttctccgatgaggggggttttacttgcttcttcagggatcatagttaccaagaagaagcggctatggaactgaaggttgaggacccattctattgggtctctcctggcgtgttggtcctgctggcggttcttcctgtgctcctcttgcaaatcactctggggctcgtcttcctctgcctgcaatatagactccggggaaagctgcgggctgagattgagaacctccaccggaccttcggccagtttctggaagagctgctctttcaccttgaggccttgtccggctag

SEQ ID NO: 231334 - DNA, 615 bp, synthetic construct
  misc_feature 1..615: note = Description of Artificial Sequence: Synthetic coding sequence
  source 1..615: mol_type = other DNA
agtctttccaggccctctcttccgagctgtctctgcagcttcttgttactgttgttactccaagtgtccagttcgtacgctgggcagtttcgggtgattgggccacgccatcctattcgagctcttgtcggggacgaagtggaattgccttgcagaattagccccggtaagaacgcaactggcatggaagtgggctggtaccggcctcctttcagccgagttgtccatttgtaccgtaacggaaaggaccaggacggggaccaggctcctgagtaccgaggccgtacagagctgctgaaagacgccatcggcgaggggaaagtcaccctccggattcgcaacgtgcgctttagcgacgagggcggtttcacctgttttttccgggaccactcctaccaagaggaggcagcaatggagctaaaggtggaggatccattttactgggtttcgccaggtgtgcttgtcttactcgcggttctccctgtgctgctgctccagattaccgtgggcctggtgtttctctgccttcagtatcggctgagaggcaagctgcgcgcagagatcgaaaacttgcatcgcacatttgttttccatctggaagccttaagcggctag

SEQ ID NO: 231335 - DNA, 690 bp, synthetic construct
  misc_feature 1..690: note = Description of Artificial Sequence: Synthetic coding sequence
  source 1..690: mol_type = other DNA
atggcctccctgagtagacccagcctcccatcttgtctgtgcagctttctgctgctgctcctcctgcaggtgtcctcctcttacgctggccaatttcgggttatcggcccaagacaccctatcagagctctggtgggagacgaggttgaactgccgtgtaggatctcacccggaaaaaacgctacagggatggaggtgggatggtacagacctccttttagtcgtgtggtccacctctacaggaatgggaaagaccaggacggagaccaggcccctgagtacagagggcgtaccgagttgctgaaggatgccatcggggaaggtaaggtgaccttacggatacggaatgtcaggttttcagatgaagggggtttcacctgcttcttcagggaccatagttaccaagaggaggctgcaatggagctgaaggttgaggatcctttttattgggtgtccccaggtgtattggtgctgctcgccgttctgcccgtgctcttgctgcagatcacggtcggtctcgtctttctgtgccttcagtacaggctgagagggaagctgcgcgcagaaatcgaaaacctccatagaaccttcgaatccttcggtgtgctaggccctcaggtcaaggaaccgaaaaagactggacagttcttggaggagctcctgttccacctagaggccctgtctgggtag

SEQ ID NO: 231336 - DNA, 615 bp, synthetic construct
  misc_feature 1..615: note = Description of Artificial Sequence: Synthetic coding sequence
  source 1..615: mol_type = other DNA
tccctatctaggccctccttgccctcatgtctttgttcctttctattgttactcctcttacaggtgtcctcttcctacgccggtcagtttcgcgttattggacccagacacccaattagagcgcttgtgggtgacgaagtcgagctgccctgtagaatctctcccggtaagaacgcaacgggaatggaggtcggttggtacagaccacccttcagtagggtggtgcatctttacaggaatggcaaggatcaggatggcgatcaggcacccgagtataggggccgtactgagctgttgaaggatgccattggggaggggaaggttactctgcgcatccggaacgttagattttcagacgaaggcggatttacttgcttctttcgggaccactcttaccaggaggaggccgctatggagctgaaagtggaagaccctttctactgggtatcgcctggcgttctcgtgctgctggcagttctgcctgtgctgctgcttcagatcaccgttgggttagtgtttctttgccttcagtaccgtcttagaggcaagcttcgcgcagagatagaaaacctgcacagaacatttgttttccacctggaggctttgtctgggtag

SEQ ID NO: 231337 - DNA, 690 bp, synthetic construct
  misc_feature 1..690: note = Description of Artificial Sequence: Synthetic coding sequence
  source 1..690: mol_type = other DNA
atggcatcactgtctaggccttcgcttccttcttgtctctgtagttttttgcttcttttgctgttgcaggtgtccagcagctatgccggtcagttcagagtgataggtcctagacaccccatcagagccctggtgggagacgaggtggagctcccatgccggatttcccctgggaagaatgccaccggtatggaggtgggctggtacagaccccctttttcaagagttgtgcacctttaccggaatggaaaggatcaggatggtgaccaggctcccgaatataggggaaggacggagttactgaaggatgctattggggaggggaaggtaactttacgcattcggaacgtgagattcagcgatgaagggggattcacgtgcttcttcagagaccattcatatcaagaggaggctgctatggagctgaaggtcgaggatccgttctattgggtctcaccaggagtcttagtcctcctggcagtgctgccagtcctcctgctgcaaataacgctcgggctggtctttctttgtctccagtaccggttgcgtggaaaactgagagcggagatcgagaacctacacagaacctttgagagctttggagtcctgggccctcaagtgaaagaacccaaaaagactgggcagttccttgaggagctactgtttcacctggaggccctgtctggatag

SEQ ID NO: 231338 - DNA, 690 bp, synthetic construct
  misc_feature 1..690: note = Description of Artificial Sequence: Synthetic coding sequence
  source 1..690: mol_type = other DNA
atggcaagtttatcaaggccctccctgccttcctgcctgtgttcctttctccttttgctgctgctacaggtaagctcgtcgtacgccggtcagtttagagtcatcgggccacggcatccaatcagggcattggttggcgacgaggtggagctgccctgtcggatttcaccaggcaaaaacgccaccggcatggaagtcggatggtaccggcctcctttttctagggtggtccatctctatagaaatggcaaggaccaggatggcgatcaggccccagagtatagggggcgtacagaactgctgaaggatgccatcggagagggtaaagtgacactgcggattcggaatgttaggttttccgacgaagggggattcacttgcttctttcgggaccatagctatcaggaagaagctgcaatggagttgaaggtagaggaccctttttattgggttagccccggagtactcgtcctcttggccgttctgccagtccttttgctccagattactgttggcctgatattcttatgtctccaatacagattaagaggtaaactaagggccgaaattgaaaacctgcacagaacgtttgagtcattcggtgtgctcggtccccaggtaaaggaaccaaaaaaaacggggcaattcttggaagagctgctgtttcatctggaagcattgtccggttag

SEQ ID NO: 231339 - DNA, 516 bp, synthetic construct
  misc_feature 1..516: note = Description of Artificial Sequence: Synthetic coding sequence
  source 1..516: mol_type = other DNA
atggcctctctttcccgcccttcattaccatcctgcctgtgcagctttctgctgcttttgctcctgcaggttagtagtagctatgccggacagtttagagtcatcggaccacgccaccctatacgagccctggtgggcgatgaagttgaacttccttgtcgcatcagcccaggcaaaaacgccacggggatggaggttggctggtaccgccctccctttagtagggtggtgcatctgtatagaaatggcaaggaccaagacggagaccaagcgcctgaatatagaggacgcaccgaactcctgaaagatgccattggggaggggaaagtgactctgaggattaggaacgtccgtttctctgatgaggggggatttacctgtttttttagagaccactcttaccaggaggaggccgctatggagttgaaggtagaggtgagccattccgtcactcaagattggcttcagtggcacgatcatggctccctacagccacccccacccagactgaaatag

SEQ ID NO: 231340 - DNA, 534 bp, synthetic construct
  misc_feature 1..534: note = Description of Artificial Sequence: Synthetic coding sequence
  source 1..534: mol_type = other DNA
atgtcacacatcagttgggaggaacgttaccggaacggcaaggatcaggatggcgaccaggcaccagagtataggggacgtaccgagctgctcaaggatgccattggtgagggtaaagtcacgcttcgtattaggaatgtaaggttctcagatgaggggggatttacttgcttttttagagaccactcctaccaggaggaagccgcaatggagcttaaagtggaggatccattttactgggttagtcccggtgtgctagtgttgcttgccgttttgccagtgctgcttctgcaaataactgttggtctggtcttcctttgcttgcagtataggcttcggggaaagctccgagcagaaatcgaaaatctgcacagaacttttgaccctcattttctcagagtgccctgctggaagattacactatttgttattgtgccggttctaggccctttagtggcgttgatcatttgttataactggttacacaggcggctggcaggtcaattcctggaagagttgcgaaatccattttag

SEQ ID NO: 231341 - DNA, 174 bp, synthetic construct
  misc_feature 1..174: note = Description of Artificial Sequence: Synthetic coding sequence
  source 1..174: mol_type = other DNA
atggcttctttgagcagaccgtctctgccctcctgtttatgttcctttctactgctgctgctgttgcaggtctccagctcttacgccggtctggtggctgtggctcgctcttggctgatagccgcatctacctctcaggcacaagttatcctgttgacccaaccactagaatag

SEQ ID NO: 231342 - DNA, 627 bp, synthetic construct
  misc_feature 1..627: note = Description of Artificial Sequence: Synthetic coding sequence
  source 1..627: mol_type = other DNA
atggcctcgctctcccggccatccctccctagctgtctgtgcagcttcctgctgttgctcttgctccaggtatcttcttcttatgccggacagttcagggtgatcggaccaaggcaccctatccgggctctggtgggtgatgaagtggaattgccttgtcgcatatcacccggaaaaaatgcaaccggtatggaagtcggatggtaccggccaccgttctcccgcgtggtgcacctgtacaggaacggcaaggatcaggatggtgaccaggcccctgaatacagaggccgtacagaactgctgaaggatgccatcggagaagggaaggtcacactgcggatacgcaatgtgcggttctctgacgagggcggtttcacttgctttttcagagaccacagttaccaagaggaggcggcaatggaactcaaagtggaggatcccttttattgggtatctcccggagtgctcgtactgctagcggtactgcctgtccttctcctccagatcaccgtcggactggtgttcctgtgccttcagtataggttacgaggtaaactgagggccgagatcgaaaacctgcaccggacctttggccagttcctagaagagttacgcaatcccttctag

SEQ ID NO: 231343 - DNA, 516 bp, synthetic construct
  misc_feature 1..516: note = Description of Artificial Sequence: Synthetic coding sequence
  source 1..516: mol_type = other DNA
atggccagcctcagccggcctagcctgccctcttgcctgtgctcttttctgttgttgctactgctccaagtttcttctagttatgccggacagttccgcgtcataggccctcggcatccaatccgggcactggtgggggatgaagtcgagctgccctgcagaataagccccggtaaaaacgcaactgggatggaggtcggctggtaccgccctcccttcagtcgcgtcgtacacttgtacaggaacggtaaggaccaggatggcgatcaggccccagagtataggggcaggaccgagctcctcaaagatgctatcggcgaaggcaaggtgacgcttaggatccggaacgttcgattctccgacgaaggtggctttacatgctttttccgggaccactcatatcaggaagaagcggctatggaactgaaagtggaagtctctcatagtgtgacccaagactggcttcaatggcatgatcatggcagcctccagcctcccccaccaaggttgaagtag

SEQ ID NO: 231344 - DNA, 516 bp, synthetic construct
  misc_feature 1..516: note = Description of Artificial Sequence: Synthetic coding sequence
  source 1..516: mol_type = other DNA
atggctagtttatcaagaccttctctgccttcttgcttatgtagcttccttctcctgcttttactacaagtttcaagttcctacgctggtcagttccgtgtgataggccctaggcaccctatccgggcactagtcggcgacgaggtcgagttgccttgtcggatttcccctgggaagaatgctactgggatggaagtgggctggtatcgcccacctttttctcgcgtggtgcacctctaccgcaatggcaaggatcaggatggtgatcaggcgccagaatatcggggacgaacggagctgctcaaggacgctataggcgagggcaaggttacactgagaattcgtaatgtccggttctctgacgaagggggattcacctgcttttttagagaccactcttaccaagaagaggccgctatggaattgaaggtggaagtatcccactctgtgacacaagactggcttcagtggcatgatcatggctctctgcagccgcctccacccagactgaagtag

SEQ ID NO: 231345 - DNA, 621 bp, synthetic construct
  misc_feature 1..621: note = Description of Artificial Sequence: Synthetic coding sequence
  source 1..621: mol_type = other DNA
atggcgtccttgagccggccttctctgccctcttgtctgtgctcttttctgctacttctgctgctacaagtgtcctcctcatatgcaggtcagttcagagtgataggtccaagacatcctattagagcccttgtgggtgatgaggtggagctcccttgcaggatatctccgggaaagaacgctacggggatggaagtgggctggtacagaccccctttcagccgcgtggtccacttgtatcgtaacgggaaggatcaggacggagatcaggcccctgagtataggggacgaaccgaactcttgaaggacgcgattggggagggaaaggtgactttgcgaataaggaatgtgaggttttctgacgaggggggattcacatgttttttccgtgaccattcatatcaggaagaagcagctatggaactaaaagtcgaagatcctttttattgggttagccccggagtcctagtcctattagccgtgctgcccgttttgctcctccaaattaccgttggattggtctttctttgtcttcagtacagactccgcggaaagctgagagctgaaattgagaacctgcaccggacctttgttttccacttggaggcactatcgggttag

SEQ ID NO: 231346 - DNA, 627 bp, synthetic construct
  misc_feature 1..627: note = Description of Artificial Sequence: Synthetic coding sequence
  source 1..627: mol_type = other DNA
atggcctctctgagccgcccttctttgccgagttgtttgtgctcattcctgctgctccttctcctgcaggtttcatcctcatacgctggccaattcagagtcattggccctcgacatcccatccgggcactcgtcggcgatgaagtggaactgccctgtcggatctcaccaggcaagaatgctaccggcatggaggtcggctggtaccgaccacccttttcccgcgttgtacacctgtacagaaatggtaaagaccaggacggtgatcaagcccctgaatacagaggaagaacggagctcctgaaggatgccattggagagggtaaggtgactctccggatccggaatgttcgcttctccgacgaaggtggcttcacttgcttcttccgggaccacagctaccaggaagaggcagctatggagctgaaggtggaagatcccttttattgggtgagccctggggtgttagttttgctcgccgtgttgcctgtcctgcttctgcagattacagtcggcctggtgtttctgtgcttacagtaccggctccgcggtaagcttcgcgctgagattgaaaatcttcacagaacattcggacagtttcttgaggagctgcggaatcctttttag

SEQ ID NO: 231347 - DNA, 621 bp, synthetic construct
  misc_feature 1..621: note = Description of Artificial Sequence: Synthetic coding sequence
  source 1..621: mol_type = other DNA
atggccagtctgtccaggccctctttaccatcttgcctgtgtagcttcctgttgcttctgttgcttcaagtgtcatcctcttacgctgggcaatttcgcgtgattgggcctcgccaccctatccgggcacttgttggagacgaagttgaactgccatgtcggataagcccaggcaaaaacgctacgggcatggaggttggctggtacagacctcctttctctcgagttgtccacctctatcggaatggcaaggaccaggatggagatcaggcccctgaatataggggccgaactgagctgttgaaggacgcgattggggagggaaaggtgaccctgaggatccgcaatgtgcgcttcagcgacgaggggggattcacctgtttcttcagggaccactcctatcaggaagaagccgcaatggagcttaaggtggaggatcctttctactgggtatcccctggcgtgctcgtgctgctcgccgttttacctgtccttctgctgcagattacagttggtctggttttcctatgtctacagtaccgactccgaggcaagctgcgcgctgaaattgaaaatcttcacagaacgtttgtgtttcaccttgaagccctgagcggctag

SEQ ID NO: 231348 - DNA, 534 bp, synthetic construct
  misc_feature 1..534: note = Description of Artificial Sequence: Synthetic coding sequence
  source 1..534: mol_type = other DNA
atgtcacacatttcctgggaggaacggtaccggaacggcaaagaccaggacggggatcaggctcctgagtatagaggaagaacagaattgttgaaggacgcaattggggaaggcaaagtgacactgcggatcagaaacgtgagattctcagatgaaggcggattcacatgcttttttcgagatcattcataccaggaggaggccgctatggaattaaaggtggaagatcccttctattgggtgtcacctggggtgcttgtcctgttggccgtgctgccagtcctgctgctgcagataacggtgggtctggtgttcctgtgtctccagtacaggctgcgcggaaaactacgagccgagattgagaatttgcatagaaccttcgacccgcacttcctgcgggtgccttgctggaaaataactctgttcgtcatcgtgcctgtgttgggaccccttgtggcgcttatcatctgctacaattggctgcatagacgcctggccggacagttcctggaggagctgcggaatcccttctag

SEQ ID NO: 231349 - DNA, 621 bp, synthetic construct
  misc_feature 1..621: note = Description of Artificial Sequence: Synthetic coding sequence
  source 1..621: mol_type = other DNA
atggcctcacttagcaggcctagcctcccttcctgcctgtgctcctttctgcttctgcttctcttacaggtgagctccagctatgccggtcagttccgagtgattggccctagacaccccatacgggcactggtcggcgatgaggttgagttgccgtgtaggattagtcctggaaagaacgcaactgggatggaggtgggctggtataggcccccattcagtcgagtggtgcacctgtatcgaaacggcaaggatcaggatggggaccaggcaccagagtaccggggaaggaccgaactgctgaaggacgccataggagaggggaaagtgaccctgcgaattcggaatgttcgcttcagtgatgaaggtggtttcacctgcttcttccgagaccattcttaccaggaggaggcagccatggagctcaaagtcgaggacccattttattgggtgtctccgggagtgctcgtgctcctggccgtgctgcctgtgctgctgctccagataactgttggcctggtgtttctgtgcctgcagtatcgcctgagggggaagctcagagccgagatagaaaatctgcaccggacctttgtgtttcacctagaagccctaagtgggtag

SEQ ID NO: 231350 - DNA, 621 bp, synthetic construct
  misc_feature 1..621: note = Description of Artificial Sequence: Synthetic coding sequence
  source 1..621: mol_type = other DNA
atggcaagcctgagccgccctagtctcccatcatgtctatgcagcttcctcctcttgctgctgcttcaagtgtcgagttcatacgccggacagttcagggtaattggcccacgccaccccattagggctctcgtgggcgacgaggtggagttaccttgccgcatctctccgggtaagaacgccactggcatggaggtgggttggtaccgtcccccattctctcgtgtggtgcacctgtatagaaatggcaaggaccaggatggcgaccaggcccctgaatataggggacggaccgagcttttaaaggacgccataggcgaaggcaaagtaacactgcgaatccgcaatgttcgattctccgatgagggcggattcacatgcttctttagggaccactcgtatcaggaggaggccgcaatggaactcaaagtggaggatcctttctattgggtctctccgggtgtactggtgctcctggctgtgctgcctgtcctcctgctgcagattacagtgggactcgtgttcttatgtctccagtataggctgagggggaaacttcgagcagagatcgagaacctgcaccgtaccttcgtgttccacttggaggccctgtccggctag

SEQ ID NO: 231351 - DNA, 534 bp, synthetic construct
  misc_feature 1..534: note = Description of Artificial Sequence: Synthetic coding sequence
  source 1..534: mol_type = other DNA
atgtctcatatcagttgggaggagaggtatcgcaacggtaaagatcaggacggtgatcaggcccctgaataccgcggaaggaccgagctcctgaaggacgccattggagaggggaaggtcacattgcgaatccgaaatgtgcgcttcagtgacgaggggggatttacttgcttttttcgtgaccactcataccaggaggaggccgcaatggagttgaaagtcgaggatccgttttactgggttagccctggcgtgttagtcctgcttgccgtgcttccggtgctcttgctacagattaccgttgggctggtctttttgtgcctgcagtacaggttgcggggaaagttaagagctgagatagaaaatctgcatcggacttttgatcctcacttcttgcgggtgccttgctggaaaattaccctgttcgtgattgtccccgtgctcggcccactggtcgctctaatcatatgctacaattggttgcacaggcgcctcgccggacaatttctggaggagcttagaaatccattctag

SEQ ID NO: 231352 - DNA, 621 bp, synthetic construct
  misc_feature 1..621: note = Description of Artificial Sequence: Synthetic coding sequence
  source 1..621: mol_type = other DNA
atggcaagtcttagtaggcccagtctgccctcttgcctgtgtagcttcctgctgctgctgctgctgcaggtgagcagttcttatgctggacagttcagagtgataggcccacgacaccctatacgcgcactcgtgggagacgaggtggaattaccttgtagaatctcacccggtaaaaatgcaactgggatggaggtcggatggtataggcccccattttcacgggtggtacatttgtaccggaacggcaaggatcaggacggggatcaagcaccagaataccggggacggaccgagctgctgaaagatgcaatcggggaaggcaaggtgaccctgcgcatcaggaacgtgcggttcagtgacgagggaggtttcacctgtttctttagagaccatagttatcaggaggaggctgcaatggagctgaaggtagaggatcccttctattgggtgtccccaggagtactggtactgctagccgtcctcccggtattgctgcttcaaattaccgtcggtctggtctttctgtgcctgcagtatagactgagagggaaactgcgcgcagagatagagaatctacataggaccttcgttttccaccttgaggctctatcagggtag

SEQ ID NO: 231353 - DNA, 174 bp, synthetic construct
  misc_feature 1..174: note = Description of Artificial Sequence: Synthetic coding sequence
  source 1..174: mol_type = other DNA
atggcctccctatctcgcccatctttaccatcctgcctgtgctccttcctgctactgctgttattgcaggtatcaagctcatatgccggactggtggccgtcgccagaagctggttaattgctgcgtcgactagccaggcacaggttattctgctgacacagccactggaatag

SEQ ID NO: 231354 - DNA, 621 bp, synthetic construct
  misc_feature 1..621: note = Description of Artificial Sequence: Synthetic coding sequence
  source 1..621: mol_type = other DNA
atggcctccctgagtaggccaagtttgccatcctgcctctgctctttcctgctgctgttactgctgcaggtcagtagttcctacgctggtcagtttcgggtgattggtccacgacatccaatcagggcccttgtgggcgatgaagtggaactgccctgcaggatcagtccaggaaagaacgccaccggaatggaggtcggctggtaccggccaccattctcacgggtggttcatctgtaccgaaatggcaaagaccaggatggagaccaggccccagaatacagaggacgtaccgagctcctgaaagatgccatcggcgaaggtaaagtcacacttcgaattcgcaatgtgcggtttagtgatgaggggggttttacctgcttcttccgcgaccactcttatcaggaagaggcggcaatggagctgaaggtggaggacccattttactgggtgagcccaggggtgctggtgctgctggccgttctcccagtgctgctgctgcagataacagtcgggctagtatttttatgcctgcagtaccgcctgcggggaaagctgcgcgctgaaatagagaacctgcaccgcaccttcgtatttcacctggaagcattgtcagggtag

SEQ ID NO: 231355 - DNA, 516 bp, synthetic construct
  misc_feature 1..516: note = Description of Artificial Sequence: Synthetic coding sequence
  source 1..516: mol_type = other DNA
atggcgtccctgtcccggcctagcttgccaagttgtctttgcagttttcttttattgttactcttacaggtttccagcagttatgccggacagtttcgcgtgattggacccagacacccgatacgggctttagtcggagatgaagtggagctgccttgtagaatttcccctggcaagaatgccaccgggatggaggtgggctggtacagaccaccctttagtagggttgtgcatctgtaccgaaatgggaaggaccaagatggcgatcaggcacccgaatacagagggaggacagagcttttgaaagatgccatcggtgaaggtaaggtgaccctccgcatccgcaatgtcaggttcagtgacgagggagggtttacttgcttcttccgcgatcacagctaccaggaggaagcagccatggagctcaaggtggaggtatctcatagcgtcacccaggactggttgcagtggcacgaccatggatctctgcagcctcctcctcccagactgaaatag

SEQ ID NO: 231356 - DNA, 621 bp, synthetic construct
  misc_feature 1..621: note = Description of Artificial Sequence: Synthetic coding sequence
  source 1..621: mol_type = other DNA
atggcttcacttagccggccttctctccccagctgcctgtgcagctttctcctgctcctgctcctacaggtgtcaagcagctacgcaggccaattcagagtaattggtcccagacatcctatcagggcattggttggggacgaagtggagctaccatgtcggatctcacctggcaaaaacgccacaggcatggaagtgggatggtacagacctccttttagtcgtgtagtgcacctttatagaaacggaaaggatcaggatggggaccaagcaccagagtacagaggacgcactgagctgctcaaagacgcaattggcgaggggaaagtgaccctgcgtatccggaatgtcaggttttctgatgaaggtggctttacgtgcttcttccgcgatcatagttaccaagaggaagccgctatggagctgaaagtggaggatcccttttactgggtgtcccccggagtcctcgttttgctggccgttctgcctgtcttactcttgcagattactttgggcttggtttttctctgcctccagtatcgattgcgcggaaagctcagggccgaaatagagaatctgcatcgaacattcgtttttcacctggaagccctgagtggatag

SEQ ID NO: 231357 - DNA, 516 bp, synthetic construct
  misc_feature 1..516: note = Description of Artificial Sequence: Synthetic coding sequence
  source 1..516: mol_type = other DNA
atggcatcactgtcgcggccttctctgcccagctgcctctgctctttcttgctactgttgttactccaggtgtcctcctcttacgcgggacagtttagagttattgggcctcggcacccaattagagcgctggtgggcgacgaggtcgagttgccctgtcgcatctccccgggtaagaatgcgacaggcatggaagtcgggtggtacaggcccccatttagtcgggttgtgcatctttacagaaacggcaaggaccaggatggggatcaggcgcctgaataccggggacggactgaactgttaaaggatgccattggtgagggcaaagtgactctgcgtattaggaacgtgcgcttttcagacgagggcggatttacatgcttttttcgcgatcactcctaccaggaagaggccgctatggaattaaaggtcgaggtgagccattcggtgacacaggactggcttcagtggcatgaccacggttcacttcaaccccctccacccaggctgaagtag

SEQ ID NO: 231358 - DNA, 516 bp, synthetic construct
  misc_feature 1..516: note = Description of Artificial Sequence: Synthetic coding sequence
  source 1..516: mol_type = other DNA
atggcctcgctgagccggccatcattgccctcttgcctttgctcttttcttctccttcttcttctgcaggtgagcagttcatacgccggtcagttccgcgtgataggccctcgccacccaatacgtgccctggtgggagacgaggttgaactgccatgtaggatctctccgggaaaaaacgccacgggcatggaagttgggtggtaccgccctcccttttctagagttgttcacttgtaccggaatggcaaagatcaggatggtgaccaagcccctgagtacaggggacggaccgagctgctcaaagatgctattggggaggggaaagttactttgcgaattcgcaacgtgcgcttcagcgatgagggtggatttacgtgtttctttcgagatcactcctatcaggaggaggcagccatggagctcaaggtcgaagtgtcccactctgtgacccaggattggctgcagtggcatgaccacggcagcctgcaaccaccaccacctcggctgaagtag

SEQ ID NO: 231359 - DNA, 627 bp, synthetic construct
  misc_feature 1..627: note = Description of Artificial Sequence: Synthetic coding sequence
  source 1..627: mol_type = other DNA
atggccagcctgagccgcccttccctcccgtcctgcctttgttcctttctattgctccttttactccaagtgtctagctcgtatgccggtcaatttcgtgtgatcggcccacggcaccccattcgggctctggtgggcgatgaggtggagttaccttgtagaatctcaccgggtaagaatgctactggtatggaggtcgggtggtaccggccaccgttctctagagtcgtgcatttgtatcggaatgggaaagaccaggacggcgatcaggctccggagtatcgtggccgaacagaactgctgaaggacgctattggagaaggtaaagtcacgcttcgtatcagaaacgttcgcttttctgacgaaggaggattcacctgcttctttagagatcactcctaccaggaagaagccgcaatggagctaaaagttgaagaccccttctactgggtgtcccccggagtgctggtcctgttagctgtgttgccagtgttgctcttacagatcacggtgggactggtttttctctgtcttcagtatcgtctaagaggaaagctgcgcgctgagatcgaaaacctgcaccgtacctttgggcagttcttggaagagctgcgaaacccattctag

SEQ ID NO: 231360 - DNA, 174 bp, synthetic construct
  misc_feature 1..174: note = Description of Artificial Sequence: Synthetic coding sequence
  source 1..174: mol_type = other DNA
atggcttcgttgtctcggccaagtctcccatcttgtctctgttcattcctcctcctgctcctcctccaggtgtcttccagctacgccggactcgtggctgtagcaaggagctggctgatcgctgcatcaacaagtcaggctcaggtgatcctcctaacacagcccctggagtag

SEQ ID NO: 231361 - DNA, 627 bp, synthetic construct
  misc_feature 1..627: note = Description of Artificial Sequence: Synthetic coding sequence
  source 1..627: mol_type = other DNA
atggcatccttgtctagaccatcactaccttcttgtttgtgcagtttcttgctcctcttactgttgcaagtgtcctcaagctatgcaggccagtttcgtgtcatcggcccacgccaccccattcgcgctctggtgggtgacgaagttgagttgccttgtcgaatctcacctgggaagaatgccactggaatggaggtgggttggtatcgacccccattttcaagggtggtgcacttatatcgaaacggcaaagaccaggatggagaccaagctccggaatatcggggtagaacagagctgctaaaggacgccataggtgaaggcaaggttacgctcaggattaggaatgtcaggtttagcgatgaggggggatttacatgcttctttcgcgaccactcataccaggaagaggctgccatggagctgaaagttgaagatcctttctactgggtctcgccaggcgtattagtcctgttggccgtattgccagtgctgctgctccagatcaccgtgggactggtgttcctgtgtctgcagtaccgacttcgagggaagctgcgggcagagattgagaaccttcacagaacatttgggcagttcctcgaagagctcagaaaccctttctag

SEQ ID NO: 231362 - DNA, 174 bp, synthetic construct
  misc_feature 1..174: note = Description of Artificial Sequence: Synthetic coding sequence
  source 1..174: mol_type = other DNA
atggctagtctttcgcggccatccctgccatcatgcctctgtagttttctgctactgcttcttcttcaggtgtcctcctcttacgctggtctggtggccgtggctcggtcatggctcattgctgcatccacaagtcaggctcaggtcatcttattgacgcagcctttggagtag

SEQ ID NO: 231363 - DNA, 534 bp, synthetic construct
  misc_feature 1..534: note = Description of Artificial Sequence: Synthetic coding sequence
  source 1..534: mol_type = other DNA
atgtctcatatctcttgggaagaacgctacaggaacggcaaggaccaggacggagaccaggcacctgaatatcggggacgaactgagctgctcaaggacgctattggcgaaggtaaagtcaccctgcgtattcgcaatgtcaggttctccgacgagggaggttttacctgcttcttccgagatcatagctaccaggaggaagctgctatggagctcaaggtggaagacccattctattgggtgtcacctggcgtcctcgttttgctggctgtgctgcctgtccttcttctgcaaattacagttggtctcgttttcctttgcctgcagtaccgcctccgcggaaagttgcgcgctgagatcgagaaccttcaccgtaccttcgatcctcacttcctaagggtgccttgttggaagatcacactgtttgtgattgttcctgtgctaggacccttggtagcgttgattatttgctacaattggctgcatcgcaggctcgccggtcagtttctggaggagctacgtaatcccttttag

SEQ ID NO: 231364 - DNA, 516 bp, synthetic construct
  misc_feature 1..516: note = Description of Artificial Sequence: Synthetic coding sequence
  source 1..516: mol_type = other DNA
atggctagtctcagtagaccaagcctgccatcttgcctgtgcagcttccttctcctccttctgttacaagtgtcgtcgtcgtatgccggacagttccgtgtcatcggacctcgccaccccattagggctcttgtaggagacgaagtcgagctcccttgtcggatttcccctggcaaaaatgctacaggtatggaagtgggctggtacaggcctccgttttctagagtcgtgcatctgtacagaaatggcaaggatcaggacggggatcaggccccagagtatagaggacgcactgaactcttgaaggatgccatcggtgaaggcaaggtcactttgcggatccggaacgtccgcttcagcgatgaaggcggttttacctgctttttcagggaccactcttatcaagaggaagcagccatggaactcaaggtagaggtgtcacactccgtgactcaggactggctacagtggcatgaccatggcagccttcagccccctccccctcgcctgaaatag

SEQ ID NO: 231365 - DNA, 534 bp, synthetic construct
  misc_feature 1..534: note = Description of Artificial Sequence: Synthetic coding sequence
  source 1..534: mol_type = other DNA
atgtctcatatttcatgggaggagagatatcggaacgggaaagaccaggacggtgaccaagcacccgaatacagaggcagaactgagttactgaaggacgccataggggaaggtaaggtgaccttgcggatccggaacgttaggttttccgatgaggggggtttcacctgcttcttccgggatcactcctaccaggaggaggccgctatggagctgaaagtggaagacccgttctattgggtatccccgggagttctagtgttactggctgttcttccagtactcttgctacagattaccctgggactcgtgtttttgtgtctgcagtatcgcctacgcggaaaactccgagccgagatagagaacctccatcgcacatttgatcctcactttttacgtgtgccttgttggaaaatcacgctcttcgtgatcgtgccagtgctcggaccactcgtggcccttataatctgctataattggttgcataggcgcctggccggtcagttcctggaagagttgaggaacccattttag

SEQ ID NO: 231366 - DNA, 627 bp, synthetic construct
  misc_feature 1..627: note = Description of Artificial Sequence: Synthetic coding sequence
  source 1..627: mol_type = other DNA
atggcatcactcagccgtccatccttaccctcatgcttgtgtagtttcttactcctactgttgctgcaggtatcatcctcatatgcgggtcaattccgggtgattggcccacgccatccaattagggctcttgtcggcgacgaggtggagctgccatgtaggatatctccaggcaagaacgccaccggcatggaggttggatggtatagacccccattcagccgggtcgtgcacctgtatcgaaacgggaaggatcaagacggggatcaggcccctgagtatcgagggagaaccgagctgcttaaagatgcaatcggtgaaggaaaagtcacacttaggatccgcaatgtgcggttctccgacgaaggtggttttacttgtttcttccgcgaccactcctaccaagaggaggccgctatggaactgaaggtggaagacccgttttattgggtctcacctggagtcctagtgcttctggcagtcctgcccgtgcttctgctgcaaattaccgtaggtctagtcttcttgtgtttgcagtatagacttcggggaaagctgagagctgagattgagaaccttcacaggacgtttggacaatttctcgaagagctgcggaatccattttag

SEQ ID NO: 231367 - DNA, 174 bp, synthetic construct
  misc_feature 1..174: note = Description of Artificial Sequence: Synthetic coding sequence
  source 1..174: mol_type = other DNA
atggcgtctctgagccggccttccttgcccagctgcctctgcagcttcctgctgctgttgctgctgcaggtgagcagtagttatgccggattagtcgccgtagcacggagttggttaattgccgctagcacttctcaggctcaggtgattttgctcacacagcccctggagtag

SEQ ID NO: 231368 - DNA, 174 bp, synthetic construct
  misc_feature 1..174: note = Description of Artificial Sequence: Synthetic coding sequence
  source 1..174: mol_type = other DNA
atggcttcactgagcagaccatccctcccctcttgcctctgttccttcctgcttctacttctgttgcaggtttcgtcatcttacgccggtctcgtggcggttgccagaagctggctgattgccgcttccacaagtcaggcacaggtgatcctgctcacgcagccgcttgagtag

SEQ ID NO: 231369 - DNA, 534 bp, synthetic construct
  misc_feature 1..534: note = Description of Artificial Sequence: Synthetic coding sequence
  source 1..534: mol_type = other DNA
atgtcacatataagctgggaggagagatatagaaacggcaaagatcaagatggtgaccaggcccctgaatacaggggaaggacagaactgctcaaggatgccattggggagggaaaagtgactctacggattcggaatgtgcgcttcagcgatgagggcggatttacttgcttttttcgtgaccattcctaccaagaagaggctgctatggagcttaaggtcgaggaccctttttattgggtgagccctggcgtgctggtacttctggctgtgctgcccgtactcctacttcagatcacagtcgggctggtgtttttatgcctgcagtaccgcttgcggggtaaactgcgtgccgaaattgaaaacttgcatcggaccttcgaccctcacttcctgagggtgccttgctggaaaattactctttttgtgatcgtgcccgttttggggccactggtggcactgattatatgctataactggctccataggagattggcgggacagttccttgaggagctgaggaatccgttctag

SEQ ID NO: 231370 - DNA, 516 bp, synthetic construct
  misc_feature 1..516: note = Description of Artificial Sequence: Synthetic coding sequence
  source 1..516: mol_type = other DNA
atggccagtctgtctcggccttccctaccttcttgcttgtgctctttcttgcttctgcttcttttacaagtgtcttcttcttacgccggacagttcagagtcattgggcctcgccatcccatcagggcacttgttggagatgaagtggagcttccctgtcgaatttcccccggaaagaatgcaaccgggatggaggtcggttggtaccgtcctcctttttctcgcgtagtgcacctataccgcaacggtaaggaccaggacggagaccaggccccagagtaccgcggacggaccgaattgctgaaagacgctatcggcgaaggcaaggtcaccttaagaatcaggaacgtgagattcagcgatgagggcggatttacgtgtttcttccgcgatcactcttatcaggaagaagctgccatggagctcaaagtagaggtgagccattccgtcactcaagattggttgcagtggcacgatcatggcagcctacagccccctccgcctcggctcaaatag

SEQ ID NO: 231371 - DNA, 534 bp, synthetic construct
  misc_feature 1..534: note = Description of Artificial Sequence: Synthetic coding sequence
  source 1..534: mol_type = other DNA
atgagccacattagttgggaggaacgctacaggaacggcaaagatcaggatggagatcaggccccagagtacagaggtagaactgaactgctaaaagacgcaatcggagagggaaaggtgacacttcggatcaggaacgtgcgattttccgacgagggcggttttacatgcttttttcgggatcattcttaccaggaagaggcagccatggagctcaaggtcgaggacccattctactgggtctctcctggcgttttggtgctgctggccgtcctacccgtcttgctgcttcagattaccgtgggcctggtctttctgtgcctccaataccggctacgtggcaagctgcgtgcagagattgagaacctgcataggacctttgacccccactttctcagggtgccttgttggaagataaccctttttgttattgtgccggtgttggggcctctcgtggctctgatcatctgctacaactggcttcacaggcgactggccggtcagttccttgaagagctaagaaaccctttttag

SEQ ID NO: 231372 - DNA, 174 bp, synthetic construct
  misc_feature 1..174: note = Description of Artificial Sequence: Synthetic coding sequence
  source 1..174: mol_type = other DNA
atggcctctctctctaggcctagcctgccctcttgcctgtgtagctttctgctgctgctgctgctgcaggtcagcagcagttatgctggcctcgttgccgtcgctcggtcgtggctcattgccgcatctaccagtcaagcccaagtgatactcttaacccagcctctagagtag

SEQ ID NO: 231373 - DNA, 627 bp, synthetic construct
  misc_feature 1..627: note = Description of Artificial Sequence: Synthetic coding sequence
  source 1..627: mol_type = other DNA
atggcatctctgagtcgcccttcgttgccatcatgtttatgctcctttctactgcttctgctgcttcaggtcagctcaagttacgctggacagttccgtgtcataggcccaagacaccctatcagggcattggtgggcgacgaagtggagcttccgtgccggatctcaccaggcaagaatgcaacaggcatggaggtggggtggtaccgaccccctttttccagagtggtgcatctgtatcgcaatggaaaagaccaggacggggatcaggccccagagtataggggacgcaccgagcttctgaaggacgcaattggcgaggggaaggttactctgaggatacggaatgtgaggttctcagacgagggtggttttacatgcttctttcgcgatcacagttatcaagaagaggccgcaatggagttaaaagtggaggatcctttttattgggtctctcctggggtcctggtcctcctggccgttctaccagtgcttctgttacagattacggtcggactggtcttcctctgtctgcagtaccggctccgaggcaagctcagagctgaaatagaaaatctgcatcgaactttcggtcagttcctggaggaattacggaacccgttctag

SEQ ID NO: 231374 - DNA, 327 bp, synthetic construct
  misc_feature 1..327: note = Description of Artificial Sequence: Synthetic coding sequence
  source 1..327: mol_type = other DNA
atggccagcctaagtagaccttccttgccgagttgtctgtgctcgtttctgttattactgctgctccaggtgtcctccagctacgctgatcctttttactgggtctcaccaggcgtgcttgtgctcctggccgtgctgcccgtcttgctgttacagattaccgtgggactgattttcctgtgcttgcagtaccgacttcgtgggaagcttagggcggaaatcgagaaccttcatcgaacctttgaatcttttggagtactggggccacaggtgaaagaacctaaaaaaaccggccaattcctggaagagctaagaaatcctttttag

SEQ ID NO: 231375 - DNA, 753 bp, synthetic construct
  misc_feature 1..753: note = Description of Artificial Sequence: Synthetic coding sequence
  source 1..753: mol_type = other DNA
atggcgccaggtgctccaagcagctcacccagcccgatcctcgcagtgctgctgttttcttcactggtgttgagccctgctcaggctatcgtcgtctatacagatcgagaagtgcatggcgctgttggatcaagggtaacactccactgcagtttctggtcttcagagtgggtgagtgacgacatttcttttacttggcgttaccagcctgaagggggtcgggacgcaatctccatctttcattatgcaaaggggcagccctacatagacgaggtgggcacgtttaaggagcgaatccagtgggtgggagatcccagatggaaggatggcagcattgtgattcacaatctggattattcagacaacggcacttttacatgcgacgtgaaaaacccacctgacattgtgggcaaaacgagtcaggttacactgtatgtgtttgaaaaggttcccacgaggtatggggtcgtgctgggagcagtgataggcggagtactgggagtcgtacttctattactgttactcttctacgtggtgagatactgctggctgaggagacaagcggctctccagagacgcctgtcagccatggagaaggggaagctgcataaacccggtaaggacgcgagcaagcgcggaagacagacacccgttctgtatcagtgctggaccaccgcagaggcaccaaaactctctgtgaggcgtaggccaagaggatggggctcgctggcccgtatccggaacagcggatag

SEQ ID NO: 231376 - DNA, 777 bp, synthetic construct
  misc_feature 1..777: note = Description of Artificial Sequence: Synthetic coding sequence
  source 1..777: mol_type = other DNA
atgttacgcgcacccgcaccggctcccgctatggccccaggagccccttcttctagtcccagccccatcctggcagtcctactgttcagctctctggtgctgtctcccgctcaagcgatcgtggtttatacggatagagaggtgcacggggctgtcgggtctagggtaactcttcactgctctttttggagtagcgagtgggtatctgatgacatttcttttacatggcggtatcaacccgagggaggacgcgatgctatttctatttttcactatgccaaggggcagccttatatcgacgaggtcggcactttcaaggaacggattcagtgggtgggagatcctagatggaaggacggatctattgtgatacacaacctcgattactcggataatggcacatttacctgcgatgttaaaaatccaccagacatagtaggaaaaacttcccaggtcacactttatgtgtttgagaaggtgccaacacggtacggagttgtgctcggtgccgtaatcgggggagtattgggtgtggtgctactgttgctattactgttctacgtcgttcgctactgctggctgcgtagacaggccgctctacaaaggcgattgtctgccatggagaaggggaaattacataagccaggtaaagatgcctctaagagaggcagacagacacccgtactgtatgcgatgcttgatcattctcgatcaacaaaagcagtcagcgagaagaaggccaagggactcggcgagtcgcggaaagataaaaagtag

SEQ ID NO: 231377 - DNA, 747 bp, synthetic construct
  misc_feature 1..747: note = Description of Artificial Sequence: Synthetic coding sequence
  source 1..747: mol_type = other DNA
atggcccctggcgctccctctagcagtcccagtccgatcctggccgttttactattttcatctctggtgctttcacccgcacaggcaattgtggtctatacagatcgcgaggttcacggagccgtcggaagtcgggtcacgctgcattgttccttctggtctagcgagtgggtgtcagacgacatcagcttcacttggaggtatcagcccgaaggcggtcgggacgcaatctcaatatttcactatgccaagggacagccttatatcgacgaggtcggaacatttaaagaaagaatccagtgggtgggcgatccccgttggaaggatggctctatagtgattcacaacctcgactactccgataacgggacttttacctgtgatgtgaaaaatcctcctgacatcgtggggaaaacttcccaggtaactctctatgtattcgaaaaggttcccacccgatacggtgtggttctgggtgccgttatcggcggagtgctcggtgtggtgctactacttctcctgctgttctacgtcgtaagatattgctggctgcggaggcaggctgccctgcagagaaggttgtcagcaatggaaaaggggaaactacacaagccaggaaaggacgcgagcaagagaggtcgccagacccctgtactgtatgccatgctcgaccactctcgatcaaccaaggcagtgagtgaaaagaaggctaagggactaggggagtctcggaaggacaaaaaatag

SEQ ID NO: 231378 - DNA, 747 bp, synthetic construct
  misc_feature 1..747: note = Description of Artificial Sequence: Synthetic coding sequence
  source 1..747: mol_type = other DNA
atggccccaggtgctcccagttctagtccatctcccatactggccgtgttgctcttctcatcactggtgctgtctcctgcccaagccatcgtggtgtacactgaccgggaagtgcatggggcagttggcagccgcgttactctccactgttccttctggagttcggaatgggtgtcggatgatattagttttacatggaggtatcagcccgaagggggaagggacgcgatctcaatattccattatgccaaaggacagccatacatagatgaggtgggcacattcaaagagcgtattcagtgggtcggcgacccacggtggaaagacggcagcattgtgattcacaacctggactactccgacaatggcacgtttacatgtgacgtgaaaaatccacccgacattgtcggaaaaacatcacaggtgactctgtatgtgtttgaaaaagtcccaactagatatggggtggtcctgggagcagtcatcgggggagtgctgggtgtggtgctcctgctcttattattgttttacgtggttaggtattgttggttacggaggcaggctgcactgcagcgccgtctgtccgctatggagaaaggtaaacttcacaagccaggcaaagacgcctctaaaagaggaaggcagactcccgtgctgtacgcgatgcttgaccactcccgcagtacaaaggctgtcagcgaaaagaaggcaaagggcctgggtgagtctagaaaagacaagaagtag

SEQ ID NO: 231379 - DNA, 648 bp, synthetic construct
  misc_feature 1..648: note = Description of Artificial Sequence: Synthetic coding sequence
  source 1..648: mol_type = other DNA
atgtacggcaaaagcagcacgcgcgctgtgctattgctgttgggaatacaactgaccgccctgtggccgattgcagctgtggagatctacacctccagggtgctggaggcagtgaacggaactgatgcccgtcttaaatgcacctttagcagcttcgctcctgtgggcgacgctctgaccgttacatggaacttcaggccactggatggcggaccagagcagtttgtgttctactaccacattgaccctttccagcctatgtccggcagatttaaggatcgggtgagttgggacgggaaccctgagaggtacgatgcctccatcctgctatggaagctccagtttgatgacaacggaacctacacctgtcaggttaagaatcctccagatgttgacggagtcattggtgagatacgcctgtctgttgtccacaccgttcgtttcagtgaaatccactttcttgcattggcaattggaagtgcttgtgccctcatgattataatcgtaatagtggtggttctcttccagcactaccggaagaaaaggtgggcagagagggcccacaaggtagtggagatcaaaagcaaagaagaagagagacttaaccaggaaaaaaaggtgagtgtgtacctcgaagacactgattag

SEQ ID NO: 231380 - DNA, 648 bp, synthetic construct
  misc_feature 1..648: note = Description of Artificial Sequence: Synthetic coding sequence
  source 1..648: mol_type = other DNA
atgtacggaaagtcctcaacgcgggctgttctgctcctgctgggtatacagctgacagccctatggcctatcgctgcggtggagatttataccagtcgagtgttggaggctgtcaacggcacggatgccagacttaaatgtaccttcagctccttcgctcccgtgggagatgcactcactgtgacatggaatttccgcccactggatggcggtccagagcagttcgtgttttactaccacattgatccgtttcagccaatgagcggaaggttcaaggaccgggtctcatgggatggcaatcctgagagatatgatgcttctatcctgctgtggaaattgcaatttgacgataatgggacctacacctgtcaggtgaagaacccacccgacgtggatggcgtaatcggtgagattcggctctcggtggtgcatacggtcaggtttagcgaaatccactttctggctttagccatcggctcagcttgtgccctaatgattatcattgtcattgtggtcgtgctgttccagcactatcggaaaaagaggtgggctgaacgcgctcacaaggtcgtggagatcaagagtaaggaggaagagaggcttaaccaggagaagaaagttagtgtgtatcttgaagacaccgattag

SEQ ID NO: 231381 - DNA, 708 bp, synthetic construct
  misc_feature 1..708: note = Description of Artificial Sequence: Synthetic coding sequence
  source 1..708: mol_type = other DNA
atgcagcagaggggtgcagcaggttcgagaggatgcgctctcttccccttactcggggttctcttcttccagggggtctacatagttttctcactggagatcagagctgacgcgcatgtaagggggtatgtcggggaaaaaatcaaacttaagtgtaccttcaagagcacctctgacgttacagacaagttgactattgactggacatacagacctcccagttccagccacacggtgagcatatttcattatcagtcctttcagtatccaacaactgccggtaccttccgcgatcggattagttgggtcggcaatgtctataagggggacgcatctatatcaataagtaaccctacaatcaaggacaatggaacctttagctgcgccgttaagaacccccctgacgtccaccacaatatccccatgacagaactgacagtgactgaacggggttttggcacaatgctcagctctgtcgcgttactgtctatccttgtgtttgtaccctctgccgtggtggtggccctgctgctggttcggatgggaagaaaggcggcagggctaaagaaacgatcacgaagcggctacaagaaaagttccatcgaggtcagcgacgataccgaccaagaggaggaggaagcatgtatggctaggctttgtgtgagatgcgcagagtgtctggacagcgattatgaggagacttactag

SEQ ID NO: 231382 - DNA, 672 bp, synthetic construct
  misc_feature 1..672: note = Description of Artificial Sequence: Synthetic coding sequence
  source 1..672: mol_type = other DNA
atgcagcaaaggggcgcagctggctcaagaggatgcgccctcttccctctgctcggggttctgttcttccaggatgcgcacgtgagaggctatgtcggggaaaagatcaagctgaaatgtaccttcaaaagtacgagcgatgttaccgacaaactgacaatcgattggacctaccggccaccttcttcctcgcataccgtctcaatctttcactaccaaagtttccaataccccacgacggcaggaacctttcgtgatcgcatatcatgggtcgggaacgtatacaagggagacgcatctatctcgatctcaaatcccaccataaaggataatggcaccttctcttgcgcggtgaagaacccccctgacgtccaccataacatccctatgactgaacttaccgtaaccgagagaggtttcggaaccatgctgagtagtgtggccctgctgagcatcttggtgttcgtgccaagcgcagtggtggtggcactccttctcgtgaggatgggtcgaaaggccgcaggcctcaagaagcggtctcgaagcggctacaaaaagtcctccattgaggtgtccgacgacacagaccaagaggaagaagaggcatgcatggccaggctgtgcgtgcgctgtgctgagtgcctggatagcgattacgaagaaacctattag

SEQ ID NO: 231383 - DNA, 3366 bp, synthetic construct
  misc_feature 1..3366: note = Description of Artificial Sequence: Synthetic coding sequence
  source 1..3366: mol_type = other DNA
atgtctctggagaacgaggacaaaagggccagaaccaggtcgaaggccctgcgcggtcctcctgagactaccgcggctgacctgtcgtgccctaccccagggtgcactgggtcaggccacgtccggggaaaatactcgaggcatcgtagccttcagtcttgcccactcgcaaagaaaaggaaactggaaggcgctgaggccgagcacctagtctcgaagcgcaagtcccacccactaaaactggccttggatgagggctacggggtggactcagatggaagcgaagacacagaagtcaaggacgcctcggtctcagatgagagcgaaggcacattggagggcgctgaggctgagacttctggacaggatgagattcataggcccgagacagcagaaggtcggtctcctgtgaaaagccattttggtagcaatcctattggctctgccacagcttcctcaaaaggctcctatagctcataccagggtataatcgccacaagcctgttgaatctgggccagattgccgaggaaacattagtggaggaggatctgggccaagctgcgaaacctggccctgggatcgtgcacctgttgcaggaagccgcagaaggagctgctagcgaagaaggagagaaggggcttttcatacagccggaggacgctgaagaagtcgttgaggtgacgacagaacgatctcaggatttgtgcccccagagtttggaagatgccgcttctgaagaatcttccaagcagaaaggtattctgtctcatgaagaggaagatgaagaggaagaagaggaggaagaagaggaggaagaagacgaagaggaggaagaggaagaggaggaggaggaggaagaagaggaggaggaagaggaagaagaagaagaagaagaggaagaagaggaagaggaggaagcggcacctgacgtgatttttcaggaagacacttcacatacctccgcccagaaagccccagagctacgcggacctgaatctccctcccctaagcccgaatatagcgtaatcgtagaggtgcgttcagacgatgacaaagacgaggatacccacagtagaaagagcaccgtgaccgatgaaagtgagatgcaggacatgatgacccgaggcaaccttggattactggaacaggctattgccctcaaggctgaacaggtcaggacagtctgcgagcctggctgcccccctgctgaacagtcccagttaggcctgggggagccaggtaaggcagctaagcccctggacaccgtcaggaagagctattactcgaaggatccatcacgggcagaaaagagagagattaaatgcccaacccctggttgtgacggtacggggcatgtcacaggtctctacccccaccataggtctctcagcggctgccctcacaaggaccgcatccctccggaaatcttagccatgcacgagaacgtgttgaagtgtcctactcctggatgtacgggacaaggacacgtcaactctaacagaaatactcaccgtagtctgagtgggtgccccattgccgctgctgagaagctggcaaaatcacacgaaaagcaacagcctcaaactggagacccctccaaaagcagttccaatagcgatagaatcttgaggcccatgtgcttcgtgaagcagctcgaagtgcccccatacgggagctaccgccctaacgtagctcccgcaaccccccgagcgaatcttgcaaaagaacttgaaaaattttctaaggtgacattcgactacgcttccttcgacgctcaggtgttcggcaagcgcatgttagccccaaagatccagaccagcgagacgtctccgaaggctttccagtgctttgactattctcaggacgctgaggcggctcatatggctgctacagcgatattaaaccttagtacacgctgttgggagatgccggagaacctgtccactaaaccccaggacctgcctagcaagtccgtggacatcgaggtggacgagaacggcaccttagatctgtcgatgcacaagcacaggaagagggagaatgcctttccctcttcaagcagctgttcatctagccccggtgtcaagtctccagatgcctctcagagacactcctctacatctgctcccagctcaagcatgacgagcccgcagtcctctcaggctagcagacaggacgaatgggatcggcctctggactacacgaagccttctagactccgcgaggaggagcccgaggaaagcgaacccgcagctcactcatttgccagctctgaggccgacgaccaggaagtctccgaggaaaacttcgaggaacggaagtatccaggtgaagtgacattaaccaattttaaacttaagtttctgtctaaagatatcaagaaagaattgctcacatgccctacccctgggtgcgacggatcaggacatatcacagggaactacgcctcccacagatccctctctggttgccccctcgctgataagtcattacgcaatcttatggcggcacattccgccgatttaaagtgtcccaccccaggctgtgacgggagcggacacatcacaggaaactacgcgagtcatcggtccctgtccggttgcccccgtgccaagaaaagcggagtgaaggtggcgccaaccaaagacgacaaggaggacccagaactaatgaagtgccccgttccagggtgcgtgggcctgggccatatttcgggaaaatatgcaagtcatcgctccgcgagcggttgccctttagccgctcgccgacagaaggagggttcacttaatggatcttccttctcctggaagtctctgaagaatgagggtcctacttgccctaccccaggatgcgacgggtccggacacgctaacggttcttttcttacccatagaagtctcagcggatgccctcgagcgacctttgccggtaaaaaggggaagttaagcggggatgaggtgctttcgcccaaatttaaaacaagtgacgtactcgagaatgatgaggagattaagcaattgaaccaggaaatcagggacctgaacgaatctaatagtgagatggaagccgctatggtgcaattgcagagccagatcagctcaatggagaaaaacctaaaaaatatagaggaggaaaataagctcattgaagagcagaacgaggctctgttcctcgagctctcaggcctttcacaggctctaattcagtccctggccaatattcgcctcccccacatggaaccaatttgtgaacagaacttcgatgcttacgtgtctactctcacagacatgtatagcaaccaggatccggagaacaaagacttattggagagtattaagcaggcagtgaggggaatccaggtctag

SEQ ID NO: 231384 - DNA, 1776 bp, synthetic construct
  misc_feature 1..1776: note = Description of Artificial Sequence: Synthetic coding sequence
  source 1..1776: mol_type = other DNA
atgagtttggaaaatgaagacaagcgggctcggactaggtctaaggccctgcgaggcccacccgagaccacagcggcagatctcagctgtcccaccccgggatgtacgggcagcggtcacgtgcgtggtaagtactcgcgccaccgcagcctacagagctgtcccctggcaaagaagcgtaaattagagggcgcagaagccgaacatctcgtgtccaagagaaaatcacacccactaaagttagctcttgatgaaggttacggagttgactcagatggcagcgaggatacagaggtgaaagacgcatccgtcagcgatgagagtgagggcaccctcgaaggggctgaagccgagacatcagggcaagacgaaattcacagaccggaaacagccgaagacccaagcagagccgagaaaagagaaataaaatgtccaacacctgggtgcgacggcaccggccatgttaccggcctctatccacatcatcgaagtctgagtggctgccctcataaggaccgcatccctccagaaattctggcgatgcatgagaatgtgctgaagtgtcccacccccggttgtactggccaggggcacgtcaactcaaacaggaacacccatcggagtcttagcggatgccccatcgccgcagccgaaaagctcgcgaagtctcacgagaagcagcaacctcagactggggaccctagcaaatcctcttcaaactctgaccgcatattacgaccaatgtgttttgtgaagcaactggaggtacctccctacgggtcctacaggcctaatgtggcacccgcaacaccccgtgccaatctggctaaagagctggagaaatttagcaaggtgacctttgattacgcatccttcgatgctcaggtgttcgggaaacggatgctggcaccgaagattcaaacatctgagacctcacccaaagccttccagtgttttgattacagccaggacgccgaggccgctcacatggcagcgaccgcaattctgaacctttccacccgatgttgggaaatgcccgagaatctgtctacgaagccccaggacctgccttcgaagtccgtcgacattgaggtcgacgaaaatggcactctcgatttaagcatgcacaagcaccgaaagagggaaaacgctttcccctccagttcttcctgctcctctagcccaggagtgaagtctccggatgcttcccagagacacagctccacgtctgctccgtcttctagcatgacttcaccacagtcttcgcaggcatcccgccaggatgagtgggacagacctctcgactataccaaaccgtcacgtctccgcgaggaagagcccgaagagtccgagcccgcagcccactctttcgccagctctgaggctgatgatcaggaagtttccgaggaaaatttcgaagagcggaagtaccctggcgaggtcactttaaccaacttcaagctgaaatttctctccaaggatatcaagaaggaactgctgacgtgcccaacgcccggttgtgatggatcagggcatatcaccggaaactacgcctctcataggagatgtcctaccccaggctgtgacggtagcgggcatataactggaaattacgcctctcatagatctctgtccggatgtccccgagccaaaaaatcgggtgtaaaggtggcaccaacaaaggacgacaaggaagatcctgagttgatgaagtacgtgggtccttgctggctatttcattgcatagcggaattacggttcagctgcgtgctgtag

SEQ ID NO: 231385 - DNA, 3447 bp, synthetic construct
  misc_feature 1..3447: note = Description of Artificial Sequence: Synthetic coding sequence
  source 1..3447: mol_type = other DNA
atgagcctcgaaaatgaggataaaagagctcggacgagaagcaaagccctgcggggaccaccagaaacaaccgctgctgacctatcttgcccaacacccggttgcactggaagcgggcacgtgcgaggtaaatatagccgacataggagcctgcagtcatgtccgctggctaaaaagagaaagctggagggtgccgaggccgaacatctggtgtcgaaacggaagagccacccactcaaactcgccttggatgagggatatggcgtggatagcgatggctcggaagacaccgaggtgaaagacgcctccgtgagcgacgaatctgagggcactctagaaggtgccgaggccgaaactagcggccaggacgagattcatcggcctgagacggcagaggggagatccccagtcaagtcccattttgggtctaatcccattgggtcagctacagcaagcagtaagggctcctacagctcttatcagggtattattgccactagtctgctcaatctcgggcagattgcggaggaaacacttgtcgaagaggacttagggcaggcagctaaacctgggccagggattgtccatctgttgcaggaggccgctgaaggtgcggcatccgaagaaggggagaagggcctgttcatccagcccgaagacgcggaagaggtggtcgaagtgacgactgaaagatcacaggatctatgcccccagtctttggaagacgccgcatcggaggaaagtagtaagcagaaggggatcctgagtcacgaggaggaagacgaagaggaggaagaggaggaggaggaagaagaagaagatgaggaagaagaagaggaggaagaggaagaggaagaggaagaggaagaagaggaagaggaagaggaggaggaagaagaggaggaagaggaagaagaggctgccccagatgtcatattccaggaagatacaagtcacacttccgcccaaaaagcccctgaactgcggggtccagaaagtccaagccccaagcctgaatattccgtcatcgtcgaggttcggtccgacgatgacaaagatgaagacacccacagccgtaagtcaacagtgaccgacgagtccgaaatgcaggatatgatgacccgcggaaacctcgggctcctcgaacaggctatcgccctgaaagccgagcaggtgcgaaccgtatgcgagcccggatgcccccctgccgagcagtcccagctgggactgggagaaccaggaaaggccgcaaaaccacttgacactgtgcggaaatcctattacagcaaggatccttcccgagcagagaaacgcgagatcaagtgtcccaccccgggttgcgacggcaccggccatgtaaccggactgtatccccatcaccgcagtctgtccggatgtccccataaagacaggattccccctgagatcctggccatgcatgagaacgtgctcaagtgtccaaccccgggatgtacaggacagggacacgtaaactcgaaccggaacacacataggtctctatccgggtgccccatagcagctgcggagaaactggccaagtcccatgaaaaacagcagccccagacaggcgacccatcaaaatcttccagtaactcagacagaattctgaggccaatgtgcttcgtgaagcagttggaggtgccgccatatggctcataccggccaaatgtcgcgcctgctacccctcgagccaatctagccaaggagcttgagaagttctctaaggttaccttcgattacgcgagtttcgacgcacaagttttcggaaaacgcatgttggcccctaagatccagacatcagaaacctctcccaaagcctttcagtctaagcctttccctaaggcctcttcaccacgccactccccttccagctcatacgtgcgatctaccagctccagctctgccggatttgattatagccaggatgccgaagccgcacatatggctgcgactgcgatcttgaacttgtccaccagatgctgggaaatgcccgaaaacctgagcactaaaccgcaagacctgccctccaaaagtgtcgatatcgaagtcgatgaaaatggtactctggacctgtctatgcataagcacaggaaaagggaaaatgccttccctagcagttctagctgtagctcatccccaggcgtcaagtctcccgatgcatctcaacggcattcttctacctctgccccttccagctcaatgactagcccacagtcctcgcaagcatcaagacaggacgagtgggatagaccactggactatacaaagccctctagactacgtgaggaggagcctgaggaaagcgagcccgcagcccactcatttgccagctcggaagcagacgatcaggaagtgtccgaggagaacttcgaggagcgaaaataccctggagaagtgaccctgacaaacttcaagctgaagttcctgtcgaaggacatcaaaaaggagcttcttacatgcccgaccccgggttgcgatggatcgggccatattactggaaattacgcatcgcaccgcagcttatcaggttgccctctcgccgacaaatctcttcggaatctcatggccgctcacagtgccgacctgaaatgcccgacaccagggtgcgatgggtcagggcatatcaccgggaactacgcttcccacagaagtttgagcggatgtcccagagcaaagaaaagtggagtgaaggtcgcgccaaccaaggacgataaggaggatcccgagctgatgaaatgtccagtgcccggatgtgtaggtttagggcacatcagcgggaagtatgcgagtcataggagcgcctctgggtgccctctggcagccagaagacagaaggagggttctctcaatggatcatcctttagctggaagagtctcaaaaatgagggccctacttgccctactcccggatgcgacgggtccggtcacgcaaatggatcctttttgacccatcggagtctgtcaggatgtcctcgagctacattcgctggaaagaaaggaaagttgtctggcgacgaagtcctgagccctaaattcaaaacttctgatgtcctagagaacgatgaggaaatcaagcagttaaaccaggaaatacgtgacctgaacgaatccaactcagagatggaggctgccatggtgcaacttcagagccaaatctcatctatggagaaaaacctgaaaaatattgaagaggagaacaagctgattgaggaacaaaacgaggctctgtttctggaactcagtgggctgtcccaggcactcattcagtcccttgccaacatcaggctccctcatatggaacctatctgcgaacagaattttgacgcgtatgtctcaactctgactgacatgtactcaaatcaggatccggagaataaagatcttctagagtctattaagcaggctgtcaggggcattcaagtctag

SEQ ID NO: 231386 - DNA, 3399 bp, synthetic construct
  misc_feature 1..3399: note = Description of Artificial Sequence: Synthetic coding sequence
  source 1..3399: mol_type = other DNA
atggaagtcgataccgaggaaaagcggcatcggacgcggagcaaaggggttagagtgccggtcgagcctgcgatccaagaacttttttcttgtcctacccccggatgcgatggatccggccatgtcagcggaaaatatgcccgacacaggagtgtgtatgggtgtcctcttgccaagaaacgcaagacgcaggataagcagccccaggagcctgccccaaagaggaaacctttcgccgtgaaagctgattcctcgtccgtggatgaatgtgacgactccgatggcacagaagatatggatgagaaggaggaagatgaggaagaggaagaagaggaagaagaagaaaatgaagaccaccaaatgaattgtcataacactcggatcatgcaggacacagagaaagacgacaacaataatgatgaatatgataattacgatgagctggtcgctaaaagcctgttgaacctggggaagattgcagaggatgctgcataccgggcacgaacggaatccgagatgaattctaacacatctaactcactggaggatgacagtgataagaacgagaatctcgggagaaaatccgagctgagtctggatcttgattcagacgttgtaagagagactgtcgactctttgaaactgctggctcaaggacacggcgtagttctgagcgagaacatgaacgaccggaactacgccgactctatgtctcagcaagattcacgcaacatgaactatgtcatgctcggaaagcctatgaacaacgggttgatggagaagatggttgaggaatctgatgaggaagtctgtttatcatctctagagtgcctcagaaatcaatgcttcgacctcgctcgcaaactgagtgaaactaacccccaggaacgcaatccacagcagaacatgaacatcagacagcatgttcgacctgaggaggactttccgggacgaacgcctgatcggaattatagtgatatgctgaatctcatgcggttggaagagcagctctctcctcggagtagggtctttgcgagctgtgccaaggaggatggttgtcatgagagagatgacgacaccacttctgttaatagcgaccgctcagaggaagtgttcgatatgactaagggtaacctcacactcttagagaaggccatcgcactagaaaccgagcgggcaaaagccatgagggagaagatggctatggaggcgggtaggcgagacaacatgcggtcttacgaggaccagtcccctcggcagttgccgggtgaagaccgcaaacccaaatcatccgattcccacgtgaagaagccctattacgacccatcacgcaccgagaaaaaggagagtaagtgtccgacacccggttgcgatggcactggacacgttacaggcctgtacccacatcaccggtcactgagcggttgtccacacaaggacagagtcccgcctgaaatcctggccatgcacgaaagtgtgcttaaatgccccactcccggatgcactggacgcggacacgtgaacagtaacaggaactcgcaccggagcctgtctggatgccccatcgccgctgctgaaaagttagctaaagcccaggagaaacaccagagctgtgacgtgagcaagagcagccaggcgtcagatcgggttctccgcccaatgtgttttgtgaagcagttagaaatcccacagtacggctacaggaacaacgtgcctacaacaactccacgatccaacctggcgaaagagctcgagaagtactcgaaaacgtcctttgaatataacagctacgacaaccatacttatggcaagagggctatagctcctaaggtgcagacgagagacattagccctaagggttatgatgacgcgaagcgctactgcaaagacccttctccaagcagcagctccacaagctcttacgccccatcatcttccagcaacctgagttgtggcggaggcagttcggcttctagtacttgttcaaagtcgagcttcgattatacccatgacatggaagcagctcatatggccgcaacagccatattaaatctcagcactcggtgccgcgagatgcctcagaacctgtcaaccaagccacaggacctgtgtgctacacgcaatcctgacatggaagtggatgaaaacggcacacttgatttgagcatgaacaagcagcggcctcgcgactcgtgctgtcctatcctgaccccccttgagccgatgtccccccagcagcaggctgtgatgaataatagatgttttcaactgggtgagggtgattgctgggacctgccagtcgactacacgaagatgaaaccgaggcgtatcgatgaagacgagtcaaaggacattactcccgaggacctagaccccttccaggaggccctggaggagcgcagatacccaggggaggtgaccattcccagtcccaaaccgaagtacccacagtgtaaggagagtaagaaggatcttattaccttgtccgggtgcccacttgcagataagtctatacggtcaatgctggctaccagcagccaggagcttaagtgtcccacacccggttgcgatggctccggacatatcactggtaattacgcctctcaccgatcgcttagcggttgcccaagagctaagaaaagcggaatcaggatcgcgcagagcaaggaagataaggaggaccaagagccaattcggtgcccagtgcccggatgtgatggccagggccacatcacaggtaagtatgcctcccataggtccgcctcaggttgcccgctcgcagccaaaaggcagaaagatgggtacctaaacgggtcgcaattttcatggaaatccgtgaagacagaggggatgtcatgtccgacccctggctgtgacgggagcggccatgtgagcggaagctttttgactcacagatccctctccggatgtccgagggctacctccgccatgaaaaaagccaaattgagcggggaacaaatgctaaccatcaagcaacgcgcttctaacggcattgaaaatgatgaagaaatcaagcagttggatgaggaaataaaagagttgaacgaaagtaactcccaaatggaggccgatatgatcaagctccgcacacagattacaactatggagtctaacttgaagactattgaggaagagaataaggtcatcgaacagcagaacgagtcattgcttcacgagctcgccaacctttcccagtccttgatccacagtctcgcgaacatccagcttcctcacatggacccaatcaacgagcagaatttcgacgcgtacgttactaccctcactgaaatgtatactaaccaggatcgataccagagtccagagaataaagccctactcgagaatattaagcaggcggtaaggggcatacaggtatag

SEQ ID NO: 231387 - DNA, 3561 bp, synthetic construct
  misc_feature 1..3561: note = Description of Artificial Sequence: Synthetic coding sequence
  source 1..3561: mol_type = other DNA
atggaagttgacactgaagagaagagacataggacacggtctaaaggggtacgagtgcccgtcgagcccgcaatccaggagctcttctcctgcccgacgcctggctgtgacggatccggtcacgtttctggaaagtacgctagacatagatcagtctacggttgtcccctcgccaagaagagaaaaacccaggataagcaacctcaggaaccggctcccaaacgcaagccgttcgcagttaaggccgattcctctagcgtggacgagtgcgacgattccgacggcaccgaggatatggacgagaaggaagaggatgagggggaagaatatagtgaggataacgacgaaccaggggatgaggacgaagaggatgaagagggtgaccgcgaagaggaagaggaaattgaagaggaggatgaggacgacgacgaggatggagaggacgtcgaagacgaggaggaagaggaggaggaagaggaagaagaggaggaggaagaagagaacgaggatcatcagatgaattgccataacactcggataatgcaggacacagaaaaggatgacaacaacaacgacgaatatgacaattatgacgaactcgttgcaaaatccttgttgaatttaggtaaaatcgccgaagatgctgcctaccgcgcaagaaccgaatctgagatgaatagcaacaccagtaatagcctggaggatgattccgataagaatgaaaatctgggaaggaaatctgagttatcgctggacttagatagcgacgtggtgagagaaaccgttgattccttgaagttattagcccaggggcacggagtggtgctcagcgagaacatgaatgataggaattacgctgacagcatgtcacagcaggattcaaggaacatgaactacgtgatgcttggtaagcctatgaacaatggacttatggaaaagatggttgaggagtcagatgaagaggtctgcttatcctcactcgagtgcctgcggaaccagtgttttgatctggctaggaagctgtctgagacaaaccctcaggaaaggaacccgcagcagaacatgaacatccgacagcatgtccggccagaagaagacttcccagggagaacccctgatcgcaattattcggacatgctcaacttgatgcgactcgaggagcaattatcacctcgcagtagggtgtttgcatcttgcgcaaaggaggacggttgccacgaaagggatgatgatactaccagtgtcaactccgaccgatcagaagaggtgttcgacatgacaaagggaaacttgaccctgcttgaaaaggctattgccctggagaccgagcgggctaaggccatgcgcgagaaaatggctatggaggctggcaggagggacaatatgaggagctacgaggatcaatcaccccgtcagctgccaggcgaagatcgcaagccaaagtccagcgactcacacgtgaaaaaaccatattacggcaaagatccgagccgtaccgagaagaaggagtccaagtgccctacgcctggttgtgacggcaccggccacgttaccggcctgtatccacatcacagatccctctccgggtgccctcacaaagatagagtgccccctgagatcctggctatgcacgaaagtgtcctaaaatgtccgacacctggatgtacggggagaggtcacgtgaactcaaacaggaattctcataggtcgttgagcggatgccctatcgcagccgcagagaaacttgcgaaagcccaggaaaaacatcagagctgcgacgtgtctaaatctagccaagcgtcagatagggtcttaagaccaatgtgcttcgtgaaacaactggagattccacaatatgggtaccgcaacaatgtcccgacaacaaccccaaggagcaatctggcaaaagagctcgagaaatatagtaagacctcgttcgagtataactcttacgacaatcacacttatgggaaacgagctattgcgccaaaggtgcaaacccgggatatatctcctaaaggatacgatgatgcgaaaagatactgcaaggatccttctccctcctcttcatcgacctctagctacgcaccatcatccagctctaacctgagttgtgggggtggctcctccgcatccagcacctgctcgaaaagcagctttgactacacccacgatatggaagccgctcatatggcagccacggccatcctgaacctgtctaccagatgtcgcgagatgccccagaacttgagcacaaagcctcaggacctgtgtgctaccaggaatcccgatatggaagtggacgaaaacggaacacttgacctttctatgaataagcagaggccgagggattcttgttgtcccattctgaccccactagaacctatgtctcctcagcaacaggccgtgatgaataataggtgctttcagctgggagagggggactgctgggacttaccggtcgactacacaaagatgaaaccccgaagaatcgacgaggatgaaagcaaagacatcacacccgaagatctggacccgtttcaagaggcccttgaggagcgccgataccccggagaggtgaccatcccttctccgaaacccaagtaccctcagtgtaaagagagcaagaaggatctcatcacactgagtgggtgcccgctcgccgataaatctatcagatccatgctcgctactagctctcaggagctcaagtgtccaacccccggttgcgatggatccggacatatcaccggcaactatgcaagtcacaggagcttgtcaggttgcccccgagcgaaaaaatccggaatccgtatagcacagtccaaggaggacaaggaagaccaagagcctataaggtgtccagtcccaggatgtgacgggcagggccatatcaccgggaagtacgcgtctcaccggagcgcatctggctgccccctggcagccaaacgacagaaagacggctatctgaatgggtctcagttctcatggaagtccgtgaaaactgagggtatgtcttgccctacacctggatgcgatggttcaggtcatgtgtccgggagcttcctgactcatcgaagcctgagcggctgtcctagagctacctctgccatgaaaaaagccaaacttagcggcgaacagatgcttaccattaaacagcgcgcttctaacgggattgagaacgatgaagaaatcaagcagctggatgaggagattaaagagctcaatgagtccaactctcaaatggaagccgatatgatcaaactacgcacccaaatcaccactatggagtcaaacttgaagactattgaagaggaaaataaggtgatcgaacaacagaatgagtccctgctgcacgaactggcgaatctgtctcagtctctgatccacagcctagccaacatacaactgccacatatggatccgatcaacgagcaaaactttgatgcatacgtaaccacccttacagagatgtacacaaaccaagatagataccagagtcctgagaataaagcactcctggagaacatcaagcaagccgtgcggggtatccaggtgtag

SEQ ID NO: 231388 - DNA, 555 bp, synthetic construct
  misc_feature 1..555: note = Description of Artificial Sequence: Synthetic coding sequence
  source 1..555: mol_type = other DNA
atgtcatgccctactcctgggtgtgacggctcaggccatgtttctggctcatttttgacccataggtcactctcaggatgccctagggctactagtgctatgaagaaggccaagctgagtggagagcaaatgctgaccattaagcagcgggcaagcaacggaattgaaaacgacgaagaaataaagcagttagacgaagaaataaaggagcttaatgagtctaacagtcagatggaagcagacatgatcaaactgcgaacacaggtcactatcactaccatggagagtaacctcaaaacgatagaggaagaaaataaagtcatcgaacagcagaatgagagtttactccatgagctcgccaatctgtcgcagtcactgatccactctttggctaacatccagctaccccatatggaccctattaatgaacaaaattttgatgcctatgtcactacacttacggagatgtacacaaaccaggataggtaccaatcccccgagaacaaagctttacttgagaacatcaagcaagccgttcgcggtatccaggtgtag

SEQ ID NO: 231389 - DNA, 3555 bp, synthetic construct
  misc_feature 1..3555: note = Description of Artificial Sequence: Synthetic coding sequence
  source 1..3555: mol_type = other DNA
atggaggtcgacacagaagagaaacgacaccgcactaggagtaagggagtcagggtccctgttgaaccagctattcaggagcttttctcctgtccaacacctggctgcgatggctcgggccacgttagcggcaagtacgcgcgacataggagcgtgtatggatgtccccttgccaaaaagagaaagactcaggacaaacaaccacaggagccagcccctaagaggaagccctttgccgtcaaggccgacagctccagcgtggacgagtgtgacgacagcgacggaactgaggatatggatgagaaagaggaagacgagggcgaggagtactccgaagataacgacgaaccaggggatgaggatgaggaagacgaggagggggaccgcgaggaagaggaggagattgaggaagaggatgaggatgatgacgaggacggggaggatgtggaagacgaggaagaggaagaggaggaggaggaggaggaagaggaggaagaggagaatgaggaccaccagatgaattgccacaacacccggattatgcaggacactgaaaaggacgataataacaacgacgagtacgacaactatgatgagctggttgccaagagcctgctgaatctggggaagatcgcagaggacgccgcttatagagccaggaccgagtctgaaatgaacagtaacactagcaatagtctggaagacgactcagacaaaaacgaaaatctgggtaggaaaagcgaactgtctcttgaccttgattcggacgtggtccgcgagaccgtggactcattaaaactactggctcagggacatggcgtggtgctgtccgagaatatgaacgaccgaaattacgccgactctatgtctcaacaggattcccgcaatatgaactatgtgatgcttgggaaacccatgaacaatggactcatggagaagatggtcgaggaatcagacgaggaagtttgtctgtcctctctcgagtgcttgcgcaaccagtgttttgaccttgcacgcaaactcagtgagaccaatcctcaggagcgtaacccccagcagaacatgaatattcgccagcatgtacgaccagaagaggactttcccggtcggacccccgaccggaactattccgatatgcttaacctcatgcggctggaggagcagttgtcacctcggtcccgggtctttgccagttgcgcaaaggaagacggatgccacgagcgagatgatgacaccacatctgtgaacagcgatagatcagaggaagttttcgatatgaccaagggcaacctaactctgctagagaaagctattgcattagaaacagagcgtgctaaagctatgcgggagaagatggcaatggaggcagggcgtcgggacaatatgaggagttacgaggatcagtccccccgtcagttaccaggtgaagaccgaaagccaaagtcttcagacagtcacgtcaagaaaccatattacgacccgagtcggaccgaaaagaaagagagcaaatgccctacgcctggctgtgacggtactgggcacgtgacaggtctttacccccaccatcgaagcctttcgggctgccctcataaagaccgggtgcctcccgagatcctggcgatgcacgagtccgttctgaagtgcccaacacccggatgcaccggccgtggtcacgtgaattccaataggaattcacacaggtcattaagcgggtgtccgattgcagccgcagagaaactggccaaggctcaggagaaacaccagtcttgtgatgtctccaagtcatcacaggcttctgaccgtgttcttcgtcctatgtgtttcgtgaaacagctggagattccacagtacggttatagaaacaacgttccaactacaacacctaggagcaatctggccaaagagctagagaaatactccaaaacctcttttgagtataacagttacgacaaccatacctacggcaaacgagccatcgcccctaaagtgcagacaagagacatctcccccaaagggtatgatgatgcaaagagatactgtaaagacccctctccatcctcttcttctacgtcttcatatgctcctagctcctcttctaaccttagttgcggagggggtagttcagcatcgagcacctgttctaagtcatccttcgattacactcatgatatggaggctgcccacatggcagccaccgccattcttaatctgagtactaggtgtcgagaaatgcctcaaaatctctcgacaaagccacaggatttatgtgccaccaggaacccggatatggaggtcgacgaaaatggtacactggatttgtcaatgaacaagcagcggccacgggacagttgctgccctattctgacgcctcttgagcctatgtccccacagcagcaggcagtgatgaacaacagatgcttccagctcggcgagggcgactgctgggaccttcccgtcgactataccaaaatgaaaccaagacgaattgacgaggacgagagcaaagatattaccccagaagatttagatccctttcaggaagcactggaagagcggagataccccggtgaagtgacaataccatcccctaagccaaaatatccccaatgcaaagagagcaagaaggatctgattacactttcgggctgtcctttggctgacaagagtatcagaagcatgctggccacctccagtcaggagctgaagtgtccaacgccagggtgcgatgggagcggtcatattacgggtaattatgcctctcaccgtagtttgagcgggtgtcctcgggcaaagaagtcggggattcggattgctcagagcaaagaggataaggaagatcaggaacctatacgttgtccagttcccggttgcgacggccaggggcacatcacaggaaagtatgctagtcatcgcagtgcctcgggctgcccgctggccgcaaagcgacaaaaagatgggtacctcaatggctcccagttctcttggaagagcgtcaaaaccgaaggtatgtcttgtcccactccaggatgcgacggctccgggcatgtctctggaagctttctgacacaccggagcttatcaggctgtccacgggctacctccgcgatgaagaaagcaaaactaagtggagagcaaatgcttaccattaagcagcgagccagcaacggcatagagaatgacgaagaaatcaaacagctcgacgaagaaatcaaagaactgaacgaaagcaatagccagatggaggctgatatgatcaagttaagaacccagattacaaccatggagtccaatctgaaaacaatcgaagaggagaataaagtcatcgagcagcagaatgagagtctcctgcacgagctggcaaatcttagtcagagcctcatccacagtctggccaatatccagctccctcacatggatcccataaatgaacagaacttcgatgcgtacgtgaccacgctaacagagatgtatacgaatcaagacaggtaccaaagcccggagaataaagccctgctcgagaatatcaagcaggccgtgagagggatccaagtctag

SEQ ID NO: 231390 - DNA, 552 bp, synthetic construct
  misc_feature 1..552: note = Description of Artificial Sequence: Synthetic coding sequence
  source 1..552: mol_type = other DNA
atgagccagaaacctgctaaagagggcccacggctttcaaaaaaccagaagtactccgaacacttttcaatccactgttgtcctccctttacatttctcaattctaagaaagagatagtagacagaaaatactccatatgcaagtctgggtgtttctaccaaaagaaggaggaggactggatttgctgcgcctgccaaaagaccaggacctcccgcagggctaagagtccccaacgtcccaagcagcagcccgctgccccacccgcagtagtgcgggcaccggctaagcctcggtcccctcctcgaagcgaacggcagccacgctctccccctagatccgagagacagcctagatcgcctcctcgatctgaaagacagcctcggagtccaccaaggtccgaaaggcaacctcgcccaagacccgaggtcagaccacctcctgctaagcagcggccacctcagaagtcaaagcagcaaccacggagtagtccactgagaggccctggggcttcacgaggtggctcccctgttaaagcatccaggttttggtag

SEQ ID NO: 231391 - DNA, 246 bp, synthetic construct
  misc_feature 1..246: note = Description of Artificial Sequence: Synthetic coding sequence
  source 1..246: mol_type = other DNA
atgagccaaaaacccgctaaggaaggcccacggctgtcgaagaaccagaaatattccgaacacttttctattcattgctgcccccctttcaccttcttaaactcgaagaaggaaatcgtagaccgcaaatactcgatctgtaaatcggggtgcttttaccagaaaaaggaggaggactggatatgttgtgcatgccagaagacgcgcctgaagaggaagattcggcctacaccgaaaaaaaagtag

SEQ ID NO: 231392 - DNA, 246 bp, synthetic construct
  misc_feature 1..246: note = Description of Artificial Sequence: Synthetic coding sequence
  source 1..246: mol_type = other DNA
atgagtcaaaagccggctaaggaaggtccacgcttgtctaagaaccagaaatatagtgaacactttagcattcactgctgtccaccgtttacctttcttaattctaagaaagaaatagtagatcgtaaatattcgatatgcaaatcagggtgtttttaccagaaaaaggaagaggactggatctgttgtgcttgccagaagacgcgcctcaaaagaaaaataaggcccacgcctaaaaaaaagtag

SEQ ID NO: 231393 - DNA, 246 bp, synthetic construct
  misc_feature 1..246: note = Description of Artificial Sequence: Synthetic coding sequence
  source 1..246: mol_type = other DNA
atgtcacaaaagcccgcaaaggaaggccctagacttagtaagaatcagaaatactcggagcacttcagcatccactgttgccctccattcacctttttgaattccaagaaagagattgttgatagaaaatacagtatctgcaaaagcggctgcttctaccagaagaaggaggaagactggatttgctgtgcctgccaaaagacacgtttaaaacgaaagattcgacctacccctaagaagaagtag

SEQ ID NO: 231394 - DNA, 552 bp, synthetic construct
  misc_feature 1..552: note = Description of Artificial Sequence: Synthetic coding sequence
  source 1..552: mol_type = other DNA
atgtctcaaaaaccagccaaggaggggccaagattgagtaaaaaccagaaatactctgaacactttagcatccattgttgcccaccattcaccttcctaaactccaaaaaagagatcgttgatcggaagtattccatctgtaagtcaggctgtttttatcaaaaaaaggaagaggactggatctgctgcgcttgtcagaaaaccaggacgtctagacgcgctaaatccccgcagcgtcccaaacagcagcctgccgcaccaccagctgtggtccgcgctccagccaagccccgttctcctccccgttcagaacgccaacccaggtctccccctcgaagcgaaaggcaaccacggagcccaccccgttctgaaaggcagccacgttccccaccccgaagcgaaagacagcccaggccccgtcctgaggtgcgtcctcctcccgcaaaacagcgtccccctcaaaaatctaaacagcagcctcgttcctcaccgctccgcggtcccggtgcttcaaggggagggagtcccgttaaagcctctcgattttggtag

SEQ ID NO: 231395 - DNA, 552 bp, synthetic construct
  misc_feature 1..552: note = Description of Artificial Sequence: Synthetic coding sequence
  source 1..552: mol_type = other DNA
atgtcacagaaaccggctaaggagggaccacgcctgtctaaaaaccaaaaatactccgagcacttctccattcactgctgccccccatttaccttccttaacagtaagaaagaaattgtagatcggaaatacagcatctgcaagtctggctgtttttatcagaaaaaagaggaggattggatttgttgtgcctgccagaagacaaggactagccgcagagccaaatcccctcagagacccaaacagcagccagccgctcccccagccgtggtgagggcccctgcaaagcctaggagcccccctcgtagcgagcgacaaccgcgaagccctccaaggtccgagcggcagccacggtcaccaccgcgatccgagcggcagcctcgttctccacctcggtctgagcgccagccaaggcctaggcctgaggtacgcccacctccagcgaagcagcgccctcctcaaaagagcaaacagcaacctcgttcatcccccctcagaggcccaggagcgagccgcggaggaagccccgtcaaagctagccggttctggtag

SEQ ID NO: 231396 - DNA, 246 bp, synthetic construct
  misc_feature 1..246: note = Description of Artificial Sequence: Synthetic coding sequence
  source 1..246: mol_type = other DNA
atgtcccaaaagcctgcgaaagagggccctcgcctgtctaagaaccagaagtactcagaacacttttccattcattgctgtcctcctttcacctttttgaatagcaaaaaggagatagtggacagaaagtattctatctgcaaaagcggctgcttctaccaaaagaaggaagaagactggatctgctgtgcttgccagaaaacccgtcttaaaaggaagatacgtccgacacctaaaaagaagtag

SEQ ID NO: 231397 - DNA, 552 bp, synthetic construct
  misc_feature 1..552: note = Description of Artificial Sequence: Synthetic coding sequence
  source 1..552: mol_type = other DNA
atgagccagaaacctgctaaggagggtccacggctgtctaagaatcagaagtactcggagcatttttccattcattgttgtccacctttcacattcctgaacagcaagaaggagatcgtggatcgcaagtatagtatttgtaagtcagggtgcttttaccaaaagaaagaggaagactggatatgttgtgcgtgccagaagactagaacgagtaggcgggcaaagagcccccaacgcccaaagcagcaaccggctgcaccacctgccgtcgtccgcgcaccagcaaagcctagatctccgccacgaagcgaaagacaacctcggtcaccccctcgtagcgagcgacagccacgatcaccacccagaagtgaaagacaacctcgtagcccccctagaagtgaacgccagccccgaccgaggcctgaagtcaggccccctcctgccaaacagcgcccaccgcagaagagcaagcagcaacctagatcatcccccctgagggggcctggagcttctaggggaggctcaccggttaaggcttcccggttttggtag

SEQ ID NO: 231398 - DNA, 246 bp, synthetic construct
  misc_feature 1..246: note = Description of Artificial Sequence: Synthetic coding sequence
  source 1..246: mol_type = other DNA
atgtcccagaaacccgctaaggagggcccacggctatccaagaaccagaaatattctgaacatttctcaatccattgttgtcccccattcacatttctaaatagcaagaaggaaatcgttgatcggaaatactctatatgcaaatccggttgtttctaccagaaaaaggaagaggattggatttgttgtgcctgccagaagacccgcttaaaacgcaaaatccggccaactcctaaaaaaaagtag

SEQ ID NO: 231399 - DNA, 177 bp, synthetic construct
  misc_feature 1..177: note = Description of Artificial Sequence: Synthetic coding sequence
  source 1..177: mol_type = other DNA
atgagtcagaagccggctaaagaaggtcctcggctgtctaaaaaccagaagtattccgagcacttcagtattcactgttgtcctccctttacttttctgaacagcaaaaaggagatagtcgaccgcaagtattctatatgtaaaagcgggtgtttttatcaaaagaaggaagagtag

SEQ ID NO: 231400 - DNA, 423 bp, synthetic construct
  misc_feature 1..423: note = Description of Artificial Sequence: Synthetic coding sequence
  source 1..423: mol_type = other DNA
atgctacaggccgcagactttatagagcggacagagacggcgggagagctctctcggggactgattggagtgctgtctagccagatttcatggtgcctgctgaacgtgaacctgtcaaaactgcctactcgcttgcaacgcctcagttgttcagtgctaaattcaagtcccgctatgcggggaggcgcaagagggagaccgcagctgacattggagagacctctgcgtcctggatgccggttgcattcatgtagcgaggcagagaaggggggatttgtccgtcgtaaagagatcatactgttcccaccttgcgaggatccagcgcgagggtggctgtctgcaaatccagggagagagccatcccctggaatctgttggcacctcaatctaggactgccttccctgcacaattgtgaggagtag

SEQ ID NO: 231401 - DNA, 816 bp, synthetic construct
  misc_feature 1..816: note = Description of Artificial Sequence: Synthetic coding sequence
  source 1..816: mol_type = other DNA
atgtttggtctcaagagaaacgcggtaattggcctcaatttgtattgcgggggagcaggcttgggtgctggctccggcggtgccacaagacccggtggtcgtctgctggccaccgaaaaagaggctagcgccagaagggaaatcgggggaggggaagcgggagcagtaattggcggaagtgccggagccagcccaccatctactctgacccctgactctcgtagggtggccagacctccgcctataggcgcagaggtacccgacgtgaccgccacgcccgctagactactgttcttcgccccaacaaggagggctgccccactcgaggagatggaagcacctgcagctgatgctataatgtccccggaggaggaactggacggttatgagccagagccattggggaaaagacctgcagttctacccctgctggagctggtcggagagtctggaaataacacttcaacagacggctcactgccgagcacccctcccccagccgaagaagaggaagacgaactgtacagacagtccttggagatcatcagtagatatctgcgcgagcaagccaccggcgctaaggacactaagcccatgggccgtagtggcgcaaccagccgcaaggctttagaaacactgagacgagtcggtgacggcgttcagcggaatcacgagaccgcattccagggctgggtgtgcggggtgttgccatgtcgcggtccacggagatggcatcaggaatgcgcggctggtttttgccggtgttgttggtccagatcatggttcggcatctccaacaaaatcgcactcttgtag

SEQ ID NO: 231402 - DNA, 1053 bp, synthetic construct
  misc_feature 1..1053: note = Description of Artificial Sequence: Synthetic coding sequence
  source 1..1053: mol_type = other DNA
atgttcggcctgaagagaaatgccgtgatcggactgaacctgtactgcggaggcgcagggctgggcgctggatcgggaggagcgacacgccctggcggtcgactcctggctaccgaaaaagaggctagcgccagacgggaaatcggcggaggggaggctggcgctgtaattgggggatccgcgggtgcctctcctccttcaacactgaccccagacagccggagggtggcacgacccccacccattggtgccgaggtacctgatgtgacagctactcctgctaggctgcttttctttgctccaacacgcagagccgctccccttgaggaaatggaagcacccgcagcagacgctattatgtcccctgaagaagaattggatgggtacgagccagagcccctcggaaaacgacctgcggtgttgcccctcctggaattggttggcgaaagtggcaataatacctcgaccgacggatcgttgccaagcactccaccacccgcagaggaagaagaagatgagctgtaccggcaatctctggagatcatatctcgatacttgcgagaacaggcaaccggagcgaaggacacgaagccaatgggcagaagcggcgctacgagccgcaaagcattggagaccctgcggcgagtcggagatggcgttcagaggaaccacgagacggcctttcaggggatgctccgcaaactggatataaaaaacgaggacgacgtgaagtcgctaagtagggtgatgattcacgtgttctccgacggagtgactaattggggcagaatagtcaccctcatctcgttcggcgcattcgttgcgaagcatctcaagactattaaccaggaatcatgtattgaaccgctggcggaaagtatcacagatgtgctcgtgagaaccaagagagattggctggtgaagcagaggggctgggatggcttcgtggagtttttccacgtagaggacctcgagggagggatcaggaacgttctcctcgccttcgcaggtgtggccggagtaggggcaggactcgcctaccttattcgatag

SEQ ID NO: 231403 - DNA, 840 bp, synthetic construct
  misc_feature 1..840: note = Description of Artificial Sequence: Synthetic coding sequence
  source 1..840: mol_type = other DNA
atgttcggtctgaagagaaatgctgtgattggcctgaacctgtactgtgggggtgccggactaggcgctggatcagggggagctacgaggcctggcggtaggcttctggcgactgaaatggaagcccctgcagctgatgccattatgtcaccagaggaagagctggatggctacgagcccgaaccactgggaaagcggcctgcagtactccccctacttgagcttgtcggtgagagcggaaacaacacttctactgacggcagtcttccgagtacgcctccacccgcagaggaggaggaggatgaactgtatcggcagtccctcgaaatcattagccggtatcttagggaacaggcaaccggtgcaaaagacaccaagcccatgggcagatccggggctacaagccgcaaagccctagagactcttagacgcgtgggggacggggtccagaggaatcatgagaccgctttccaggggatgttacgaaaattggatatcaaaaatgaagacgacgtgaagagcttgtcaagggtcatgatccatgtcttttccgacggagttacgaactggggcaggatagttaccttaatatccttcggggctttcgtggctaagcacctcaagaccatcaaccaggaatcatgcattgagccacttgcggaatctataactgatgtgctggtccgcaccaagcgggattggttagttaaacagagaggctgggacggctttgtggagttttttcatgtcgaggacctagaagggggtatacggaacgtactgctggctttcgccggagttgccggagttggggcaggattagcgtatctcatcaggtag

SEQ ID NO: 231404 - DNA, 1224 bp, synthetic construct
  misc_feature 1..1224: note = Description of Artificial Sequence: Synthetic coding sequence
  source 1..1224: mol_type = other DNA
atggtgaatgagtataagaaaattctgctgctcaaggggttcgagctgatggatgactatcatttcaccagcataaagtcactcctggcctacgatctgggcttgaccacaaagatgcaggaagagtacaataggattaaaatcacagacctgatggaaaaaaaattccagggagtggcctgtttagacaagctgatcgagcttgctaaggacatgccaagcctgaaaaatctggtcaacaatctgaggaaggagaaaagcaaggtggctaagaagataaaaacgcaagagaaggccccagtgaagaaaataaatcaggaagaagtgggtcttgcggctccggcacctactgcgaggaataagctaacgtccgaggctagaggccgtatcccagtggcacaaaagcgaaagacccctaataaagaaaagacagaggcaaagcgcaataaggtgagtcaagagcaaagcaagccccctggaccatcgggcgcatcgacaagtgccgctgtggatcatcccccactgccacagacaagctcgagtactcccagtaacacatcctttaccccaaaccaggagactcaggcccaacggcaggtggacgcccgacggaacgtgccccagaacgacccagtgactgtggtagttttgaaggctaccgcgccatttaagtacgagagccccgagaacggtaagtctacaatgttccacgccactgtggccagtaagacccagtatttccatgtgaaagttttcgacattaacctgaaagagaaatttgtgagaaagaaggtaattacgatttctgactatagcgaatgcaaaggggtcatggagattaaggaagcatcctcggtctccgactttaatcagaatttcgaggtcccgaacaggataatcgagattgccaacaagacccccaaaatatctcagctgtataagcaggccagcgggaccatggtatatggtctgttcatgttgcagaagaagtcagtccacaagaagaacacgatttatgagatccaagacaacacaggcagcatggatgtagtgggatcggggaagtggcataacattaaatgcgagaaaggggacaagctaagactgttctgcctgcagctccgcacagtggaccggaaacttaaactggtgtgtggaagccattcattcattaaggtgattaaggcaaaaaaaaataaggaaggacctatgaatgtgaattag

SEQ ID NO: 231405 - DNA, 315 bp, synthetic construct
  misc_feature 1..315: note = Description of Artificial Sequence: Synthetic coding sequence
  source 1..315: mol_type = other DNA
tagccaaaccggattattgaaattgcaaacaaaactccaaagatcagtcagttgtacaaacaggcctccgggacaatggtgtacggcctctttatgttgcagaaaaaaagtgtccataagaaaaatacaatatacgaaatccaagacaacaccggtagtatggatgtggtgggcagcggtaagtggcacaacatcaagtgtgaaaagggggacaaactaaggcttttctgtcttcagctccgcacagtggaccggaagttaaagttagtgatcaaggcaaaaaagaataaagagggaccgatgaatgtgaattag

SEQ ID NO: 231406 - DNA, 795 bp, synthetic construct
  misc_feature 1..795: note = Description of Artificial Sequence: Synthetic coding sequence
  source 1..795: mol_type = other DNA
atgcgtccggatagagccgaggcccctggccctcctgccatggccgcaggtggacctggagccggtagcgccgctcctgtgtcttccaccagcagtcttccattggctgctttgaatatgagagttagaaggcgacttagcctgtttctcaacgtcaggactcaagtggctgccgattggacagccctcgctgaggagatggactttgaatatctggagattcggcagttggaaacccaggctgaccccactgggcgacttctcgacgcctggcagggtagaccaggcgcttctgtaggaagactgctcgaactcctgactaaactggggagagatgacgtcttgctggagctggggccaagcattggtcacatgccagaaaggtttgacgccttcatttgctattgtcccagtgacattcagttcgtgcaggaaatgataaggcagttggaacaaacgaattataggcttaaactttgcgtgagtgatcgggatgtgctcccgggaacctgtgtgtggtcaattgcaagcgagctcatagagaagcgctgccggaggatggtggtggtagttagtgatgactacctgcagtctaaggagtgtgatttccagaccaagttcgctctctccttatctcctggagctcaccagaaaaggctcataccaataaaatataaggcgatgaaaaaggagtttccatcaatcctcagatttattacagtctgtgattacactaacccatgtaccaagtcctggttttggactaggctcgctaaggcgctgagtctcccctag

SEQ ID NO: 231407 - DNA, 615 bp, synthetic construct
  misc_feature 1..615: note = Description of Artificial Sequence: Synthetic coding sequence
  source 1..615: mol_type = other DNA
atgcgtcctgaccgggcagaagcccctgggcctccggcaatggccgctggtggcccaggagcaggctccgccgcacccgtgagctcaaccagctctttgcccctggccgcattgaacatgagagtccgcaggcgactgagcttattcctgaacgtgcgcacccaggtagccgcagattggactgcgcttgctgaagagatggatttcgaatacctggagattaggcagctcgagactcaggcagatccaaccgggagactgttagatgcgtggcaagggagacctggtgcctcagtgggcaggttgttggagctgctgaccaaacttggcagagacgatgtgttactggaattgggcccttctatcgaagaggattgtcagaagtacatactgaagcagcaacaggaggaggcagagaaacctctgcaagttgctgcagtcgatagtagtgtacccagaacagccgaacttgccggaatcactacactggatgatcctctgggtgcagccggatggtggtggttgtctttgatgatcacatgcagagccaggaatgtaacatctcggccaaacctccactcggctagtctgcaggtgccgataagaagcgattag

SEQ ID NO: 231408 - DNA, 480 bp, synthetic construct
  misc_feature 1..480: note = Description of Artificial Sequence: Synthetic coding sequence
  source 1..480: mol_type = other DNA
atgcgacctgaccgtgccgaggccccaggacctccggcaatggcggctgggggaccaggtgccggatctgcggctcctgttagttctacctcatcattgccgctggcagctctcaacatgcgtgtaagacgccgactatctctattcctgaatgtccgcacgcaggttgcagcagactggactgcactggccgaggaaatggacttcgagtatctggagatccggcagcttgaaacacaggccgaccctactggtcgccttctggatgcatggcaggggaggcccggagcaagcgtcggccgtctgctcgagctgcttactaagttaggtcgcgacgatgtgcttttagagctgggtccatcaataggggcagcgggttggtggtggctgtccttgatgatcacgtgcagagcacgcaacgtgacctctcgacctaacctgcattccgcctccctgcaggtgcccatccgcagcgattag

SEQ ID NO: 231409 - DNA, 807 bp, synthetic construct
  misc_feature 1..807: note = Description of Artificial Sequence: Synthetic coding sequence
  source 1..807: mol_type = other DNA
atgtttcggatgcttaacagtagcttcgaggatgatccatttttctctgagtcaatcctggcacacagagaaaatatgcgccagatgatcagaagcttttcggagcctttcggtagggacctcctttcaatctccgatggtcgcggacgcgcacataacaggcgagggcacaacgacggggaggattctttgacacacaccgacgtgtccagttttcagacgatggatcaaatggtgtctaatatgaggaactatatgcagaaactcgagcggaatttcgggcaactgagtgtcgacccaaacggacactcattctgttccagttctgtcatgacctatagcaaaattggcgatgaacctccgaaagtgttccaagcatctacccagacacgcagggccccaggcggtatcaaagagacaaggaaggccatgcgcgactctgatagtggcctggaaaagatggcgattggacaccacatccatgaccgagcccatgtcatcaaaaaaagtaaaaacaaaaagacgggcgacgaagaggtgaatcaagagttcattaatatgaacgaaagcgatgcccatgcttttgacgaagagtggcagtcagaagtcttaaaatacaaaccaggacggcacaacctgggcaacactcgtatgaggagcgtggggcacgagaatccgggatcaagagaactgaagcgtagggagaagccccagcagagcccagccatcgagcacgggcgacgctctaatgttcttggggataaactccacataaagggaagtagtgtcaaaagcaacaagaaatag

SEQ ID NO: 231410 - DNA, 732 bp, synthetic construct
  misc_feature 1..732: note = Description of Artificial Sequence: Synthetic coding sequence
  source 1..732: mol_type = other DNA
atgaggcaaatgattaggtcattttccgaaccctttggcagggatctgctgagcatttctgatggaagggggagggcccataaccgcagaggccataatgacggggaagactcacttactcatactgacgtatcatcttttcagacgatggatcagatggtgagcaatatgaggaattatatgcagaaactcgagcggaatttcgggcagctgtccgttgatccaaacgggcactccttttgcagcagctcggtcatgacatatagtaagatcggagacgagcccccaaaagtgttccaggccagcacccagaccaggcgcgcacccggagggattaaagagaccaggaaggccatgcgcgacagcgattctggccttgagaaaatggctatcgggcatcatatacatgatcgggcacacgtgatcaagaagagcaagaataagaagaccggagatgaggaagtgaatcaggagttcatcaacatgaatgagtcggatgcacatgcgttcgatgaagagtggcagtcagaagttctgaagtataaaccaggcagacacaatctcggcaatacacgcatgcggagtgtaggccacgagaaccctggaagcagagagctgaagcgccgagagaagcctcagcagagccctgctattgagcacggtaggcggagtaatgtgcttggggataagctgcacatcaaagggagtagtgttaagtctaacaagaaatag

SEQ ID NO: 231411 - DNA, 900 bp, synthetic construct
  misc_feature 1..900: note = Description of Artificial Sequence: Synthetic coding sequence
  source 1..900: mol_type = other DNA
atgctcaaggaggtgttgcagcgagaaggtaagtcctataagagtgaaacacttatgtacattaaaaaggccagagccagtgaaaataagctctcggagtcgatcttggcacacagggagaatatgcgacagatgatccggagtttctccgagccttttgggcgagatctgttaagtatctctgatggacggggaagggcacacaataggcgcggacataacgatggagaagattcactgactgccacaagttgcagcctggtgccctttggggactttgggggaatgcacaccgacgtttcttccttccagacaatggaccagatggtatctaatatgcgtaactatatgcagaagctggagcggaattttggacagctgtctgtggatcctaatgggcactcattttgcagctctagcgtcatgacatactccaagatcggagacgaaccccctaaggttttccaagcatcaacgcaaactcgcagagcccctgggggtatcaaagagacgaggaaagcaatgcgtgatagcgacagtggactggagaagatggcaatcgggcaccacatacacgatagagctcatgttattaagaagagcaaaaataagaaaacaggagatgaggaagttaatcaagaattcattaacatgaatgagtctgatgcccacgcctttgacgaagaatggcagtctgaggtcctgaaatacaagcctggacggcataaccttgggaatacccgcatgagaagtgtcggccatgagaatccaggctcgcgggagctcaaacgcagggagaaaccccagcagagccccgcaatcgagcacggacgcagatctaacgttctcggggataaactccatataaagggatcttctgtgaagtccaacaaaaaatag

SEQ ID NO: 231412 - DNA, 777 bp, synthetic construct
  misc_feature 1..777: note = Description of Artificial Sequence: Synthetic coding sequence
  source 1..777: mol_type = other DNA
atgagacagatgatccggtccttctctgaaccctttggcagagatctgctgagtatctccgacgggaggggccgtgcccataatcgaagaggtcataacgacggtgaggatagcctgaccgctaccagttgctctttagtgccatttggcgattttggaggaatgcataccgacgtctcatctttccagaccatggaccagatggttagcaacatgcgaaactatatgcagaagctcgaacggaatttcgggcagctctccgtcgacccaaatggtcattcgttttgtagctccagcgtgatgacttattctaagattggcgatgagccccctaaagtgtttcaagcttcaacccagaccagacgcgcacccggtggcattaaagagacacggaaagcaatgcgcgactcagatagcggtctggaaaaaatggccattgggcatcacattcacgacagggctcacgtaataaagaagtccaaaaacaagaagactggcgatgaagaggttaatcaggagtttatcaatatgaacgaaagcgacgcacatgcattcgacgaggagtggcagtctgaggtcctgaagtacaagcccggtcggcataacctgggaaatactcgcatgcgctcagtgggacatgagaaccccggatccagagagctgaagcggagagagaagccacagcaaagtcctgcaatcgaacacggtcggagatccaacgtcctgggggataagctgcacatcaagggatcctccgttaagtcaaataaaaaatag

SEQ ID NO: 231413 - DNA, 777 bp, synthetic construct
  misc_feature 1..777: note = Description of Artificial Sequence: Synthetic coding sequence
  source 1..777: mol_type = other DNA
atgagacagatgattagatccttctcagagccatttggaagggacctcctcagcatctctgatgggagaggccgtgcacataaccgcagaggtcacaatgacggagaagactctctgacggcgacgtcttgttccctggtgccttttggtgactttggaggaatgcatacggacgtgagttcctttcagactatggaccagatggtgtccaatatgcggaactacatgcagaagctcgaacgaaatttcggacagctgagcgtcgaccccaacggacattctttttgcagcagttctgtaatgacttattcaaaaataggggatgagcctcccaaggtgtttcaagcatccacacagacaagacgagcacccggtggaatcaaagagacacggaaggctatgagggattccgatagcgggctagagaagatggcaattggtcaccacattcacgaccgagctcatgtgataaaaaaatccaagaataaaaagacaggagatgaagaggtgaaccaagagtttataaacatgaacgagagcgacgcccacgcattcgacgaagagtggcagtccgaggtgctcaaatacaaacctggcagacataacctcggaaacactaggatgcggtctgtgggccatgaaaatccaggcagcagggaactcaaaagacgagagaagccacaacagtcccctgcaattgagcatggacgcaggagcaatgtgttaggagacaaactccacataaaaggtagctccgtcaaatctaacaagaaatag

SEQ ID NO: 231414 - DNA, 732 bp, synthetic construct
  misc_feature 1..732: note = Description of Artificial Sequence: Synthetic coding sequence
  source 1..732: mol_type = other DNA
atgcgccagatgattcggtcattctcggagcctttcgggagggacctcctgtctatctcagacggtcggggaagggcgcataacagacgcggtcacaatgacggtgaagactccttaacccacacagatgtaagctctttccagactatggaccagatggtgagtaatatgcgaaactatatgcagaagctggagcgcaattttggccagttatcagtcgaccccaacggacactccttttgcagctcctctgtaatgacgtactcaaagatcggcgatgaaccccctaaggtgtttcaggcttctacgcagacaagacgggcaccgggagggattaaggagacccggaaggcaatgagggacagcgactcggggctggagaaaatggctatcggccaccatattcacgatcgcgctcatgttattaaaaaatccaaaaacaagaaaactggtgacgaagaggtcaatcaggaattcataaacatgaacgagtctgacgcccatgcctttgacgaggagtggcagtccgaggtcctgaaatacaagccagggcgacacaatctgggcaacacacgaatgcgaagtgttgggcacgagaaccctggatccagggagttgaaacggcgagaaaagccacaacaatcgcctgctattgaacatggcaggcgtagtaatgtgctgggtgataaactgcacatcaaagggtcttctgttaagagtaacaaaaagtag

SEQ ID NO: 231415 - DNA, 732 bp, synthetic construct
  misc_feature 1..732: note = Description of Artificial Sequence: Synthetic coding sequence
  source 1..732: mol_type = other DNA
atgcgccagatgattaggagctttagcgagccgtttggacgggatctgctgtcaataagcgatgggaggggcagagcccacaaccggagggggcacaacgacggagaggattcgctgacccataccgatgtgtcttcctttcaaactatggatcagatggtgagcaacatgagaaactacatgcagaagctggaacggaacttcggacagctttccgtggatccgaatggtcatagcttctgctccagtagcgtcatgacatatagcaaaattggggatgaacctcctaaagtgttccaggcatcaacgcagactcggcgtgccccagggggtattaaggaaacccggaaggcaatgcgcgatagcgatagcggacttgagaagatggctatcggccaccacattcatgatcgcgctcatgtaattaagaagagcaagaataagaagaccggggacgaggaagttaatcaagagtttatcaacatgaatgagagcgatgcgcatgcattcgacgaggagtggcaatccgaagttctcaagtataaacccggaagacacaacctcggcaacactagaatgcggtcagttggccatgagaatcctggaagccgggagctgaaacgtagagaaaagccgcagcagagccccgctatagaacacggaaggcggagtaacgtgctgggtgacaagctgcatataaaggggagcagcgtgaagagtaacaaaaagtag

SEQ ID NO: 231416 - DNA, 603 bp, synthetic construct
  misc_feature 1..603: note = Description of Artificial Sequence: Synthetic coding sequence
  source 1..603: mol_type = other DNA
atgagacaaatgatccgaagcttttctgagccttttggaagggatctgctgtctatctcagatggacgtggcagagctcacaatcgtagaggccacaatgacggagaagattcattaacccatacggatgtcagctccttccagacaatggaccaaatggtgtcgaacatgcgtaactatatgcaaaagcttgaacgcaatttcatcaaggaaacccgcaaagcaatgcgcgactctgactccgggcttgagaagatggctatcggtcaccatatacatgaccgcgcacatgtcattaaaaagtcaaaaaataagaagactggggatgaagaggtaaaccaggaatttatcaacatgaacgagtccgacgctcatgcctttgatgaggagtggcagagcgaggtgttgaaatacaagccgggacggcataatctgggcaacacaaggatgagatcagtgggccacgagaacccaggaagtcgggaacttaagcgaagagagaaaccccagcaatcccccgctatagagcacgggaggcgatccaacgtgttgggcgataagctgcatatcaaaggcagtagcgtcaagtcgaacaaaaagtag

SEQ ID NO: 231417 - DNA, 747 bp, synthetic construct
  misc_feature 1..747: note = Description of Artificial Sequence: Synthetic coding sequence
  source 1..747: mol_type = other DNA
atgtttcggtttatgcgggacgtggaacctgaggatccgatgttcttgatggacccatttgctatccaccggcaacacatgagtagaatgctgagcggcggatttgggtatagccctttcctgtctataacagacggaaatatgcctggaacgcggccagccagtagaaggatgcagcaagcgggagccgtgtctccattcggtatgcttggcatgtccgggggattcatggacatgttcgggatgatgaatgatatgataggaaacatggaacacatgacagccggaggcaattgccagactttctcctcgagtactgtaatatcctactctaacactggcgacggcgcacccaaggtctaccaggaaacatccgaaatgcgcagtgcacccggaggcatccgggaaaccagacggaccgtccgggacagcgatagcggcctcgaacagatgagtattggccatcacataagggatagggcccacatcttacaacgtagccgcaatcacagaaccggggaccaggaagagaggcaggactatataaatctggacgaaagcgaagcagcagcatttgacgatgaatggaggagagagacgagtcggtttaggcagcagaggcccctggaatttaggcgcctcgagtcctccggtgctggagggcgaagagctgaaggtcccccacgattagcaattcaagggcctgaggactccccttctcggcaaagccgtaggtatgactggtag

SEQ ID NO: 231418 - DNA, 747 bp, synthetic construct
  misc_feature 1..747: note = Description of Artificial Sequence: Synthetic coding sequence
  source 1..747: mol_type = other DNA
atgttccggttcatgcgagatgtcgagcccgaagaccctatgtttcttatggacccttttgccattcatagacagcacatgagccggatgctttcaggcggattcggttattctccctttcttagcatcactgacgggaatatgccaggtactcgcccagcgtcccggaggatgcagcaggccggtgccgtaagcccctttggtatgttgggcatgagtggaggttttatggatatgtttggcatgatgaacgatatgattggaaacatggagcacatgaccgcaggcggaaattgtcagactttcagctcctcaacggttatttcgtactcaaacactggagatggcgctcctaaagtttatcaggaaacatccgagatgaggtccgccccaggcggaatcagggaaactcgacgcacagtgcgcgacagcgacagcgggttggaacagatgtctataggacaccacattagggatagggcgcacatactgcagaggtccagaaatcaccgaaccggggatcaggaagaaaggcaagactacattaaccttgatgaatctgaggctgccgcttttgatgacgaatggaggcgagagacgagccgcttccggcagcagcgtcctttagaattccgacggcttgagtccagtggagccggaggaaggagagccgaagggccaccgagactcgccattcagggcccagaggacagcccctccaggcagtcgaggagatacgactggtag

SEQ ID NO: 231419 - DNA, 747 bp, synthetic construct
  misc_feature 1..747: note = Description of Artificial Sequence: Synthetic coding sequence
  source 1..747: mol_type = other DNA
atgttccgttttatgcgggacgtggaacccgaggatcctatgttcctgatggatccattcgcaatccaccgccaacatatgtccagaatgctcagcgggggatttgggtacagcccttttctttctataactgacggaaacatgcctggcacaaggcccgcaagcagacggatgcagcaggcgggtgcagtctcaccattcggaatgctgggcatgtctggagggtttatggacatgtttggaatgatgaacgatatgatcggcaatatggaacatatgacagccggtgggaattgccagaccttcagtagctccacagtaattagttattccaacactggtgatggcgctccgaaggtgtaccaagaaacttcagagatgcgctccgcccctggtggcattcgggaaacgcgtcgcaccgttcgcgattctgattccggattggagcagatgagcatcggacaccatattagggaccgagctcatattctccaacgatcacgaaatcacagaacaggcgaccaggaagagaggcaggactacatcaacttggacgaatccgaagcagccgctttcgatgacgaatggaggcgggagacctcccgctttcgccagcagcgcccactggaattcaggagactggagtcctccggcgctggcggtaggagggctgagggccctccaagattggctattcaggggccagaagattccccctctagacaaagtcgacgatacgattggtag

SEQ ID NO: 231420 - DNA, 747 bp, synthetic construct
  misc_feature 1..747: note = Description of Artificial Sequence: Synthetic coding sequence
  source 1..747: mol_type = other DNA
atgtttagattcatgcgagatgttgaacccgaggaccccatgtttcttatggatcccttcgccattcaccgtcagcacatgagccgtatgctttcagggggattcggctatagcccctttttgagcatcactgacggaaacatgcccggtacccggccagcatcacggagaatgcaacaggcaggcgctgtaagccccttcggcatgctgggtatgtctggcggtttcatggacatgttcgggatgatgaatgacatgataggaaatatggagcatatgaccgcgggtggcaattgccaaacattttcgtcaagcacagttattagctatagcaataccggggacggcgcaccaaaggtctaccaagagacctccgagatgcgatccgccccaggtggcatcagggaaactcgccgaacagtgagagactccgattccggtttggagcagatgagcataggccaccacatcagggaccgcgctcatatcctccagagatcgaggaatcaccgcaccggtgatcaagaggaacggcaggattatatcaatcttgacgagtcggaggctgcagcctttgacgatgagtggcgcagggagaccagtcggtttagacaacagcggccactggagtttcggcgtttggaatcaagtggcgcagggggtcggagggccgaaggtccgcctcgattagccatacaaggcccagaggactctcctagccggcagagccggaggtacgactggtag

SEQ ID NO: 231421 - DNA, 684 bp, synthetic construct
  misc_feature 1..684: note = Description of Artificial Sequence: Synthetic coding sequence
  source 1..684: mol_type = other DNA
atgatggccgctggtgctgcgttagcattagccttgtggttgctcatgcctccggtggaggtcgggggagcaggtccgccacccatccaagacggagagttcacatttctccttcccgctgggcgaaaacaatgcttctatcagtctgctcctgcaaacgcatctctggagacagaataccaagttatcggcggagcaggtttagatgtggattttactctcgagtcaccccagggcgtgttgctggtaagcgaatcacgcaaagcagatggagtccataccgtcgaacccacagaggccggagactataagctgtgcttcgataattcattctctactattagtgagaaacttgttttttttgaattaatctttgacagcctccaggacgacgaggaggtggaaggatgggccgaggccgtagaaccagaggaaatgctggatgtaaagatggaagatatcaaggagtcgatcgagacaatgcgaacacggcttgaacgctctatccaaatgctcactctcttgcgcgcttttgaggccagggatcgcaatctacaggaaggcaacctggagagggttaatttctggtccgcagtgaatgttgccgtgctcttgctcgttgctgttctgcaagtgtgcacactgaaacggttctttcaggacaagaggcccgttccaacttag

SEQ ID NO: 231422 - DNA, 873 bp, synthetic construct
  misc_feature 1..873: note = Description of Artificial Sequence: Synthetic coding sequence
  source 1..873: mol_type = other DNA
atgcggccagctgtgcttggctcgccggatagggcacctccagaggacgaaggacctgtcatggtcaagctggaggattcggaagaggagggggaagccgctctatgggatcccggaccagaggctgccagactgagattcaggtgttttcgctacgaggaggcaacaggcccacaggaggccctggcgcaactacgagagctttgtaggcaatggctccgcccagaggtgagaagcaaggaacagatgctggaattattggtcttggagcagtttctgggggcactgccccctgagatccaggcacgcgtgcaggggcagaggccaggctctccagaggaggccgcagccctcgtcgatggactccggagagagccaggcggaccccgaaggtgggtcacagtgcaggtgcagggtcaggaggtgctttccgagaaaatggaaccaagctctttccagcccttgcccgagactgagccacctacccccgaacctggccctaagacccctccacggactatgcaggaaagccccctagggttgcaggtaaaggaagagtccgaggttacggaagattcagactttctcgaaagcggcccactggccgctacacaagaatcagttccaacactgctgcccgaggaggcccagcggtgcggtacagttctcgatcaaatctttccccatagcaagaccgggccagagggcccatcctggcgggagcaccccagggcactgtggcacgaggaggcagggggaatattttcacccggagctggcgcaggtgcagcccctgcccttggcgctggatggcttggagctgctgtcgctatgtacgttgcaaggtgttctgccaacgcagctacctgctag

SEQ ID NO: 231423 - DNA, 2205 bp, synthetic construct
  misc_feature 1..2205: note = Description of Artificial Sequence: Synthetic coding sequence
  source 1..2205: mol_type = other DNA
atgagacccgcagtcctcggaagtcccgatcgggctcctccagaagatgaggggcctgtcatggtgaaactggaagattccgaggaggaaggcgaggctgccctgtgggaccctggaccagaggccgcaaggcttcggtttcgttgctttcgttatgaggaggccactggcccacaagaggcacttgcgcagctgcgagagctctgccgccagtggctacgtcccgaagtaaggtcaaaggaacagatgctggaactgctggtgctggaacaatttctgggcgcactgccacccgaaatccaggccagggttcagggccaacggcctggttctcctgaggaggcagcagctttagtggacggccttcgacgcgagccaggaggcccaagaaggtgggtcacagttcaggtacaaggacaggaggttctctctgagaaaatggaaccaagtagttttcagcccttgcctgaaacagagccaccgacgcccgaacccggtcccaaaaccccaccaagaacaatgcaggaatcccccttgggcctccaggtgaaggaggagtcagaagtgactgaagactctgattttctcgaaagtggacctctggccgcaacccaggaatccgtgccaacgcttctccccgaggaagcacagcggtgtgggaccgttctggaccagatcttcccccatagcaagaccgggccagaaggtcctagctggagggaacacccccgagcactgtggcatgaggaagctggcggtattttcagtccgggattcgccctccaactagggtccatatcggccggtccaggatcagttagcccacatcttcacgtgccgtgggatctggggatggcaggcctatctggacagatacagtccccaagcagagagggaggctttgcacatgctctgcttctgccatctgatctccgatctgaacaggaccccaccgatgaggacccgtgccgcggagtgggccctgccctgataacaaccagatggagatcacccagaggccgttcccggggacgcccatccacagggggtggggtggtaaggggcggacgttgtgacgtgtgtggtaaagtcttctctcagcgttccaacctgctacgccaccaaaagattcataccggagagcggcctttcgtttgtagcgagtgcggacgaagcttttctaggagctcccatcttcttcggcatcagctgacccatactgaggaaagaccatttgtttgtggggattgtggccagggattcgtccgatctgctcggctggaagagcaccgccgtgtgcacactggcgaacagcccttcagatgcgcagagtgcggccaaagcttccggcagaggagtaatctgctgcaacatcagcggattcatggtgatccccctggacctggtgcaaagccgccagccccaccaggggcaccagagcctcccggaccattcccctgttccgagtgtcgggaaagttttgctcgcagggcagtcctactcgaacaccaggcagttcacactggcgataaatcctttggatgcgtggaatgtggagaacggtttggcagaagatctgtcctcctacagcaccggagagttcatagtggcgaacgcccttttgcttgtgctgaatgtgggcaatcatttcgacagcggtcaaacctcacccagcaccgaagaattcatacgggggagaggcccttcgcatgcgctgaatgcgggaaagcctttcggcaacggcctaccctcacacagcacctacgcgtccacactggcgagaaacccttcgcttgtccagagtgtggacagaggttttcacagcggctcaagctcacccgacaccagagaactcataccggcgagaagccttaccactgcggcgagtgcggattgggatttacccaggtgtctcgactcaccgagcaccaaaggattcacactggagaacgtcctttcgcgtgccccgagtgcggacagtctttccgtcagcatgccaacctcacccagcaccgcagaattcacacaggtgagagaccctatgcgtgtccagaatgcggaaaagccttccggcagaggcccacattgacccagcacctgcggactcataggcgtgagaagccgttcgcctgtcaggactgtggtcgcagatttcatcagtctacgaaactgattcagcatcagagagtgcactccgctgaatag

SEQ ID NO: 231424 - DNA, 1539 bp, synthetic construct
  misc_feature 1..1539: note = Description of Artificial Sequence: Synthetic coding sequence
  source 1..1539: mol_type = other DNA
atggctcattcctgtcgctggcggtttcctgctaggcccggaaccactggcggaggcggaggcggaggtaggcgcggtctgggcggagcccctcggcagcgcgtgcctgcactgctgctcccacctggccctccggtgggcggagggggtcccggagccccaccctctccaccagccgtcgccgctgccgctgcggcagccggttcctccggcgctggtgtccccggtggagcagccgctgcctccgccgcatcgagctcttcggcgtccagtagtagctctagctctagctccgcgtcaagcggtccagccctcctgagggtcggccctgggtttgacgccgctctgcaggtatctgccgctatcgggacaaacctgcgacgcttccgcgcagtcttcggggaatcaggaggcggtgggggttcaggggagttgaccacccaaattccctgttcctggagaacgaagggacatattcacgataagaaaacagagcctttcagactcctggcatggtcatggtgtctaaacgatgaacagttcctgggttttggctctgacgaggaggtgcgtgtgagatctcccacccgcagtccgagcgttaaaacatcccctcgcaagcccagggggcgaccaaggagcggcagcgaccgaaactctgccatcctgagcgatccgtccgtttttagccctctgaataaaagcgaaactaaatcaggtgataagatcaaaaagaaagattcaaagagtatcgagaaaaagcggggtagaccccctaccttcccaggagtgaaaattaaaattacccatggaaaggatattagcgaactccctaagggtaacaaagaggactcgctcaagaaaatcaaaagaacaccaagtgcgaccttccagcaggccactaagataaaaaaactaagagccggaaaactgagtccactgaaatcaaagttcaagaccggaaagcttcagatcggcagaaaaggggttcagattgtacggcgacgagggcgtcccccatccactgaacgcattaagaccccttccggactactgattaactccgaactggagaagcctcagaaagtacgtaaagacaaggagggaacaccacctttaactaaagaagataagactgtagttcgacaatcgcctcggagaattaagccggttagaatcataccgagttctaaaagaaccgacgccaccattgcgaagcagctccttcagagagccaagaagggggctcagaaaaaaatcgaaaaagaggcagcccaactgcagggccgaaaggtgaagacccaagtgaagaatatccggcagtttatcatgcccgtggtgtccgccatcagcagccggatcatcaagaccccacggagatttattgaggacgaggattatgaccctccaatcaaaatagccagactagagagtactcctaactctcggttttccgccccaagctgtggatccagcgaaaaatcctcagccgcatcccagcatagttcccagatgtcctccgattcgagccgatcttag

SEQ ID NO: 231425 - DNA, 11796 bp, synthetic construct
  misc_feature 1..11796: note = Description of Artificial Sequence: Synthetic coding sequence
  source 1..11796: mol_type = other DNA
atggcccatagctgccggtggcgatttcctgcacgtcccggtaccacaggaggtggaggcggagggggacgccgtgggctggggggtgcacccaggcagcgtgttccagcactcctgcttcctcctggaccaccagtcgggggtgggggacccggtgcaccgcctagtccacccgctgtcgccgctgccgcagcagctgccggatctagcggtgccggagtccctggaggcgcagccgcagctagcgctgcaagcagcagtagcgctagctcctctagctcaagtagctcgagcgccagcagcggtcccgcactcttgcgcgttggacccggattcgatgccgcactgcaggtctctgctgccatcggaaccaatctccgtagatttcgtgccgtgttcggagaatccggtgggggtggcggatccggcgaagatgagcaattcctaggtttcggatccgacgaggaggttcgggttaggagccccacgaggtccccttcagttaagacaagcccgaggaagccacggggtcgtccacgctcgggcagcgataggaactccgcgatattgagtgatcctagcgtgttcagtcccctcaataaatccgaaaccaaaagcggcgataaaattaaaaagaaagacagtaaatctatcgaaaaaaaacgcggtcggcctcccacatttcctggcgttaagataaagatcacacacggcaaggatatttcagagcttcctaagggtaataaagaagacagtctcaagaagatcaaacgtacccctagtgcaacattccagcaggctaccaagatcaagaagctccgtgccggtaagctgtcgcctctcaaatccaaattcaagacaggtaagctgcaaatagggaggaaaggtgttcagattgtgaggaggcggggacgccctccatctactgagcgcatcaaaacacccagcggcctgctgattaatagcgagttggaaaaaccgcagaaggtaagaaaggataaggagggcactccaccacttactaaggaggacaaaaccgtcgtgagacagagccctcgccgaattaagcccgtccgcattatcccctcatccaagcgtaccgatgccacaatagctaagcagctgctccaacgagccaaaaagggcgctcagaaaaaaatcgaaaaggaggccgctcagctgcaggggagaaaggttaagacgcaggtgaagaatatacgccagttcatcatgccagttgttagcgcaatctcatctaggatcatcaagacgcccagaaggtttattgaggacgaggactatgaccctcctatcaagattgctcgcctcgagtctactcccaactcccggttttccgctccatcttgtgggagcagtgagaagagctccgccgcttctcaacacagttctcagatgagctcagactcaagcagatcgagttctcctagtgtcgacacatcaacagactcacaggctagcgaagagatccaagtactgccagaggaacgctctgatacgcccgaggtgcatcccccactaccaatctctcaatcaccagaaaatgagtccaacgacagaagatctagacgatattccgtcagcgagagaagcttcggttcaagaacaacaaagaagctttcaacacttcaatccgcaccacagcagcaaacctctagcagccccccacccccactgcttacacctcctccaccgctccagcctgcttcaagtatcagcgaccataccccttggctgatgccacccaccatccctctggctagcccatttctgcctgccagtactgcccctatgcagggcaaaagaaaatcgatccttagggaaccgactttcagatggactagcctaaagcatagcaggagcgagccccagtacttttcaagcgccaagtatgcgaaggaaggattgattcgtaaaccaatatttgacaatttccgcccaccaccgctgacccccgaagatgtgggatttgcgtccggcttctccgcctctgggactgccgcatccgctagactcttttcaccccttcatagcgggacacggtttgacatgcacaaaaggtccccccttttacgggcaccgcgatttacaccctccgaggctcattctaggattttcgaaagcgtgacgcttccatcgaaccggacatccgccggaacctcttctagcggcgtgtccaatcggaaacgtaagcgaaaggtcttctcccccatcagatccgaacccagatctcccagccatagtatgagaacaaggagcggccgactctcctcaagtgaactttctccgctgacgcctcccagttctgtgagctctagcctatctatttcagttagtcccctggccactagcgcactcaatccaacttttacattcccctcccattccctaacacagtcaggagaaagcgccgaaaagaatcaaagacctcggaagcagacatcagcaccggcagagcctttcagctcatcttccccaacgcctctattcccttggtttactcccggttcacagaccgagagaggtcgcaacaaagataaggccccagaggagctatccaaagatcgtgatgccgataaaagcgtggagaaagacaagtctagggagagggatcgggaacgcgaaaaggaaaacaaacgtgaatctagaaaggagaagcggaaaaagggtagtgagatccagagttccagcgcgctgtatcctgtgggcagagtttctaaggagaaagttgtgggcgaagatgtcgccacttccagctctgcaaagaaagccactggccgtaagaagagtagctctcacgatagtggcactgacatcacttccgtcactctcggagacaccaccgccgttaagaccaagatcttgattaaaaagggtcggggaaacctcgagaagacaaatctagacctcggcccaacagccccatctctggagaaggagaaaacactctgtcttagcacacctagtagctctaccgtgaaacactctaccagtagtatcggatccatgctcgctcaggctgacaagttacccatgaccgataagcgtgttgcgagccttcttaaaaaagcgaaggcgcagttgtgtaagatcgaaaagtccaaatcactcaaacagactgaccagcctaaagcccagggacaggaatccgattcttcggagacatccgtgcgaggtccgagaatcaaacatgtttgcaggcgtgccgctgtggcactggggagaaaacgggcagtcttccctgatgacatgccaacgctaagcgctctcccttgggaggagagagaaaaaattctcagtagcatgggaaatgacgacaaaagttccattgcgggaagcgaggacgccgagcctctagcccctccgatcaagcccatcaagccggtgacaaggaataaagcaccacaagagccccctgtcaagaaaggcagaagaagcaggagatgcggacaatgtcccggttgccaggtgcctgaggactgtggggtttgcactaattgtctcgacaagccaaaatttggcggacgaaacattaaaaagcaatgctgcaagatgcggaaatgccagaatctccagtggatgcccagcaaggcctacttgcagaaacaagcgaaggcagtgaaaaagaaggagaagaagagcaagacgtcggagaagaaggatagcaaggagtcctctgtggtgaagaacgtagtagactcctctcagaaaccaactccctctgcgagagaggaccccgcaccaaaaaaatcttccagcgagcctccaccacggaagcctgtggaagagaagtctgaggaaggaaacgtgagcgctcccggacccgaatccaagcaagctacaacccctgcctctcgaaaatcgtctaaacaggtgagtcaaccggctttagttatccccccacagccaccaaccacaggaccccctcggaaggaggtgccaaagacaacgccttcggagccaaagaagaaacagccaccgccacctgaatccggccctgagcagagtaaacagaaaaaagtggcacccaggcccagcattccagtcaagcagaagccaaaggaaaaagagaaacccccaccagtgaataagcaggaaaatgccggtactcttaacatattgtccactctctccaacggtaattcctccaaacagaaaattcccgctgacggcgttcatcggattagggttgatttcaaattcgtttactgtcaagtgtgttgtgaaccgttccataagttttgtctggaggagaatgagcgcccactggaagatcaactggagaattggtgctgcaggcgctgtaaattttgccacgtctgtggccgacaacaccaggccacgaaacagcttttggaatgcaataagtgcaggaacagttaccatcctgagtgtttgggccctaactatcccacgaagcccacaaaaaaaaaaaaggtgtggatatgcacaaagtgcgtcagatgtaagagttgcggctccactactcctggcaaggggtgggacgcacaatggtcacacgatttctctttgtgccacgattgcgccaagctgttcgctaaaggcaacttctgtcccctgtgtgataagtgttacgatgacgacgactacgaatccaaaatgatgcagtgtggtaagtgcgaccgctgggtgcactccaaatgtgagaatctttcagacgaaatgtacgaaatcttatccaatttaccggaatcagttgcatacacatgcgttaactgcactgagagacatcctgccgaatggcgactcgccctggaaaaggagctgcagatctcactgaaacaggtgttgacggccctgcttaactcacgaacaactagccacctgctgagataccgccaggccgctaaacctccagatctcaatcctgagacggaggagtccattccatcccgtagcagccctgaaggacctgaccctcctgtgttgaccgaagtgtcaaaacaggacgatcagcaaccattggatttggaaggggtcaagagaaagatggaccaaggaaattatacaagcgtgctagagttttcagatgatattgtgaagattatacaagccgctattaattctgatgggggtcagcccgagatcaagaaggcgaactctatggtaaagtccttcttcatccgccagatggagcgtgtctttccatggttcagtgtaaagaagagccgtttctgggagccaaataaggtcagcagtaattccggaatgttgcccaacgccgttctacccccttcgctagatcacaattatgcgcagtggcaagagcgcgaagaaaactctcacacagagcagcccccactgatgaagaaaatcatccctgcacccaaacctaagggtccgggtgagcctgatagtcccactcctttgcatccgccaacgccccctatactgagcaccgaccgctctagagaggacagccctgagcttaatcctccaccaggcattgaagacaatcggcagtgcgccctatgtctgacctacggagacgattctgcaaatgatgccggaaggctgctgtacataggccagaacgaatggacgcacgtgaattgcgccctgtggtccgccgaggttttcgaagacgatgatggatcgttgaagaatgtccatatggcagtgatacgtgggaagcagctgaggtgcgaattttgccaaaagcccggtgccaccgtcgggtgctgcttgacaagttgcacctctaactaccactttatgtgttctcgggctaaaaactgtgtcttccttgatgacaagaaggtgtattgtcagcggcaccgcgacctcattaaaggcgaggtggttcctgaaaacggtttcgaagtcttcagaagagtgttcgtggatttcgaaggcatttctttgcggcgtaaatttcttaacggtcttgaaccagagaatatacacatgatgatcggaagtatgactattgactgcctggggatccttaacgatctgtctgactgcgaagataagctattccccatcggctatcagtgcagccgggtctactggtctacgactgacgctcggaaacgttgtgtgtacacatgtaagattgtcgaatgtcggccaccagttgtcgagcctgacattaacagcacagtggagcatgatgagaatagaacaatcgcacacagccctacctcttttacagaatcaagctccaaagagtcccaaaatacagctgaaatcatctcccccccttccccagacagacctccacatagccaaacatccggcagttgctactaccatgtcattagcaaagtgcctcggattcggaccccgtcctactcccctactcagcgatcccccggatgcagacccctccctagtgctggaagtccaacacccaccacacacgagattgtgacagttggcgatccactgctcagctctggactcagatcgattgggagtcgaaggcattccacctcctctctctcaccacagagaagcaagctcagaattatgagccccatgcgtaccggcaacacctactctaggaacaacgtttcttctgttagcaccactggaacggcaacagacctggagagtagcgcaaaggtagtcgaccacgtcctgggacctctaaattcctcaacttccctgggccaaaacactagcacatcttctaacttgcagcgaacggtggtgacagtggggaacaaaaactcacacctggatggcagctcctcctctgaaatgaaacaatccagcgcaagcgatcttgtgtcaaaatccagtagtctcaagggcgagaagaccaaggtcctgagtagcaagagtagcgaggggagtgcacacaatgtcgcctaccccggtatcccaaaactcgcgccacaggtgcataacactacatcccgcgaacttaacgtttctaagatcggatctttcgcagagccttcaagtgtcagcttctcctctaaggaagcattatcgttccctcatctacacctgagaggccagcggaatgaccgcgatcagcatactgattctacccagagcgcgaacagcagcccagatgaagataccgaggttaagacattgaaactgtctggaatgagcaacaggtcctccatcataaatgagcatatggggtcaagcagccgggacaggagacagaagggcaagaaatcttgtaaagaaacatttaaggagaagcacagctctaagagcttcctcgagccaggacaagtgacaactggcgaggagggcaacctaaaacctgaattcatggacgaggttcttactcccgagtacatgggccagcgcccttgcaacaacgtaagttccgataaaataggggacaagggtctgtctatgccaggggtgcctaaggccccaccaatgcaggtggaaggctccgccaaggagttgcaggcgccacggaaaaggacagtcaaggttaccctgactcccttgaagatggagaacgaaagccaatccaagaacgctctgaaggagtcttcccctgccagtcctttacagattgaatctaccagccccacagagccaattagcgcctcagaaaatccgggtgacgggccagtggcccagccctcgccaaacaacaccagctgccaggatagtcagagcaataattaccagaacttacccgtccaggatcgtaacctcatgctgccagacgggcctaaaccacaagaagatggcagctttaagaggcgatacccaaggcgctctgccagagcacgcagcaatatgttttttggcctgacccccctctatggtgttcgatcctacggagaggaggatatccctttttattcgtcgtctacgggaaagaaacggggaaagcgctctgctgagggacaagtggatggagcagatgatctgtctactagtgatgaggacgacctttactactacaacttcaccagaacagtgattagttcaggtggagaagagcgcctggcttctcacaatttgtttcgggaggaggaacagtgtgacctccccaagatttcccaactcgatggagtcgacgacgggacagagtctgacactagcgtgaccgcgaccactcgtaagagcagccagataccaaagaggaatggaaaggagaacggcaccgagaaccttaagatcgataggcccgaggatgccggagaaaaggagcacgtcactaagtcctcagtgggtcataagaacgaaccgaaaatggataattgccattctgtaagccgggtaaaaacacaaggacaggatagccttgaggcgcagctgtcttctctggaaagttctcggagggtgcacacttccacccctagcgataagaacttacttgacacgtacaatacagaactcttaaagagcgatagtgacaataataattccgacgattgtgggaatattctcccatctgatatcatggatttcgtcctgaagaatacaccctctatgcaggcgcttggcgaatctccagaatcatctagctcggaactgctgaacttgggcgaaggcctgggtctggatagtaatcgcgagaaagacatgggcctgtttgaagtgttctctcagcagctgcctaccacggagcctgtggacagttccgttagcagctcaatctccgcagaggaacaatttgaattacccttagaattgcccagcgatcttagcgtgttaacaaccaggtcacccacagtccctagccagaatccatcaaggctggcagtgatctcggacagcggcgaaaagcgagtgaccatcacagaaaaatctgtggcttccagtgagagcgacccagctctcctgtcaccaggggtcgaccccacacctgaagggcatatgacccctgaccatttcatccaggggcacatggatgcagatcatattagctctcccccatgcggttccgttgagcagggtcacggtaataaccaggatcttactaggaacagctctactcctgggctacaggttccagtgtctcctacggttcctattcagaatcagaagtacgtccccaacagcaccgacagccctggcccttcccagatttcaaacgccgctgttcaaacaaccccaccgcatttgaagcccgctactgagaagctgatagttgtaaatcaaaatatgcagccactctatgtcctgcagacactgcctaacggtgtgactcaaaagattcagcttacaagcagcgtttcgtcaacgccttccgtgatggagactaacaccagcgtcttaggtcctatgggcggtggtctgacactcacaacaggactgaacccttcattaccaacctcccagtccttattcccgtccgcaagcaaggggttattgcccatgtctcaccaccagcacctccactctttccctgccgcaacgcagtccagcttccccccaaatattagtaatccgccttccggcttgcttattggggtccagcctcctccggatccgcagcttcttgtcagtgagtcctcccagagaaccgatctgtctactacagttgcaacgccaagctcaggtctgaagaagagacctatctcacgattacagaccaggaagaacaaaaagctagctccctccagtactccaagtaacattgccccaagcgacgtcgttagcaacatgaccctaatcaatttcacaccaagtcagctccccaatcatcctagcttgctggatctgggatccctaaatacttcttcccatcgcactgtgcctaatatcattaaaaggtcaaaatctagtatcatgtactttgaacctgcacctctgctgccgcagtctgtgggaggaactgcagccactgctgctggaacatctaccatcagtcaagacacatcccacctcaccagtggtagtgtgtctggccttgcgtcgtcaagctcggttcttaacgttgtgtccatgcaaaccaccacaacccccaccagttccgccagcgtccccggacacgtcaccttaaccaatcctcgccttctgggtacacctgacatcgggagcattagtaacttacttatcaaggccagtcagcagtctctgggcatacaggaccaaccagtggcgttgccaccatcttcgggcatgtttccgcaactggggacttcgcaaaccccctctacagctgccatcaccgcagccagcagcatctgcgtccttccctccacgcagaccacgggtatcacagccgctagtcctagcggggaagccgatgagcactatcagttacagcatgtcaatcagcttctggcttctaagaccgggatccattcctcacagcgggatttagacagcgcaagtggccctcaagtctccaatttcacacagactgtcgatgctccaaatagcatgggcttggagcagaataaagctctcagcagcgccgtccaggcaagcccaaccagtcctggtgggtctccctcttcaccatcatcaggccaacggagcgcaagtccaagtgttccaggtcctactaagcccaagccaaagacaaagagatttcagctaccactggataaggggaacggaaagaagcataaggtgtctcacctccggacgtctagcagcgaagcacatattccagaccaggagacgacaagtctcacgtcaggcacagggacgccaggcgcagaggccgaacaacaggacacagcctcagtggaacagtcctcccagaaggagtgtggccagccagcaggccaagtggcagtgttacctgaagtgcaagtaacccaaaatcccgcaaacgaacaagagtccgccgagcctaaaacagtggaagaggaggaatccaatttttcgtccccattgatgctatggttgcagcaagaacagaaacgcaaggagtctatcaccgaaaagaaacctaagaaaggcctcgtttttgagatcagcagcgatgatggctttcaaatctgcgcagagtctatcgaggacgcttggaaatctctgaccgacaaagtgcaggaggccaggtctaacgcaagactaaaacaacttagctttgctggcgtgaacggactgcggatgctgggcatcctccatgacgccgtggtgttcttaatagagcagttgagcggggctaaacactgtcgaaattacaaatttagatttcacaagccggaggaggctaatgaaccaccgctgaacccccacggctctgcaagagcagaggtgcacctcagaaagtctgcctttgacatgtttaacttcctggcttccaagcacaggcaaccgccagaatataaccccaatgatgaagaggaagaggaggttcagctcaagtccgccaggagggccacgtcaatggacttgccaatgccgatgcgctttcgccacctgaaaaagacttcaaaggaggctgtaggagtgtacagaagtcccatccacggcagaggactgttttgcaagcgcaacattgatgccggtgagatggtaatcgagtacgccggaaacgtgattcggtccattcagaccgataagcgggagaaatactacgattccaagggaattggctgctatatgttccggatcgacgattccgaagtcgtggacgctactatgcacgggaacgctgccagattcatcaatcattcttgtgaacccaactgctattccagagtgattaacatcgacggtcaaaagcatatcgttatattcgctatgagaaagatatatcggggtgaagaactgacctacgactacaagtttcccatcgaggatgcgagtaataagctaccctgtaactgtggggctaagaagtgcagaaagttcctcaattac

SEQ ID NO: 231426 - DNA, 8639 bp, synthetic construct
  misc_feature 1..8639: note = Description of Artificial Sequence: Synthetic coding sequence
  source 1..8639: mol_type = other DNA
catgcgcatcctgaatgcctgaccatggaacgcgagaaaatcctttcctcaatgggtaacgacgacaaatccagcatcgccggatccgaggacgcggaacctctggcaccacccatcaaacccattaagccggtcactaggaataaagctccacaggaacctccggtgaagaagggcaggcgtagtcgacgttgtggtcagtgccccggttgccaggtacccgaagactgcggcgtgtgtacgaactgcctggacaaacctaagttcggaggaagaaacatcaagaaacagtgttgtaagatgaggaaatgccaaaatctgcagtggatgccatcgaaggcttaccttcaaaaacaagctaaagcagttaagaagaaggagaagaagagcaagacctccgagaaaaaggactcaaaagaatccagcgtagtcaagaatgttgtggatagtagccaaaaacctactccgtctgctagagaggatcctgctccaaagaaaagctcgagcgagccaccgcctagaaaacccgtggaggagaagtctgaggaaggcaatgtgagtgctcccggaccagagtctaagcaggccaccacaccagcgtctcgtaagtcgagcaaacaagtgagccaacccgctttagttattccgcctcaacctcctactactggaccaccccgaaaagaggtgcccaaaacgacgccaagcgaacctaagaaaaaacagcctcccccacctgagtcaggcccagagcagtcaaaacagaaaaaagtggctcctcggccttccatccctgttaagcaaaagccaaaagagaaggaaaagccccctccggttaacaagcaggagaatgcgggaactctaaacatcctgtctacactgagtaatggtaactccagtaagcagaaaatcccagcggacggcgtacacaggatcagggtggacttcaaggaagattgtgaggcagaaaatgtgtgggagatggggggactcggcatactgacctccgtgcctatcacccccagagtggtgtgctttctctgcgcaagctctggccacgtagagttcgtgtactgccaagtttgttgtgaaccattccataagttttgcctcgaagagaatgagcgccctctggaagaccaactcgagaactggtgctgccgaaggtgtaagttttgccatgtatgtggtcgccaacatcaggccacgaagcagctcctcgaatgcaataagtgccgcaatagttaccaccccgaatgtttgggcccaaattaccctactaagccaacaaagaagaagaaggtttggatatgcacgaaatgtgtaagatgtaagtcatgcgggtcaaccacacctggaaagggatgggatgctcaatggagtcacgacttctcactctgtcacgattgcgcaaagctgttcgccaaaggcaacttttgtcctctttgcgacaaatgttacgacgacgacgactacgagtcaaagatgatgcagtgcggtaagtgtgacaggtgggtgcattctaaatgcgaaaacctcagcgacgaaatgtatgagatcctttccaatctgccagaaagcgtcgcctatacatgtgtgaattgcaccgagcgtcaccccgcagaatggcggctggccttggagaaggaactgcagatatccttgaaacaggtactcacagcccttctcaacagccgtacgacctcgcacctgctgcgctacaggcaggccgcaaagccaccggacttgaatcctgaaaccgaagaatccatcccctctcggtcttctccagagggccctgacccccctgtgcttactgaagtttcaaaacaggacgatcagcaaccattagacctcgagggcgtcaagagaaaaatggatcaaggaaactacacttcagtgctcgagttctccgacgatatcgtgaagatcatacaggcagccataaactctgatggaggtcagccagaaataaagaaggcaaattctatggtaaaatctttcttcatcaggcagatggagcgtgtgtttccttggttttccgtcaagaaaagccggttctgggaacccaacaaggtgtcctcaaatagcgggatgctgcccaacgccgtgttgccaccgtccttggatcacaactatgcacagtggcaggagcgcgaggagaactctcacaccgaacagcccccactaatgaagaaaatcatcccggcaccaaagccaaagggcccaggcgaacccgatagcccaacccctcttcatcctccaaccccgcctattctgtccacagataggtctcgcgaggactcaccggaactcaacccccctcctggcattgaggacaacagacaatgcgcattgtgtctcacatacggggatgactcagctaacgatgcgggacgtcttctgtatattgggcagaacgaatggacccacgtcaattgcgctctctggtcagcggaggtgttcgaggatgacgatggatccttgaagaacgtccacatggccgtgatcaggggcaaacaactccgatgcgagttttgccagaaaccgggagccacggtgggatgctgtctgacaagttgtacatctaattaccatttcatgtgttcccgcgctaagaactgcgtcttcttagacgataaaaaagtctattgccagaggcatcgtgacctaatcaagggtgaggtcgtccctgagaacggattcgaggtttttagaagggtattcgtggactttgagggaatttccctcaggcgaaagtttttgaatggcctagagcccgagaacattcatatgatgattgggtcaatgacgatagactgtctaggcatcttaaacgacctcagcgattgcgaggacaagctgtttcctatcggctatcagtgtagtcgggtctactggagcacaactgacgcgcgaaaacggtgtgtatacacttgtaaaattgtggagtgtcgaccacctgtcgtggagcccgatataaatagcacagtggaacacgacgagaacaggaccattgcacactcaccaactagtttcactgaaagttcaagcaaagagagtcagaatacagccgagattataagtcctccctcaccggaccgaccaccccactcacaaaccagtggttcctgctattaccatgtgatttccaaggtacccagaatcagaactcctagctattcccccacccaaagatctccgggatgtagaccattaccttcagccggatcccctaccccgacgacccatgagatcgtcactgttggtgaccctctccttagctccgggctgcgctccatcggcagtaggaggcacagtacctctagcttaagcccgcagcgcagtaaattgcgaatcatgtcccccatgagaacaggcaacacatattcccggaataacgtgtccagtgtctcgacaaccggcaccgcaaccgatttggaaagctcggctaaggtagttgaccacgtcctgggacccctgaactcctccaccagcctgggccagaacacgagcacaagcagtaatttgcagcggactgttgtgacagtaggtaacaagaactcccatctggatggtagctcttccagcgagatgaaacagtcatccgccagcgatctggtgtcgaagagtagtagccttaagggtgaaaagacgaaggtcctgagttccaaaagcagtgagggatctgctcacaacgttgcttaccccggaatcccaaagctggctcctcaggtgcataacactacatcaagagagttaaatgtctccaagattggctcctttgcagaaccttctagcgtaagctttagcagtaaggaggccctgtcatttccccaccttcatcttcgtggacagaggaacgatcgagatcaacacacagactctacgcagagcgcgaattccagcccagatgaggatacagaagtgaagaccctgaagttatctgggatgagtaaccgcagctcaattataaacgaacatatgggttcctccagcagggacaggcgccagaaagggaaaaagtcctgtaaggagacatttaaagagaagcactcttctaagtccttcctggagccaggacaagtgacaacgggcgaggagggaaatctcaagcctgagtttatggacgaagtcctaacccccgaatatatgggacagcgaccatgcaataacgtcagctccgataagatcggggataaaggactatcaatgcctggtgttcccaaggctccacctatgcaggtggagggatctgctaaggaattgcaggccccaagaaagcgcacagtgaaagtgacactgaccccactgaaaatggagaacgaatctcagtctaagaacgcactgaaagaatcttctccagctagccccttgcagatagaatccacaagccctacagaacccatctcagcctctgaaaatcccggagacgggccagtagctcaaccatccccaaacaatacgagctgccaggactcccagtcaaataactatcagaatctgcccgtacaggatcggaatctgatgctcccggatggaccaaagccccaggaagacggcagttttaagaggcgatatcctagaagatctgcaagagcaaggtccaacatgttcttcggcctgacacccctgtatggagtgaggtcctatggggaggaggacatccctttttacagttcttctaccggcaaaaagagggggaaaagatcagcagaggggcaggtggatggtgccgacgacctctccacgagcgatgaagacgacctgtattactataatttcactcgcaccgtgatcagctcgggaggagaggagcgcctggcctcccacaacctgtttagagaagaagagcagtgtgatttgcccaagatttctcaactcgacggagtcgatgatggaaccgaatcagatacttcagtcaccgccactactcgcaagtcaagccagatcccaaagaggaacgggaaggagaatggtacagaaaatcttaagatcgaccgacctgaagacgccggagaaaaagaacatgtcacgaagtcttccgtgggccataagaatgagcccaaaatggacaactgtcactctgtgagtcgagtaaagacacaggggcaagactctctggaagcccagctcagttccctcgaaagctctcgacgagttcacacttctactccgagtgacaaaaatttgcttgacacttacaacaccgagctattgaaatccgatagcgacaataacaattctgatgactgcggcaacatcttgccttctgacataatggattttgttctgaagaacaccccttctatgcaagccctgggtgaaagccccgaatcgtccagtagtgaactccttaatctgggcgaaggactgggactggatagtaatagagagaaagatatgggtctctttgaagtgttcagccagcagctgcccaccactgaacctgttgatagtagcgtgtcctcttccatttcagctgaggagcagtttgagcttccactagaacttccatccgatctgagcgtcctgaccacccgctccccgacagttcccagccaaaatccttcgagactggctgttattagtgattcaggagaaaagagggtaactattaccgaaaaatccgtggctagttccgagagcgatcctgccctgttgagccctggggtcgatccaaccccagagggtcatatgactcctgaccacttcattcagggccacatggatgcagatcatatttcctccccaccgtgtggtagtgtggaacaaggccacggcaacaatcaagatttgacaaggaactcctcaacaccaggcttgcaggttcctgtctctccaactgtacccatccaaaaccagaaatacgtccctaactccacagatagcccgggacccagccaaatcagcaacgctgcagtccagaccactcccccacatttgaaacccgctaccgagaagttaattgttgtaaaccagaacatgcaaccactgtacgttctgcagactcttcctaatggagtgacgcagaagattcagctcactagcagcgttagctcaaccccatccgtaatggaaaccaatacctcagtgctcggccctatgggaggaggtcttaccctaactactggacttaatcccagtctgcctactagccagtcccttttcccatccgcttctaagggactcttacccatgtctcatcaccaacacctgcactcctttcctgcagcaacccagagctcttttcccccaaatatctccaatcctccttccggattgcttattggcgtccaacctcctcccgaccctcagttactagtgagtgagagttcccagcggacagatctgtctacaactgtagctactcctagcagcgggctgaaaaaaaggccaatctcccggctacagaccaggaagaataagaaactagccccaagtagcactccctctaatatcgcaccatctgacgtggtgagtaatatgacccttattaattttactccctcccagcttccgaaccaccccagtttactagacctgggatcgctgaatacaagctcccaccggacggtgccaaatattataaaacggtctaaaagtagtattatgtacttcgagcccgctcccttgctgccgcagagcgttggaggaaccgctgctacagccgctggaaccagcaccattagccaggacaccagccatctgacttccgggagcgttagcggcctggcctcatcgtcgagcgtactgaacgtagtgtccatgcagacaaccactaccccaactagcagtgctagtgtgcctgggcacgtaacattaacaaatcctcgtcttctgggcacccctgacatcggaagtattagtaacttattgatcaaagctagccagcagtcacttggcatacaggatcagccagttgctctgcccccatcttccggcatgttcccccagctagggacttcccagacaccgtcaaccgctgctattactgcagcttccagtatatgcgtcctgccaagtacccaaaccactggcataaccgccgctagcccctccggggaagctgacgaacactaccagctgcagcacgtgaaccagctcctggcaagcaagacagggatacattcttcacagcgcgatctcgattcggcgtctggccctcaagtctctaatttcacccaaaccgttgatgccccaaatagcatggggttggagcagaacaaagctctttcttccgctgtccaggccagccctactagtccaggaggatctccatcttcgcccagttccgggcaacgtagtgcctctccttccgtgcctggtccaaccaagcccaaaccaaaaaccaagcgatttcagcttccgctggataaagggaatgggaaaaagcacaaagtgagccatttacgcacctcttcctctgaggcccatatcccagaccaggagaccacctccttgactagtggcacagggacgccaggcgctgaggccgagcagcaagacactgccagcgtcgaacagagctctcaaaaggaatgtggacaaccagccggtcaagtggcagtactgcctgaggtgcaagttactcagaatcctgccaatgagcaagaatccgctgagccgaaaacagtagaggaggaagaaagcaatttcagcagtcctttgatgctttggctgcaacaagaacagaagcgcaaggagtcaatcacagaaaaaaagccaaagaaaggccttgtgtttgagatatcctctgacgatgggttccagatttgtgcggagtcaatcgaagatgcctggaaatctcttactgacaaggtgcaagaggccagaagtaacgctcggctgaagcagctgagcttcgcaggtgttaacgggctacgtatgttaggaatcttacacgacgctgtagtgtttttaatcgaacagctgagcggtgccaaacattgtcgaaattataaattcaggttccataaaccagaggaggccaatgaaccgcctctaaatccgcacgggagcgcacgggcagaggttcatctgagaaagagcgccttcgatatgtttaactttctagcatccaagcacagacagcctcctgagtataatcccaacgacgaagaagaggaggaggtgcagctcaagagtgcacgccgtgcaacgtctatggatctgccgatgccgatgcggttccgccacctgaaaaaaaccagtaaagaggcggttggcgtttacagaagtccaatccacggcagaggattgttttgtaagagaaacatcgacgctggagaaatggttatagagtatgccggaaacgtgatccgctctattcagaccgataagcgcgaaaagtattatgattccaaaggcatcggttgttacatgttcaggatcgatgacagcgaggtggtagacgctaccatgcatgggaatgccgcacggtttataaaccactcatgtgagcctaattgctattctcgggtaatcaatattgatggccagaaacacattgtgatttttgcaatgagaaagatctatcggggagaggagcttacctatgactataaatttcctattgaggatgcctccaataaactgccttgcaattgtggtgcaaagaagtgtcggaagtttctgaatta

SEQ ID NO: 231427 - DNA, 11910 bp, synthetic construct
  misc_feature 1..11910: note = Description of Artificial Sequence: Synthetic coding sequence
  source 1..11910: mol_type = other DNA
atggcgcattcatgtaggtggagattccccgctaggcctggtaccaccggcggtggcggaggcggtggaaggaggggacttggcggagcccctcggcagagggtgcctgctctcttgctgccaccagggccacctgtgggcggtggaggacctggagctccgccatcccctcctgccgtggctgccgctgcagccgctgccggatcctccggcgcaggggttcctggaggcgcagctgcagcttcagctgcaagtagctccagtgcaagctcgagcagctctagctcctccagtgccagcagtgggccagcccttctgagggtcggacctgggtttgatgctgcactgcaagtctctgctgctatcggcacaaacctgcgcaggttccgcgctgttttcggcgagagtggcggtgggggaggatccggagaggacgagcagtttctcggctttggcagcgacgaagaggtgagggtccgttcacccacacgaagcccctctgttaagacttcacccagaaagccacggggtcgacctaggtctggttcagaccggaattctgccattctctctgatccctcagtattcagccccctgaataaatctgagaccaaatccggagacaagattaagaagaaggactcaaaatcgattgagaaaaaaaggggccgtccacccacatttcccggagtcaaaatcaaaattactcatggtaaagacatctccgaactgcccaagggcaacaaggaggactctctgaaaaagatcaagcgtacaccctctgctaccttccagcaggccacaaagatcaagaagctaagggcaggcaagctcagccctctcaagagtaagtttaagacaggcaaactgcagataggcagaaaaggcgtgcagatcgtgcgcagaagggggaggcccccttctactgaacgtattaagacgccatctggtctcctgataaatagcgagctggagaaacctcaaaaagtccggaaagataaggaagggacgccacccctgaccaaagaagataagacggtggtaaggcagtctccgaggaggattaagcctgtgaggatcatccccagcagcaaaaggactgatgccaccattgccaagcaactcctgcagagagcgaaaaaaggcgctcagaaaaagatcgagaaggaagccgctcaactccagggaagaaaagtgaaaactcaggtcaagaacattaggcagttcatcatgcctgttgtctctgcaatttctagcagaattatcaagactccaagaagattcatcgaggatgaagattacgatccacctattaagatcgctcgccttgaatcaactccgaatagcaggtttagcgccccatcatgtgggtcaagcgaaaagtcgagtgccgcttcacaacattcctcccagatgtcaagcgatagctctaggtctagctcccctagtgtcgataccagtactgattctcaggcaagcgaagagatccaagtgctgccagaggagcgcagtgacacccctgaggtacatcccccactgccaataagccagagcccggaaaatgaaagcaacgaccgcaggagcagaaggtatagcgtgtccgagcggtcctttgggtcaaggactacaaaaaagctttcaacactccagtctgcgcctcagcagcagacgagctcctccccccctccgccactactgacaccccctccacccctgcagccagcgtcttctatctcagaccatacgccttggctgatgccacctaccattcctctggcatctccgtttctcccagcgtccacagcccctatgcaaggcaagcgtaaatctattcttcgtgagccgacatttcgttggacctctttgaagcactctaggagcgagcctcagtattttagttctgcaaagtacgccaaggaaggtcttatccggaaacctatcttcgacaactttcggccacctcctctcacccccgaggacgtggggttcgcctcagggttctccgcttccggcacagctgcctccgcacggctgttcagcccactacacagtggaactcggtttgatatgcataagcgaagcccattgctgagagccccaagatttactcctagcgaagcacactcacggatttttgagtctgtgaccctgccttcaaaccgtacctctgccggaacatcttccagcggagttagtaaccgaaagagaaagcggaaggtcttctccccaatccggagcgaacccaggagtccctcacattccatgaggacacgatcaggaagactcagttccagcgagttgagccctctcactcctccttcatccgtaagctcctcattgtctatttccgttagtccactggccacaagcgcactgaatccgacatttacattcccctcacattcactcactcagtccggagagagcgccgagaaaaaccagcgaccgagaaagcagactagtgcccctgccgaaccattttcttcatcttccccaacgcctctgttcccctggttcacccccggatcacagaccgagcggggtagaaacaaggataaggctccagaggaactgtcaaaagatcgcgatgctgataaaagcgtagaaaaggacaagtctcgagagagagaccgagaacgcgaaaaggaaaacaagagggagagtcgtaaagagaaaaggaagaagggctccgagatccagtctagctccgcactgtatcctgtcggacgcgtgtccaaggagaaggtggtgggtgaagacgttgccacctctagcagcgcaaagaaggctacagggaggaagaagtcatcttctcacgatagcgggactgatatcaccagtgtgacattaggcgatactacagcagttaaaactaagatcctgatcaagaagggtcgtgggaatctggaaaagacaaacctggatctgggcccaacggccccttccctggagaaagaaaaaactctctgtctaagcaccccctcatcaagtactgttaagcacagcacctctagtatcggttctatgctcgcccaggcagataagctgcccatgaccgacaaacgcgtggccagcctgctgaagaaggctaaggcacagttgtgcaaaatcgagaaatctaagtctctgaagcaaaccgatcagccaaaggcccaaggacaagagtccgactccagcgaaacaagtgtccgtggccctcggatcaaacacgtgtgccgacgcgctgcagttgcactgggaaggaagagagccgtgttccccgatgacatgccaacactgtccgccctgccttgggaggagcgggagaaaattctatccagcatgggaaatgacgacaaatcaagtatagctgggtccgaggacgcagagccattggccccacccatcaagcctatcaagcccgttaccagaaacaaagcccctcaggaacctccagtgaagaaggggaggaggtcgcgaaggtgcggccaatgccctggatgtcaggtgccagaggattgcggtgtctgcacaaattgtctggacaaaccaaagtttgggggtcgcaatatcaagaagcagtgttgcaaaatgcgcaagtgccagaatctccagtggatgccatccaaggcatacctccagaaacaggcgaaggccgtgaagaaaaaggaaaagaaaagcaaaacctccgagaagaaggatagtaaagaaagttccgtcgtgaagaatgtggtagattcctctcagaaaccaacaccctctgctcgcgaagaccctgcaccaaagaagagtagctcagagcctccgccaagaaagccagtagaagagaagtccgaggaaggaaatgtttctgcccctggcccagaatctaaacaggctaccacacccgcaagccgtaaaagtagtaagcaagtgagtcagcccgctctcgtcattcctccacagccccctacaaccggaccacctcgtaaggaggtcccaaaaacaacgcccagcgaaccgaagaaaaagcagccgccacccccagaatcaggtcccgaacaatcaaagcagaaaaaagtggccccaagaccaagtattcctgtgaagcagaagcctaaagagaaggaaaaaccacccccagtgaataaacaggagaacgccggaacgctgaatatcttgagcacactatccaacggcaatagctccaagcaaaaaatcccagccgatggagtgcataggattagggttgactttaaggaagactgcgaggctgagaacgtctgggagatgggaggcctgggcattctaacttccgtgcctatcactccccgagtggtgtgcttcctgtgtgcctcttctggccacgttgaattcgtgtactgccaagtgtgttgcgagccatttcataagttctgcctggaagagaatgagcggccattggaagaccagctagaaaattggtgttgccgaaggtgcaaattttgccatgtatgcggacgccaacatcaggcaaccaagcaacttctggaatgcaataagtgccgaaacagctaccatcctgaatgtctcggaccaaactatcccactaagcctacaaagaaaaagaaggtttggatatgtactaaatgcgtgcgttgtaagtcctgcggctccacaacccccggtaaaggctgggatgcacagtggagccacgactttagtctgtgtcatgactgcgcaaagctgttcgcgaaaggtaatttctgccccctgtgcgataagtgttatgatgatgacgactacgagtctaaaatgatgcagtgtggcaaatgtgaccgctgggtccactccaagtgcgagaacctgagcgatgaaatgtatgagattctaagcaatcttcctgaaagcgtggcctacacttgtgttaattgcactgaaagacatccagctgaatggagactggctttggaaaaggagctccagatatccctgaagcaagtcctgactgcattgcttaattctcgcacaacaagtcatctgctcagatatcgacaagccgctaagccccctgatttaaatcccgaaaccgaggaatccatcccatcaaggtcaagtcccgaaggccctgacccaccagtcctcactgaggtgagcaagcaggacgaccagcagcctttggatttagagggcgtgaagcgaaagatggatcagggtaactatacatcagtgttagaattttcggacgacattgtaaagatcattcaagcggctatcaattccgacggagggcaaccggaaattaaaaaagccaattccatggtcaagagctttttcatcaggcagatggagcgcgtgttcccttggttttcagttaaaaagtctaggttctgggagcccaacaaggtgtctagtaactctggaatgctccctaacgccgtgctgcccccaagtctggaccacaactacgctcagtggcaggagcgcgaagaaaactcgcatactgagcagcctcctttaatgaagaagatcattcctgcacctaagcccaaggggccaggcgaacccgacagtccaacacctttgcatccgccaactcccccaattcttagcactgataggagcagagaagactccccagaactcaatcctccgcctggcattgaagacaaccgccaatgtgccctgtgcctgacttatggcgatgactccgccaacgacgccggacggcttctatatattggccagaacgagtggacgcatgtgaattgcgcgttatggtcggccgaagtcttcgaggacgatgatggcagtctcaaaaacgttcacatggcagtaattcgcggtaagcagcttagatgtgaattctgccagaagcctggcgcaaccgtcggttgttgtctgactagctgcacctcaaactaccattttatgtgttcaagagcaaaaaactgtgtattcctggatgacaaaaaagtgtactgccaacgccaccgggatctgatcaaaggagaggtcgtgccagagaacggcttcgaggtgttcagaagagtgtttgtggatttcgagggcatttctttgcgccgaaagtttctaaacggcctggagcctgaaaatattcacatgatgataggatccatgacaatcgactgtttagggattctgaatgaccttagcgattgtgaggataagctgtttccaattggataccaatgtagcagggtatactggagcacaactgatgcgaggaagaggtgcgtttacacatgcaaaatcgtcgagtgcaggccgcctgtggtcgaacccgacattaacagtactgtcgagcacgacgagaataggacaattgcacacagccccaccagctttacagagtcgtctagcaaagagtctcagaacacagctgagataattagccccccaagtccagatcgtccgccacactctcagacgtcaggatcctgctattatcacgttatctccaaagtccctaggattcgcacaccttcctactctcctacacaacgcagcccaggctgccggccattacctagcgcagggtcccccacccccacaacccacgagattgtcaccgtgggcgatcctttactatctagcggactacgctctataggctctaggagacattcaacaagctctcttagcccccaaagaagcaaactgagaattatgagccccatgagaacaggaaatacatacagtaggaacaacgtctctagtgtctctactacgggtactgccactgatctggagagctcagccaaagtggttgaccacgtgctgggacccctcaacagctccacgtctctcggtcaaaacacaagcacatccagtaatcttcagagaacggtggttactgtcggcaataagaatagtcatctggatgggagttccagttccgaaatgaaacaaagctctgccagtgacctggtgagcaaaagctctagtctgaagggggaaaagacaaaggtgctcagctcaaagtcaagtgaaggcagcgcccacaacgtggcctatcccggaatacccaagttggctccacaggtccataatacgacgagtcgtgaattgaatgtatctaaaattggctcatttgccgagccctccagcgtgagctttagctctaaagaagccctgagttttccgcacctgcacctcagagggcaaaggaatgatagggaccaacataccgattctacccagtcagccaattcgtcacccgatgaagacaccgaggtcaagaccctcaagctctctgggatgtctaaccggagtagcatcatcaatgagcatatggggagctcctctcgggatagaagacagaaaggcaagaagtcgtgtaaagaaaccttcaaagaaaaacacagcagtaaatcatttctagagcccggacaggtgaccactggagaggaggggaatctcaaacccgagttcatggacgaagtgctaacgcctgaatatatggggcagcgcccatgcaataatgtgtccagcgataagataggtgacaagggattaagcatgcccggagtccccaaagcccctccaatgcaggtggaaggttccgccaaggagctacaggctccacggaagagaaccgtgaaagttacactaacaccgttaaaaatggagaacgaatctcagtccaagaacgctttaaaagagagttcccctgcgagcccactgcagatcgaaagtacgtcacctacggagccaatctcagcatcagagaatccgggagacggacctgttgcccagccttccccaaacaataccagttgtcaagatagccaaagcaataattaccagaacctgcccgtgcaagaccgcaatctcatgcttcccgacggaccgaaaccacaagaagatggtagcttcaagcggagatacccaaggagatcagctagggcacgaagtaacatgttcttcggactcactcccctctacggcgtgaggtcgtatggagaagaggatatccctttttatagttcgagcacaggtaagaagaggggcaagagatccgcagaaggccaggtcgacggcgctgacgatctcagcaccagcgacgaagatgatctatattactacaacttcaccaggacagtgatatctagtggcggagaggaaagactcgcatcacataacctgtttcgggaagaagaacaatgtgatcttcccaagatctcacaactggatggagtcgacgacggaactgagagcgatacaagcgtgactgccactacacgcaagtcaagccaaattccgaagagaaacggcaaggagaatgggacagaaaacctaaagattgatcgacctgaagatgccggtgaaaaagaacacgtgacaaagagcagcgtaggacacaaaaacgagcccaaaatggacaattgtcacagcgttagtcgcgtaaaaactcaggggcaggacagcctggaagcacagctgagcagcctggagtcttcccgacgggtgcacacatcaacgccctccgacaaaaatctgctggacacttacaacaccgagttactaaaaagcgattcagataacaataattctgatgattgcggaaacattttgccaagcgatatcatggacttcgtcttgaagaatacgcccagcatgcaagcactcggtgaaagtccagagagttcgagttccgaactgttgaacctcggagagggcttagggctcgattctaaccgggagaaggacatggggctgtttgaggtctttagtcagcagctgcccacaacggagcctgtggatagctccgtgagcagctctatttccgctgaagagcagttcgagctgcccctggaattacctagcgacttatcggtgctcaccaccaggtccccaactgtcccttcacagaacccctcacgcctggctgttatcagtgattccggggagaagcgggtcacaatcactgagaaatctgttgccagctccgaaagcgatcccgcactgctgagcccgggtgtggacccaacacccgagggacacatgacaccagaccacttcatccagggccacatggacgccgaccacattagttcccctccttgcggtagcgtggaacagggtcacggaaataatcaggacctgacgcgcaattcatctacgccgggtctacaggtgccagtgtcacctaccgtgccaatacagaatcagaaatacgtccccaacagtactgactctcccggtcctagtcagatctcgaacgcagctgtgcagactactccgcctcatctcaagcctgcaacagaaaaacttatcgtcgtcaatcagaatatgcaacccctctacgtattacagactctgccaaacggcgtcacccagaagatacagcttacgtcctcggtttcgagcactcccagcgttatggaaacgaatacctctgttctgggaccaatgggagggggacttacattaaccacagggttgaacccatctctgccgaccagccaatccctcttccctagtgcctctaagggattgctgcctatgagccatcaccagcatctgcactctttccctgccgcaactcagagtagcttccccccaaatatttcaaaccctccttctgggctgttgatcggcgttcaacccccacctgatcctcagcttctggtgtcagagagcagccagcgcacagacctttctacaacagtagctacgccctcgtccgggctgaaaaagcggcctatctcgagactccaaacaagaaagaataagaagctcgccccaagctctacacctagcaacattgcaccaagcgatgttgtgagcaacatgacactgataaattttacgccctcacagcttcctaatcatccatcactacttgacttagggtccctgaatacaagtagtcatcggactgtacctaatattatcaagcgctctaagtctagcataatgtattttgaacccgctccactcctcccccaatctgtcggaggcactgctgctacagccgcaggcacctccaccatctctcaagacactagccatttgacttccgggagcgtgtccggcctggcctctagttcttcagtgctgaatgtcgtgtcaatgcagaccaccaccacacctacgtcttccgccagcgtgccaggacatgtcacactcaccaacccccgactcctgggtaccccagatatagggtcgatctccaacctccttattaaggcttcgcaacagagcttgggcatccaggatcaaccagtggctctgcccccaagctcaggtatgttcccccaactggggacgagccaaaccccgagtactgcagccattacagcagctagctctatctgtgtgctgccaagcactcagactaccggtatcacagccgcttctcccagcggggaggcagacgaacactaccagctccagcacgtaaatcagctgctggcttcaaaaacaggcattcattcctcacagcgagacttggactctgcaagcggcccacaggtcagcaacttcactcagacagttgacgctcctaattccatgggactcgagcagaacaaggccttatcttccgcagttcaggcaagtcctacgagccccggaggatcccccagctcacccagcagtggacagcggtcggcaagtcccagtgttcctggacccacgaagcctaaacccaaaaccaaacggttccaactgccgctcgataagggaaatggtaagaagcacaaagtcagccatttgaggacttcctcgagtgaagcacacatcccagaccaagagacaacctccctgacatctggcacgggaacccctggggcagaggcagagcagcaggatactgcctcagtcgaacagtcctcacaaaaagaatgtggtcagcctgcgggacaggtagccgtcctgcccgaagtacaggtgacacagaatcccgcaaacgaacaggaaagcgccgagccaaagaccgtggaggaggaggagagtaacttttcatcccccctgatgctatggctccaacaggagcagaagagaaaggaaagcatcaccgagaaaaagccaaagaagggattggtgtttgaaatatctagcgacgacggattccagatttgtgccgagagcattgaagacgcgtggaaaagcctgaccgacaaagtgcaggaagcacgttccaatgccaggctgaagcagctgagttttgctggcgtgaatggactgaggatgctcggaatcctccatgacgcagtagtctttctgatcgagcaactgagtggggctaagcattgtcgaaactataagttccgatttcataaaccagaagaagcgaatgagccgcctctgaacccacatggaagcgctagggccgaagtgcatctgcggaaatcggctttcgacatgtttaacttcctagcctccaagcaccgccagccacctgaatataacccaaacgacgaggaggaagaggaagtacagctgaagagcgccagacgagcaactagtatggatcttccaatgcccatgcgttttagacacctgaaaaagacatcgaaggaagctgtgggggtataccggtcacctatccacggcagaggccttttttgcaaacgcaatattgatgccggagagatggtaatcgagtacgcaggtaacgttattcggtcaatccagacagataagcgtgagaaatattatgactcgaaaggcattggatgctatatgtttaggattgacgattccgaggtggtcgatgcaaccatgcacggaaatgctgcaaggttcattaatcacagctgcgaacccaactgctattccagggtcatcaatattgacgggcagaagcacatcgtgatttttgctatgaggaagatctacaggggagaggagctgacctatgattataaatttcccatcgaggatgctagtaataagctgccatgcaactgcggagcaaagaagtgccggaagtttctcaattag

SEQ ID NO: 231428 - DNA, 336 bp, synthetic construct
  misc_feature 1..336: note = Description of Artificial Sequence: Synthetic coding sequence
  source 1..336: mol_type = other DNA
gacttcaaggacgagcagtttctggggttcggcagcgatgaggaggtgcgtgtgcgctcccccaccagatccccctcaggaagtatgctggcacaggcggacaagttgcccatgacggataaaagggtggcatctttacttaagaaagcaaaggcacagttgtgtaagattgagaagtccaagagcctcaagcagacagaccaaccaaaagcacagggacaagagagcgactcgtctgagactagcgtcaggggccctagaatcaaacacgtgtgtcgtagggcagcagtggcgctgggcaggaaaagggccgtgtttcctgatgatatgccttag

SEQ ID NO: 231429 - DNA, 4320 bp, synthetic construct
  misc_feature 1..4320: note = Description of Artificial Sequence: Synthetic coding sequence
  source 1..4320: mol_type = other DNA
atggcccatagttgcaggtggcgcttccctgccaggccagggactaccggaggcggaggcggaggtggaaggcgaggcctgggtggcgcaccgaggcagcgcgtacccgcattattattgcccccagggccacccgtcgggggtgggggaccgggagctcccccttcgccaccagccgtggcagctgccgctgccgctgccggaagttccggagcgggtgtgccgggtggagcggcagccgcatccgccgctagctcttcatctgcctcgagcagtagcagcagctcctcatccgctagtagcggccctgcactcctgcgggttgggccaggattcgacgccgcactgcaggtcagcgcggctattgggaccaacctgcgacgcttccgagctgtatttggggagagcggcggaggaggcggtagcggagagcttacaactcagatcccctgctcttggagaaccaaagggcatattcacgacaagaagacagagcctttccggctcctggcctggtcctggtgtctaaatgacgaacaattcctgggattcggatcagacgaagaggtgcgtgtcagatctcccacaaggtccccatcagtcaagacttcccctaggaaacccaggggcaggccccgttctggcagcgacaggaacagtgctattttgagcgatccttctgtgttctctcccttgaacaaatccgaaactaagagtggggataaaattaaaaaaaaagattcaaagtctattgagaagaagagaggtcgtccacccaccttccctggagttaagatcaagattacgcatggcaaggatatctctgaattacctaaaggtaataaggaggatagtcttaaaaaaatcaaaagaactccgagcgccactttccagcaggccacaaagattaaaaaactgagggcagggaaattatcccctctgaagagtaaattcaaaacgggcaagcttcaaattggccgtaaaggggtccagattgtgagacgacggggacggcctccctccaccgagcgcattaagacaccgagtggccttcttatcaattctgaactcgagaagccccagaaagttagaaaagacaaggaggggactcccccactgaccaaggaggataagacagtggtacgtcagtcacccaggcgtattaaaccggtgagaataattccaagtagtaagaggaccgatgccacaatcgcaaaacagcttctccaacgggctaagaagggggctcagaaaaagatcgagaaagaagccgctcaattgcaagggaggaaagtcaagactcaggtcaaaaatattcgacagtttatcatgccggttgtctctgccattagctcgcgcataattaagactccaagaaggtttattgaagatgaagactatgatcctcccataaagatagccagactggagagcactcctaacagccggttctcggccccttcctgtggaagcagtgagaaatcttccgctgcctcacagcactccagccagatgtcaagcgatagctctcgtagcagtagcccctctgtggatactagcacagatagccaggctagcgaggaaatccaggtcctgccggaggagagatctgataccccagaggtgcacccccctctgcccatatcgcagtctcccgaaaacgagtcaaatgatcgtaggtctcggagatacagtgtctctgagcgatcattcgggtccagaaccaccaagaaactgagtaccttacaaagcgccccacagcagcaaacatccagctcccctccacctccactcttgactcctcctcctcctctccagcccgcttcttctatttccgatcacacaccttggcttatgcccccaaccatcccactcgcttcgcccttccttccagcatcaacagccccaatgcagggaaaaaggaagagcattcttcgggagccaacgttccggtggacctccctgaagcactctagaagcgagccccaatacttttctagtgccaagtacgcaaaagagggcctaattcgcaaacctatctttgacaactttaggcctccccctctgacaccagaggatgtaggattcgcatcgggcttcagcgcctcagggacagctgcttctgctcggctgttcagcccgttacattccggaactcgttttgacatgcataagagatcccccctgttgcgagcgccaagatttacaccaagtgaggctcactccagaatttttgaaagcgtaaccctgccctccaatagaacgtccgctggtacctccagttccggggtcagcaaccgtaagcggaagaggaaggtattctccccgattcggagcgagcctcggtctccctcccacagcatgagaactaggtcaggccgactctcctcatcggagctgagtcccctgactccccctagtagtgtgtcttcttcccttagtatcagcgtgtccccactggccacctcggcgctcaaccccaccttcacattcccatcacattcccttacacagagtggtgagtctgcagaaaagaatcagcggccacgcaaacagaccagcgcccctgccgagcccttctctagctcaagcccaacccccctatttccttggttcacacctggcagccagaccgaaagaggcagaaataaagacaaagcacccgaggaactctccaaagaccgggacgctgataagtcagtcgagaaggataagagcagagagcgagaccgagagagggaaaaagagaataagagagagagtagaaaagagaaaagaaaaaagggctccgagatccaatcaagtagcgcactctatcctgttggaagagtcagcaaggagaaggtagtcggtgaagatgtcgcgacctcttccagtgcaaagaaggctaccggcaggaaaaaaagttcctctcacgactccgggaccgatatcacatcggttactctgggtgacaccaccgccgtgaagacgaagatattgataaaaaaggggaggggaaacctcgaaaagaccaatctggatctgggaccaaccgctccgtcactggagaaagaaaagacattatgcctctccacccccagcagctctactgtgaagcatagcactagctctatcggttcaatgttggcccaggccgacaaactgccgatgaccgataaaagggtggcctccctactgaagaaggctaaggcccaactgtgcaagatagagaaaagcaaaagcttgaagcagactgatcagcccaaagcccaagggcaggagtccgactcatccgagacatctgttaggggacccagaattaagcatgtgtgtcgccgtgcggctgtagcattgggacggaagcgagccgtattcccagatgatatgccaactctgtctgccctgccgtgggaggagagagagaagattctttccagcatgggaaacgatgacaagtcaagtatcgcagggagtgaagatgctgagccgctcgccccacctatcaagcctatcaaacctgtgaccaggaataaagcccctcaggaacctccagtaaagaagggcagaaggtcacgaagatgtggacagtgtcccggatgtcaagttccagaagactgtggggtatgcacaaactgcctggataaaccaaaatttgggggaaggaacataaaaaagcaatgctgtaaaatgagaaagtgccagaatctgcagtggatgcccagtaaagcctaccttcagaaacaggctaaggcagtgaagaagaaggaaaaaaaatccaagaccagtgaaaagaaggactccaaggaatcctccgtcgtgaagaatgtagtggacagcagtcaaaagcccacgccatctgccagggaggatcctgctcccaagaagagttcaagcgaaccaccgcctaggaagccagttgaggagaaaagtgaggagggcaatgtgtccgccccagggccagagtccaagcaggcaacaactcccgcaagccgcaaaagctcaaaacaggtctcccagcctgccctagtgatcccaccacaaccgccaaccaccggcccaccccgaaaggaagttccaaagaccactccatccgagccaaagaagaaacagccacccccacctgaaagtggccctgaacaatccaagcagaaaaaggtcgctcctcggccatccatcccagtgaagcagaagcctaaggaaaaagagaaaccccctcccgtaaataaacaggagaacgctgggactcttaatattttaagcaccctgtcgaatggcaattccagtaagcaaaagatcccggcagacggtgtgcaccgcatcagggttgactttaagtag

SEQ ID NO: 231430 - DNA, 11919 bp, synthetic construct
  misc_feature 1..11919: note = Description of Artificial Sequence: Synthetic coding sequence
  source 1..11919: mol_type = other DNA
atggcccattcttgccgctggaggttccctgccaggcctggtaccactggcggtgggggtggcggaggacgccgtggactaggaggtgcgcctcgccagcgggtccccgcactcctgctgccaccaggtccgccagtaggcggaggtgggcctggtgctccaccatctcctccagccgttgcggcagcagccgcagctgctggctcgtccggagcaggcgtgcctgggggagctgccgcagcaagcgcggcaagttcatccagcgcctcctccagcagttctagctccagttcagccagttcagggccagcgctgctgcgggtgggcccagggtttgatgctgccctgcaggtgagtgcagctatcggcactaacctccgccgtttccgtgcagtgtttggcgagtccggtggcggaggtggttccggcgaggatgagcagtttctgggcttcggctctgacgaggaggttcgcgtccgatcacctactcgcagtccttcagtaaagacaagcccccgaaagccacgtgggcgtcccaggagcggaagcgatagaaacagtgccatcctatcggatcccagcgtatttagccctctaaacaagtctgaaactaagagtggcgacaagattaagaagaaggatagcaaatccatcgagaagaagagagggagacctcctacgttccctggggtaaagatcaaaataacccacggaaaagatatttcagaacttccaaaaggcaataaggaagactccctgaagaagatcaaaaggacgccctcagccacattccagcaggctaccaaaattaagaagttacgagccggaaagctgagccctttgaaatcaaaatttaaaaccgggaagctgcagattggaaggaagggcgtacagattgtcaggaggcggggacggccacctagcactgagcgcatcaagacaccttctggactgctcataaatagcgagctcgaaaagccgcagaaggtcagaaaagataaagaaggaaccccgcctctaacaaaagaagataagacggtggtgcgacagtcccctcggcgtatcaagcccgtgcgtattatcccaagcagtaagcgaaccgacgccacaatcgctaagcagctccttcagcgtgcgaagaagggtgcccagaaaaagatcgaaaaggaagccgcacagttgcagggccgtaaggtgaagacacaggtgaaaaatataaggcaattcatcatgcctgtggtgtctgctatttccagccgaattattaaaacccctagacgctttattgaggatgaagattacgatcctccgataaaaatagcaagactcgaaagtacccccaactcacgattttccgctccgagttgcggtagttcagagaaatcgtctgctgcctcacagcactcctcccaaatgtcaagcgactcatccaggtccagctctcctagtgtggacacgagcaccgactctcaggcaagtgaggagattcaagtcctgccggaagaacgcagtgataccccggaggtacaccctcccctgccaattagtcagtcccctgagaacgagtcgaacgacaggcgctcacggaggtacagtgtttctgaacggtccttcgggagcaggaccacaaaaaagttgtcaacgctacagtcggcccctcagcaacaaaccagtagttccccgcctccaccccttctcactcctcctcctcctttacagcccgcaagctcgatcagtgaccacactccttggctgatgcctcccactatacccctggcaagtccattcttgccggcttctaccgcgccaatgcaaggtaagcggaagtctatcctccgggaaccaacatttcgctggacttcactcaaacattcccgctcagagccccagtactttagcagtgccaagtatgcaaaggaaggcttgataagaaaaccaatcttcgacaactttagacctcctcccctgacccccgaagatgtaggttttgcgagcgggtttagtgccagcggaaccgcagcatctgctcgcctattttcaccactccactctggcacccggtttgatatgcacaagcgctcccctctcctgcgcgctcccaggttcactccatctgaagcgcacagccggatcttcgagtcggttactctgcccagcaacagaacttccgccggtacaagcagttcaggcgtaagtaacagaaagcgcaagcggaaggtgttctctccgattcgctctgagccgcgtagcccctcccacagtatgcgcacacggagtggcagactgagctccagcgagctaagcccgttgacgccaccatcttcagtctcctccagcttgagcatcagtgtgagtcccttagcaaccagcgccctgaatcctacgttcacctttccctcccactccctgacccagagtggagaatcagctgagaagaaccagcgccctcgcaagcagactagcgcgcctgccgaacccttctcaagttcctctccaacccctctgtttccatggtttacaccaggatctcaaactgaacgcggacgtaataaagataaggcccctgaagaactctcaaaggaccgggacgctgataagagtgtcgagaaggataaatcacgggagagagacagggagcgagagaaggaaaataagagggaatctcggaaagagaagcggaagaagggaagtgaaatccagagtagctccgctctctacccggttgggcgagtgtcgaaggaaaaggttgtgggtgaggacgtcgcaacttccagttcagccaagaaagctactggtcgcaagaagtcgagtagtcatgactctgggacagatataacttctgtgaccctgggcgatacaacagccgtgaagacaaagattctgatcaagaagggacgcggaaatctagagaagaccaatttagacctggggcctacggcaccctcattggaaaaggaaaagacattatgtctttccactccaagctcctccacagtgaaacattctacatcttctatcggttcaatgctggcccaggcagataagctgcccatgactgacaaacgggtggcttccctgctcaagaaagcgaaggcccaactctgcaaaatcgagaaaagcaagtcactgaagcagaccgaccagcctaaggcccaggggcaggaatccgactccagcgaaacgagcgtgcggggaccgaggataaaacatgtatgccggcgtgcagccgtggctcttggacggaaaagggccgtctttccggacgatatgccaacactgagcgctctcccgtgggaggagagggagaaaatactgtctagcatgggaaacgatgacaaaagttcaattgctggttctgaggacgctgagccattagcgccacctataaaaccgataaagcccgttacgaggaacaaagcccctcaggaaccaccagtgaagaaggggcgtcggtccagaaggtgcggacagtgccctggttgccaggtcccagaggactgcggggtgtgcacgaactgtctggataagcccaaattcggcggacgaaacattaaaaagcagtgctgtaagatgagaaagtgtcaaaacttgcagtggatgccttccaaggcgtatctccaaaagcaggctaaagccgtgaagaaaaaggaaaagaaaagcaaaacctccgaaaaaaaagacagtaaagaaagcagtgtggtgaagaacgtggtggactcttcacagaaaccaaccccttctgcccgagaggatccagctccaaaaaaatcctcttccgagcctccaccacgtaagcccgttgaggagaaaagcgaggaagggaatgtttccgcgcctggccctgagtctaaacaggccactacacctgctagtcggaagtccagcaaacaggttagtcaacccgctctggtcatccctccccagccaccaacaacagggcctccacgaaaggaggtacctaagaccacccccagcgaacccaaaaagaaacagccccctccacctgagagcggtcctgagcaatccaagcagaaaaaagtagcccctcggccatccatacctgtgaagcaaaagcctaaggagaaggagaagccacctccagtaaataagcaagagaacgcaggtacgttgaacatactatcgacactttcaaatgggaattcttctaaacaaaaaatcccggctgatggggtccacaggatacgtgttgactttaaggaagattgtgaagccgaaaatgtgtgggaaatgggcggactcggtattctgactagcgttccgatcaccccccgagtggtctgttttctctgtgcctcatctggccatgtagagttcgtctactgccaggtgtgctgcgagccgttccataagttctgtctggaagaaaatgagcgccctttggaggaccagcttgaaaattggtgctgcagaagatgtaaattctgccacgtctgtggcagacagcatcaggccacaaagcagttactggaatgtaataaatgtcgaaatagctaccaccctgaatgcctgggcccaaactaccccaccaaaccaacaaagaagaaaaaagtctggatttgcaccaagtgtgtgagatgtaagtcatgtggatctaccactccagggaagggttgggatgctcagtggagtcatgatttctcgctctgccatgattgcgcaaagctcttcgcaaagggtaacttttgcccactttgtgacaaatgctacgacgacgacgactatgaatccaaaatgatgcagtgtggaaaatgtgatcgatgggtccactccaagtgcgagaacctctcaggaaccgaggacgaaatgtatgagatactgtctaatttaccagaaagcgttgcatacacttgtgtcaattgtaccgaaagacatcccgcagaatggcggctggccctcgaaaaggaactgcaaatttccctaaagcaggttctgacagctctgctgaacagtcggactactagtcacctgctgagatatcgacaggcagctaagcctccggacctaaaccccgagaccgaagagtccattccgtctaggtcaagccccgaagggcctgatccgccagtgctaaccgaggtctccaagcaagatgaccagcagccactcgatctcgaaggagttaaaagaaagatggatcagggcaattacactagcgtcttggagttttccgacgatattgtgaaaattatacaagccgctattaattccgatggcggacagcccgagatcaaaaaggccaacagcatggtgaaaagctttttcatccggcaaatggaacgtgttttcccatggttctccgtcaagaagtcgcgattttgggaacccaataaggtctcctcgaatagcgggatgctgcccaacgcggtgctcccaccatccctcgatcacaactacgcacagtggcaggaacgagaggagaattcccacaccgaacagccaccactcatgaaaaaaatcatacccgcacccaaacctaaggggccaggcgaacccgactccccaaccccactccaccccccaaccccgcctattttgtcaactgaccgctcccgggaagattccccggagctgaatcccccacccggtatcgaggacaaccggcagtgcgcactatgcctgacctatggcgacgacagcgctaacgacgcgggaagactcctgtatattggccagaatgagtggacccacgttaactgcgcactctggtctgcggaggtgtttgaggatgacgacggctctctcaaaaacgtgcacatggccgtgattcgcggtaagcaattgcggtgtgagttctgtcagaagcccggagctaccgtggggtgttgtctgacatcctgtaccagcaattatcatttcatgtgtagccgggcaaaaaactgtgtgtttctcgatgataagaaggtctattgccaaagacacagggatttgataaagggcgaggttgtgcccgaaaatgggtttgaagtgtttcgaagagtctttgttgactttgaaggcatctccctgcgccgtaagtttctgaatggactcgagccagagaacatccacatgatgatcggaagtatgacaattgactgccttgggatcctgaacgacctgtccgactgcgaggataagttatttcctatcggctaccaatgctcccgagtttactggagtacaaccgacgcacgcaaacgctgcgtgtacacatgcaagatcgttgaatgccgcccaccagtagtggagcccgacatcaattcaacggttgagcatgatgaaaacagaaccatagcccattcacccacgagcttcactgagagctccagtaaggaaagccagaacacagccgagatcataagtccaccaagtccagaccggcctcctcactcacagacttccgggtcttgctactaccatgtgatcagcaaagtgcctagaatcagaactccgagctacagccctacccagcgctcccccggatgccggccacttccctccgcaggatcccccacccctaccacccacgaaatcgtcacggtgggggaccccctgcttagttccgggttaaggtcaattggatctcgtagacacagtacatcatctctaagcccccagcgcagcaagctgagaattatgtcaccgatgagaactggcaatacgtactccaggaataacgtttcaagcgtctctacaaccggcaccgccacagacctggagtccagcgcaaaggttgtcgaccatgttctagggcctctgaacagtagcacaagcctgggtcaaaacacatctaccagctctaacctccaacgcaccgttgtgaccgtcgggaataaaaacagccacttggatgggtcgagctcaagcgaaatgaagcagtctagcgcatctgatcttgtgagcaagtcctcctctctcaaaggggaaaaaacaaaagttctgagctctaagtccagcgaagggtcagcacacaatgttgcttacccagggatccctaaactcgctccacaggtccataacacaacctccagggagctgaatgtgtctaagattggttcatttgctgagccaagctccgtgagtttcagttctaaagaagctctctctttcccccacctccacctgcgaggacaacggaacgaccgcgaccagcacaccgactcaacccagtcagccaattctagcccagatgaagacaccgaggtcaaaacccttaaactgtccggaatgtcaaacagaagctccattatcaacgaacacatgggaagcagttcccgggatcgcaggcagaagggtaagaagtcatgcaaggaaaccttcaaagaaaagcactcaagtaagagcttcctagagccaggccaggtcaccacgggtgaagaagggaatctgaaacccgaattcatggacgaagttctgaccccagagtacatggggcaacgaccctgtaataatgtctcctcggataagattggcgacaagggcctgtccatgcccggtgtacccaaagccccacccatgcaagtggaggggagcgccaaagagcttcaggcccctcggaagagaactgtcaaggtgaccctcactccgctcaagatggagaatgaatcccagtcaaagaatgcgctcaaggagtcttcaccggcttcccctcttcaaatcgagtccacctcaccaacagaaccaatctctgcctcagaaaatcccggtgatgggccagtagctcagccctcccccaacaacacatcctgtcaggacagtcagtcaaataactaccagaacctaccagtgcaagatcggaacttgatgcttcccgatggtcccaagccccaggaagacggcagttttaaaaggagatatccccgacggtctgcccgagccagatctaatatgttcttcggtctgacaccgctttatggcgtaaggtcttacggcgaggaagatattcccttctatagtagcagcactggtaagaagaggggcaaaagatctgccgaaggccaagtcgatggcgcagatgatttgtccacgtccgatgaagacgacctctattattacaattttacccgcacagtgatctctagcggaggtgaagaaagacttgcaagccataacctcttccgcgaagaagagcaatgcgatctcccaaaaatctcccagcttgacggggtggatgatgggacagaatccgataccagcgttaccgcaacgacccggaagagtagccagattcctaagaggaacggcaaagaaaatggtaccgaaaacctgaagatagatcgccctgaggatgcgggagagaaggagcatgtgaccaagtcttccgtcggacataagaatgaacccaagatggacaattgtcactccgttagccgggtgaaaactcagggacaggatagcctcgaggcccagctgagcagcttggaatcatctagaagggtgcacacatctacaccatccgacaagaatttgcttgacacgtacaacactgaactgcttaagagcgattccgataataataatagcgatgattgcgggaacatcctgcctagtgacatcatggatttcgtgcttaagaatactcccagtatgcaggcactcggcgaaagccctgaatccagttcttccgagttgttgaatttgggagaaggcctgggcttggactctaatagagaaaaagatatgggcttatttgaggtgttctctcagcaactccctacgaccgagccggtggactcatccgtttcaagcagcatcagtgctgaagagcagtttgagctgcctctcgagctgccgtccgatctgtcagtactgactacgcgaagcccgacggttccatcgcagaatccctctcgcctggccgtgatctcagactcgggtgagaagcgcgtgacaattactgaaaagtcagtggcttcgtccgaatccgaccctgcgctgctgtcccccggagtggatccaaccccagagggacatatgacgccggaccactttatccagggacacatggacgctgatcacatctcttccccaccatgcggatcagttgagcaaggccacgggaacaaccaagaccttactagaaattcctccacacctgggttacaggtgcccgtttcacccacggtgcccatccaaaatcagaagtacgtgccgaacagtactgatagtcccggaccatcacagatctccaacgccgctgtgcagacaacaccccctcatttgaaacccgcaacagaaaagcttattgtggtcaaccagaacatgcaacctctttatgtgttgcagaccttaccaaatggagtgacgcagaagatccagttaacatcaagcgtgtcttccaccccctccgtgatggaaacaaacacttcggtactcggaccaatgggaggtggcctgactctcacaaccggcctgaatccgtcgctgcctacctcacaatcattgttcccctctgccagcaaaggactcctgccaatgtcgcaccatcaacacctccattcatttcctgcggctacccaaagttcattcccccctaacatcagcaatccacctagtggcctgctgattggggtgcagccacccccagaccctcagctgctggtatcagaatcctcccaacggacagatctttccactacggttgcgactccctcttccggtctcaagaaacgtccaattagtagactgcagacaaggaagaataagaaactggcaccttctagcaccccgtcaaacatagccccatctgacgtcgtgagcaatatgactttgattaacttcacccccagccagctaccgaaccaccctagcttgctggatttggggagcctgaacacctcaagccaccggaccgtgccaaacatcatcaaaagatctaaaagttccatcatgtattttgagccggctccgctgttaccccaatccgtgggcggtaccgctgcaaccgccgctggcacgagtacaattagtcaggatactagccacttgacctcagggagcgtgagcggcctggcctcctctagctcagtactcaatgtcgtgagtatgcagaccaccactactcccacctcaagtgcaagcgtacctggtcacgtcaccctgacaaatcccagactgctcgggacccctgacataggatccatcagcaatctcttaattaaggcatcacaacagagcttgggcattcaagaccaaccagtagcactgcctcccagttcaggcatgttccctcagttgggcacatcccagacacccagcactgctgcgataactgccgcatccagtatttgcgttctcccgagcacccagactactggaataacagccgcttctcctagcggcgaagctgatgagcattaccagttgcaacacgtgaatcagttactcgccagtaagactgggatccattcctctcaaagagacttggactctgcttcgggcccacaagtttccaacttcacccagacggtcgacgcccctaactcaatggggttagaacaaaataaggcactgagctcagcagtgcaggctagccctactagccctggcggaagcccttcatctccttcctctgggcagagatctgcctctccatcggtgcccggtcctacaaagccaaagccgaagacaaagagatttcagttgccattggacaagggcaatggcaaaaagcataaagtctctcacctaagaacatcaagctccgaagctcatattcctgaccaggagaccactagtttgactagcggaaccggcacacctggagcggaggccgaacaacaggatacagcatctgtcgagcaaagtagtcagaaggagtgcggccagccagccggtcaggtggcagtgctccccgaggtccaggtgactcagaatccagctaatgaacaggagtcagccgagccaaagacagtggaggaggaggagagcaatttctcaagcccccttatgctgtggctgcagcaagagcagaaaaggaaggagagcattacagaaaagaagccgaaaaaggggctcgtgttcgaaattagttctgacgatggctttcagatctgcgccgaatcaatagaagatgcttggaagagtctcacggacaaggtccaggaagcacggagcaatgcccgtctcaagcaactctcttttgcaggcgtgaacggtctgagaatgcttggaatcctccatgacgcggtagtgtttttgattgagcagctctcgggggctaagcactgccgtaattataagtttaggttccacaaacctgaggaggccaatgagccccctctgaacccccacgggtcggcaagggcggaagtgcacttaagaaaatctgcttttgatatgtttaactttctcgcctccaagcaccggcaaccacctgaatacaacccgaatgatgaagaggaggaggaagtccagctgaagtctgcccgaagagccacaagtatggatttacctatgccaatgaggttcagacacttgaaaaaaacatccaaggaggcagtcggcgtataccgaagccccattcacgggcgagggctgttctgcaagagaaatatcgatgccggagaaatggtgatcgagtacgcgggtaatgtcattcgctccatccagacagacaaacgcgaaaagtactatgactcgaaagggatcggctgttatatgttccgcattgatgactccgaggtggtggatgccacaatgcacgggaacgcagctaggtttattaaccattcatgtgagcccaattgctactccagagttattaatatcgatgggcaaaaacatattgtcatattcgctatgagaaaaatctaccgtggagaagaactgacctacgattacaagttcccaattgaggatgccagtaacaaactgccctgtaattgcggagccaagaagtgcaggaagtttttgaattac

SEQ ID NO: 231431 - DNA, 1680 bp, synthetic construct
  misc_feature 1..1680: note = Description of Artificial Sequence: Synthetic coding sequence
  source 1..1680: mol_type = other DNA
atggacaaccagtgtaccgtgcaggtccgcctggagctgggccaccgggctcagctgcggaagaaacccacgacggagggattcacccatgattggatggtctttgtcagggggcctgagcagtgcgatatccaacacttcgtggagaaagtcgtcttctggctgcacgactcattcccgaagccgagacgtgtttgcaaggaaccaccttacaaagtggaggaatcaggctatgcaggatttatcatgcctatagaggtgcatttcaaaaacaaagaggagccaaggaaagtgtgttttacttatgacctatttctaaatctggaaggcaaccctccagtgaaccaccttaggtgtgaaaagttgacttttaacaatccaaccactgagttccgatataagttactgcgggcagggggagtgatggtgatgcctgagggggctgacacagtgtccagaccaagtcccgattatcccatgttacccaccattccactctctgctttcagcgacccgaagaagacaaagccatcccacggcagcaaagatgcaaacaaagagtccagtaagacttccaagccccataaggtaactaaggaacatagggagcggccaagaaaagattcggaatcaaaatcatcctcaaaagagctcgagcgcgagcaggcaaagagctccaaggacacatcccggaagcttggcgaggggagactccccaaagaggagaaagccccacctcctaaagccgcattcaaggagcctaaaatggctctgaaggaaactaaactggagagtaccagccctaaaggaggccctcctccaccacctcctccgcctccaagagcgtcttctaaaagacctgccaccgccgattccccaaagccttcagcgaagaagcagaagaagagcagttcaaaaggcagcagatccgctcccggtacatctccacggactagcagttcctctagtttctccgataagaaaccagcgaaggacaaaagctctacacgcggagagaaagtgaaggctgagagcgagcccagggaggcgaagaaagcattggaggtggaggagtctaactctgaagacgaggcatcgtttaagagcgagagcgcacaatctagtcccagtaacagcagttccagtagtgattcgtcttcagactcagacttcgagccttcacagaaccattcacaggggcctctgcggtccatggttgaggacctgcaaagcgaagagtccgacgaggatgatagttcatctggggaagaagccgcaggtaagacaaacccgggaagggactcaaggttgtcattcagtgacagcgagagcgataatagtgccgactccagcttgccctcccgcgaaccccctccaccccaaaagcctccaccccctaactccaaagtgagcggacgcagatcgcccgaatcgtgttctaaacctgagaagatcttgaagaagggaacttatgacaaagcctacaccgatgaactagtggagttacatcgacgccttatggcccttagggagcgaaacgtgctgcaacagattgtgaacctaatcgaggaaacagggcacttcaatgtgactaatacaacattcgacttcgatctcttcagcctggacgaaaccacggtgcgaaagctgcagtcttgtctggaggctgtcgcgacctag

SEQ ID NO: 231432 - DNA, 273 bp, synthetic construct
  misc_feature 1..273: note = Description of Artificial Sequence: Synthetic coding sequence
  source 1..273: mol_type = other DNA
atgagagatcccgtttcttcccagtactcctcttttttattctggcgcatgcccatcccggagctggacctgtccgaattggaagggttggggctcagcgataccgccacctataaggtgaaggattcaagcgtaggcaaaatgatagggcaggcaacagccgcagaccaggaaaaaaatccggagggggacggactcctggagtactccacattcaatttttggagggcacctattgcttctatccattctttcgagctggatctgttgtag

SEQ ID NO: 231433 - DNA, 417 bp, synthetic construct
  misc_feature 1..417: note = Description of Artificial Sequence: Synthetic coding sequence
  source 1..417: mol_type = other DNA
atgaaggacctgcatagcgatgataatgaggaggagtctgacgaagttgaagacaatgataacgattccgagatggagcgccctgtaaataggggtgggagtcgatctcgaagagtatccctatcagatggcagcgattcagaatcctcatcagccagttctcccctccaccacgaacctccgcctccgctgctaaaaaccaataataaccaaattctcgaggtgaagagccccattaaacagagtaagtcagataaacagatcaagaatggcgagtgcgataagatcgttaacctgattgaggaaacaggacatttccatatcaccaatacaacatttgactttgatctgtgtagcctagataagaccacagtacgcaagctccagagttacttagagacgtcaggaactagctag

SEQ ID NO: 231434 - DNA, 489 bp, synthetic construct
  misc_feature 1..489: note = Description of Artificial Sequence: Synthetic coding sequence
  source 1..489: mol_type = other DNA
atgaaggatctccactcagatgataatgaggaggagtccgacgaagtggaggacaatgataacgattccgaaatggagagaccagtcaatcgcggaggttcaagatcaagacgggtgtcgttaagcgatggtagtgactctgaatccagctccgcctcatcaccactgcaccatgaaccacctccacctttgttaaagacgaacaacaatcaaatcctagaggtgaagagcccgatcaaacagtctaaaagcgataagcagatcaaaaacggggaatgcgataaagcttacctggacgaattagttgaactgcacaggcggcttatgacgctgagggaaagacacatcttgcagcagatcgtcaacctgatcgaggaaaccgggcattttcatatcacaaataccactttcgattttgacctctgttcactcgataagaccacggtcaggaaacttcagagttatctggaaacctctggcacgtcttag

SEQ ID NO: 231435 - DNA, 417 bp, synthetic construct
  misc_feature 1..417: note = Description of Artificial Sequence: Synthetic coding sequence
  source 1..417: mol_type = other DNA
atgaaggatctgcactctgacgacaacgaggaagaaagcgacgaagtggaggacaacgataacgacagcgaaatggaacgcccagtgaatcggggaggcagtagatcacgccgagttagcctgtctgatggctctgattccgagtcttcctcggcttcctcaccgttacaccacgagcctccgcctcctctgttgaaaacaaacaacaatcagatcctggaggtgaaatctccgattaaacagtctaaatccgacaagcaaattaagaacggggagtgtgacaagattgttaatctgatcgaggaaaccggacatttccacatcacaaatacaacatttgactttgatctgtgcagcctcgacaagaccacagtgcgaaagctccagagctacctcgagacttcagggacttcctag

SEQ ID NO: 231436 - DNA, 1707 bp, synthetic construct
  misc_feature 1..1707: note = Description of Artificial Sequence: Synthetic coding sequence
  source 1..1707: mol_type = other DNA
atggccagtagttgtgccgtgcaggttaaacttgagctgggtcacagagctcaggtaagaaagaagcccacggtcgagggcttcacgcacgattggatggtctttgtgcggggacccgagcactccaacattcaacattttgtcgagaaagtggtgtttcacctccatgagtctttccccagaccaaaacgtgtgtgcaaggatccgccttataaagtcgaggaatctgggtatgccggattcatcctccctattgaggtttactttaagaataaagaagagccgaggaaggtgcgctttgactatgacctgtttcttcatttagagggtcacccacctgtgaatcacctccgctgcgaaaaactgacttttaacaaccctaccgaagactttcgaagaaaactactgaaggctgggggtgatccaaaccgtagcatccacacgtctagttcaagctcgtcttccagctctagctctagcagttcatcatcaagctccagctcaagttcgtccagtagtagtagttctagcagcagctcaagctcatcttccagcagcagctcctcctcaacaagcttttccaagccccataaactcatgaaggagcacaaggagaaacctagcaaggactctagagagcacaaaagcgcctttaaagaacctagccgcgatcataataagagttctaaagaatccagtaaaaagccaaaggaaaacaagcccctgaaggaggagaagattgttcctaaaatggcctttaaagagcccaaacccatgagtaaggaacctaagcccgactcaaacctgctcacaatcacatccggccaggacaagaaagcgcctagcaagcgcccacccatatcggactcagaggagttgagcgccaagaagcgtaagaaaagttcgtccgaggcactgttcaagagtttctcatccgcgccacctctgattctgacctgtagcgcagataaaaaacagattaaggataaatcgcatgtgaaaatggggaaagtaaaaattgaatccgaaacttcagagaaaaaaaaaagtacactgcctccatttgacgatattgtggatcctaatgactctgatgtggaggagaacatcagcagtaagtcagattctgaacagccatctccagcttcatcctcatcctcctcttcatctagcttcacaccaagccagacgagacagcaaggccctctgcggtctataatgaaagacctccattccgatgacaatgaagaagagagtgatgaagtcgaggacaacgacaatgactctgaaatggagaggccagtgaacagggggggttcgagatctaggcgagtgtcacttagcgatggctctgacagtgaaagcagttctgctagtagtcccctgcatcatgaaccacctcccccactactgaagaccaataataatcagatcctggaggtgaagagtccaattaagcagtctaagtccgacaagcagataaagaacggtgagtgcgacaaagcttacctggatgagctggtggaattacatcggcgtctgatgacactgcgggagagacacatcttacagcagattgtgaacctgatagaggagaccgggcatttccatattaccaatacgacatttgacttcgacttgtgctccctagacaagactactgtgcggaaactccaaagctatctcgaaacctccggaacatcgtag

SEQ ID NO: 231437 - DNA, 1698 bp, synthetic construct
  misc_feature 1..1698: note = Description of Artificial Sequence: Synthetic coding sequence
  source 1..1698: mol_type = other DNA
atgtgtgccgtccaagtgaagctggaactagggcatcgggcacaagtcagaaaaaagcccacagttgaggggttcactcatgattggatggtctttgtgaggggccctgagcacagcaatatacagcattttgtggaaaaagtcgtctttcatttgcacgaatcatttccaagacccaaacgggtgtgcaaagaccccccatacaaggtggaggagagcggatatgcgggttttattctgccgattgaggtgtactttaagaacaaagaggagccaaggaaagtaagattcgactacgatttattcctacacctagagggccacccccctgttaatcacctgcgatgcgaaaagctgacattcaataacccaaccgaggacttccgaagaaaactgttgaaagccggtggtgacccgaatcgaagcattcacacaagttccagcagcagctcctcatctagctcttcatccagttcctcgtcatctagtagctcttcatcttcgtcctcctcatcaagtagctcaagctcgtcaagctcctcaagtagctcttcatcttctacctcatttagtaagccccacaaactcatgaaggagcacaaggagaagccttcaaaggacagtcgggaacataagtctgcgttcaaggagccgtcccgtgatcacaataaaagcagcaaggagagttcaaaaaagcccaaggagaacaaaccgctcaaggaggaaaaaatagtgccaaagatggctttcaaggaacctaagccaatgtccaaggagcctaaacccgacagcaatctcctgaccataacgagtgggcaagacaaaaaagccccatcaaagaggccacctatttccgattcagaggaactttccgccaaaaagaggaaaaagagcagtagcgaggctctcttcaagtcgttctcatcagctccacctctaatcctcacctgttctgctgacaaaaagcagattaaggacaagagtcacgtgaagatgggaaaggtcaaaatcgaaagtgaaacttcagagaaaaaaaagtcgaccttaccgcctttcgacgacattgtggaccccaacgactctgacgttgaggagaacatttccagcaaatctgactctgaacagccctctcccgctagctcctcttccagtagttcatctagctttaccccgtcgcagactcggcagcagggcccactgagaagtataatgaaagacctgcattcagacgataacgaggaggaatcagatgaggtggaagacaacgataatgattccgagatggagagaccggtgaacaggggaggctcacgctcacgtcgcgtctctctgagtgatgggtctgattctgagtcgagcagtgcctcaagtccacttcaccacgaaccgcctcccccactgctaaaaacaaataacaaccagattttggaagtgaaatccccaattaagcagtctaaatccgataagcaaatcaaaaatggtgagtgcgataaggcatacttggatgaactcgtggagctgcaccggaggctgatgaccctccgcgaaagacatatccttcaacagatcgtgaacctgattgaggaaactggccactttcacatcactaatactacatttgatttcgatctctgttccctagacaagacaaccgtcaggaagcttcagtcttacttagagacatcaggcacctcttag

SEQ ID NO: 231438 - DNA, 1824 bp, synthetic construct
  misc_feature 1..1824: note = Description of Artificial Sequence: Synthetic coding sequence
  source 1..1824: mol_type = other DNA
atgcagcgggcacctccattccctttcatgtgtgtctcgcgcagacggaagaagtgccaggcccagcgatctctcccgaaacccagactccccgtcattcacgggtgcctatcaagcccttgcccccagtgtgccgtgcaggtcaagctggaactgggtcaccgggcacaggttcgcaaaaagccaaccgtagaaggtttcactcacgactggatggtattcgtgagaggacccgagcatagcaatatacagcattttgtggagaaggtggtattccacctgcatgagtcatttcccaggcccaaaagagtgtgtaaggaccccccttacaaggtggaggaatccggatacgcgggattcatcctgccaatcgaggtgtactttaaaaacaaggaggagccacggaaagtgcgctttgactacgatctctttctgcatttggaaggtcacccgcctgtgaaccatctccgctgcgagaagctgactttcaacaaccctaccgaggattttaggaggaagctgctgaaagctggcggagatccaaatcgcagcatccacacaagttctagcagtagttcatcttccagttcaagtagctcgtcctctagcagtagttcgtcctcaagctcgagcagttcgtccagttcatccagctcgtctagcagttccagctcaagtagttcctccaccagtttttccaagccccacaaactgatgaaggaacataaggagaaacctagtaaggattcacgagaacataaatccgccttcaaagaaccgagtcgcgaccataataagtcatccaaagagtccagcaagaaaccaaaggagaataagccacttaaggaggagaaaatagtgcccaaaatggcattcaaggagcctaaacccatgagtaaggagcctaaacccgacagtaatctcctgaccattacgtccgggcaagataagaaggcaccatcaaagaggccacccatctcagacagcgaagaactttcagccaagaaaaggaagaaaagttcgtcagaagccctgttcaaaagttttagctcagcccctccgcttattctaacctgttcagcagataaaaaacaaattaaagacaagagccacgtgaagatgggaaaggttaagatcgagtccgagacaagtgaaaagaaaaagtctacactgcccccattcgacgatatagtcgaccccaatgactctgacgtggaggagaacatttcttctaaaagcgattccgagcagcctagccctgctagctcgtctagcagttcgtcctcaagcttcaccccgtctcaaaccaggcagcagggaccccttagatcaatcatgaaggacctccactcagatgacaacgaggaagaaagcgacgaggttgaggacaacgacaacgacagcgagatggagcgccctgttaaccgcggtggaagccgaagcagacgggtgagcctcagtgacggctcggatagcgaaagcagcagcgcttcttctcccctccaccacgaaccgcctccacccttattgaagactaataataaccagatcctggaggtcaaaagccctatcaagcagagcaagagtgacaagcaaattaaaaatggcgaatgcgataaggcctacctggatgaactcgtggagctccatagaagactgatgacacttagggagcggcacattctccagcagatcgtcaacctcatcgaggaaacgggacatttccatatcacaaacaccacctttgatttcgatctgtgcagcttagacaaaacaacagtgagaaagctgcagtcctatctggagactagtggcacttcctag

SEQ ID NO: 231439 - DNA, 4985 bp, synthetic construct
  misc_feature 1..4985: note = Description of Artificial Sequence: Synthetic coding sequence
  source 1..4985: mol_type = other DNA
atgtcagccggtggcagggatgaggaacgccgaaagctggccgacattatacaccattggaatgccaatagactcgaccttttcgagattagccagcctactgaagacctcgaatttcacggtgtgatgcgcttctactttcaggataaggccgcagggaactttgcaaccaagtgcatcagggtatcgtccacggccacaacccaggacgtgattgagacactcgccgagaaattcaggccagacatgaggatgctgagtagtcccaaatactccctgtatgaagtacacgtctctggtgagcgaagactggacatcgacgagaagccgttggtagtccagctgaattggaacaaggacgaccgggaagggcgatttgtgcttaagaatgaaaacgacgccatcccccctaaaaaggcccaatctaacggacctgagaagcaagagaaggagggcgttatccagaacttcaagcgcaccttgagtaaaaaagaaaaaaaggaaaagaagaaacgcgagaaagaggcactgcgccaggccagcgacaaggatgaccggcctttccagggcgaggacgtagagaacagccgattagccgctgaggtgtataaggacatgccggagactagctttacacgaactatttcaaatcctgaggtggtgatgaaacgcaggagacagcagaaactcgaaaagaggatgcaggagtttcgctcctcagacggcagaccggactctggaggaaccctacggatttacgccgattccctcaagccaaacattccatataagacaattcttttgtccacaacagaccctgcggatttcgcagtggccgaagccctggaaaaatatggcttggaaaaggagaaccccaaggattattgcatcgccagagtgatgctgccacctggtgctcagcattcagatgaaaaaggggctaaagagatcatactcgatgacgacgaatgccccctgcaaattttcagggaatggccatcagacaagggaatcctggttttccaacttaaacgcaggcctcccgaccacatcccaaaaaagactaaaaagcacctggaaggaaaaacgcccaagggcaaggagcgcgcagacggaagtgggtatggttccactctgcccccagagaaacttccctacctggttgagctgagccctggcagaaggaaccattttgcctactacaattatcatacatacgaggatggatctgattcgagggacaagcccaaactgtatcgcctgcagctcagcgtgacggaggttggcacagaaaaattagacgacaattctatccaactgttcggtcctggaattcagccccatcactgcgatttgaccaatatggacggcgtggtgactgtcacccccagatccatggatgctgaaacatacgtggaaggccaacgtatctcagaaactaccatgcttcaatcgggaatgaaagtccaattcggggcatctcacgttttcaaatttgtggacccctcccaggatcacgcattagctaagcgcagtgttgacggcggtctgatggtcaaaggtccgcgtcacaagccaggaatcgtacaggagacgacgttcgatctgggaggtgatattcatagtggtaccgctttgcccactagcaagtcaacaacaaggttagacagcgacagagtgagctccgcatcctccactgccgaacggggtatggtcaaacccatgattagagtggaacaacagccggattacagaaggcaggagtcccgtacccaggatgcttctggccctgagttaattctcccggcatctatcgagtttcgagagtccagtgaggactccttcttgagcgctattattaactatactaactctagtaccgtgcacttcaagttaagtcccacttacgtactttatatggcatgtaggtacgtgctgtccaatcaatacagacccgacatatcccctactgagcgcacccataaggtcattgccgtagtgaacaagatggtaagcatgatggaaggggtaatccaaaaacagaagaatattgccggagcccttgccttttggatggccaacgcctctgaactgctcaattttattaaacaagaccgagatttgagtagaatcacgctagatgcgcaggacgtgctcgcccacctggtgcagatggctttcaaatacctcgtgcattgcttgcagtctgaactcaataattatatgccagccttcctggatgatccagaggagaactctctgcagcggccaaagatcgacgatgtactccacaccctcactggagccatgtctctgctgcggaggtgccgggtcaatgccgcactgactatccaattgttttctcaactgttccactttatcaatatgtggctattcaatagactggtgaccgatcccgattcagggctttgtagtcattattggggcgcaattattcggcagcagctgggacacatcgaggcttgggcggagaagcagggattggaactggctgctgattgtcatctcagccggattgtgcaggctacgaccctgcttaccatggacaagtatgctccagatgatattcccaatattaattctacttgctttaagcttaacagcctgcagctgcaggctcttttgcagaactaccactgtgccccagacgaaccgttcatcccgacggaccttatcgagaatgtagtcaccgtggccgagaacacagcagacgagctcgcaagatctgatggccgagaggtccagctcgaggaggacccagatctgcagctcccgttcctgttacctgaagacggttatagctgtgatgtggtgcgaaatattcccaatgggcttcaggaattcctagacccgctgtgtcagcgtgggttttgccgtcttatcccacatacacggtcaccgggaacatggaccatctatttcgagggcgctgactatgaatcccatctcttgcgcgagaataccgagctcgctattcccttgaggaaagagcctgaaatcattactgtgacgttgaagaagcagaacggcatgggtctctccattgttgcagccaaaggcgctggacaggacaagttgggaatctacgtgaaatctgtagttaagggaggtgcagctgatgtggatggaagactagcagccggagatcagctgctatccgtcgacgggcgaagcctggttggtctgtcacaagagagagctgccgagctcatgacaaggacgagcagcgtcgtaaccttggaagttgccaaacaaggagcaatatatcatggactcgccaccctcctcaaccaaccttcacccatgatgcagcggatcagcgatcgtcggggttccgggaaaccacgcccaaagtccgaaggcttcgagctctataataacagcacacagaacggaagcccagagtcaccacagttgccttgggctgagtatagcgagccaaaaaagctcccgggagatgatcgactgatgaaaaatagggcagaccaccgcagctcaccaaatgtggctaatcaacctcctagtccaggcggaaagagcgcatacgcatccggtacaacggccaaaatcacctctgtgagcacaggcaatctctgtacggaagagcaaaccccgccaccccgacccgaggcataccccattccgacacagacctatacaagggagtatttcacattcccggcaagcaagtcgcaggatagaatggctcctccccagaaccagtggcctaactatgaggagaaaccacatatgcatactgattcaaatcactcttccatagccattcagcgcgttactagaagccaggaagagcttcgggaagataaggcataccagctggagcggcacagaatcgaggccgcaatggaccgcaagtcggatagtgacatgtggatcaatcaatcctcctctttagattcatctacgtcgtctcaggaacatctgaatcactctagcaaaagtgtgacacctgccagtaccctgacgaaatcaggccctggacggtggaaaacaccggcagccatccccgctacccctgtggcagtgtctcagcccattcgcacagaccttcctccgcctcctccgccaccccctgtccattacgccggagactttgatggaatgagcatggacctgcctttgcctccacccccaagcgcgaaccaaatcgggctgccaagtgctcaggtagccgctgccgaacgacgtaagagagaagagcaccagagatggtacgagaaggaaaaggcccgtctggaggaagagagggaacgaaaacgaagggagcaggaacgtaagctgggccagatgaggactcaaagtctcaaccctgccccattttcacctctgaccgctcagcagatgaaaccagagaaaccttccacccttcaacgaccacaggaaaccgtgattcgcgaactccaaccacagcagcagcccagaaccattgagcggagggatctccagtatataacggtgtctaaggaggagctctcgtccggtgacagtctgtcccctgacccatggaaacgagacgctaaggagaagctggagaaacagcagcaaatgcacatcgtggatatgctatcaaaagagattcaggaattacagtccaaacccgatagatcagcagaggagtcagatcggctacgaaaacttatgctggagtggcagtttcagaaacgcctgcaagaatccaagcaaaaggacgaggacgatgaggaggaggaagatgacgatgtcgacaccatgctgattatgcagcgcctggaggccgagcgcagggcccgacagacagccatgcccgcaattagtgttctggatcttctccaggacgaggaaaggcggagacagcagcaactggaagagatgcgcaagagagaagcggaggacagggctcggcaagaggaggagagacgccgacaggaagaggagaggacaaaacgcgatgcagaggagaagta

SEQ ID NO: 231440 - DNA, 4998 bp, synthetic construct
  misc_feature 1..4998: note = Description of Artificial Sequence: Synthetic coding sequence
  source 1..4998: mol_type = other DNA
atgtccgccggaggcagagatgaagagcgcaggaagcttgcggatatcatccatcattggaatgcaaatcggcttgatctctttgagattagtcagcctaccgaggacctggagtttcatggcgtgatgcggttctactttcaggacaaagcagctggcaatttcgccaccaagtgcattcgggtgtcaagtaccgcgactactcaggatgtgattgaaactctggctgaaaaattcagaccggacatgcggatgctatcatcccctaagtacagcctgtacgaagtccacgttagcggcgagagacgactggacattgacgagaagccacttgtggtgcagttgaattggaacaaagatgatcgagagggcaggtttgtccttaagaacgaaaatgacgctatcccgcctaagaaggcacagtccaacgggcctgaaaaacaggagaaagaaggagtcatccagaattttaagcgcactctgtcaaaaaaggaaaaaaaagaaaagaaaaagagggaaaaagaggccctcagacaggcttcagacaaagacgaccggcctttccagggcgaagacgtagagaacagccggctggctgctgaggtctacaaggatatgccagaaacctctttcacaaggaccatttctaaccccgaagtcgtcatgaagaggcgtaggcaacagaagctggagaaaagaatgcaagaatttcggtcatccgacggtcgacccgacagcggcggaacattgagaatctacgccgattcacttaagccgaatattccctacaagaccatactgctttcaactacagacccggcagactttgcagtcgctgaagctctggaaaaatatgggctcgagaaggaaaatcctaaagactactgtattgcccgtgtgatgctgccaccaggagctcagcactccgatgagaaaggtgccaaggagatcatcttggacgacgacgagtgtcccttgcagatcttccgcgaatggccttcagataagggcattctggtcttccaacttaagcgcagacccccagaccacatccccaagaaaacaaaaaagcacctcgaggggaaaacccctaagggtaaagagagggcagacggatcaggttatgggtctactctgccgcctgaaaaactgccgtatctggtcgagctgagtccaggtcgcaggaatcactttgcctattacaattaccacacctacgaggatggtagtgactccagggataaaccaaagctgtaccgactccagctcagcgtcaccgaggttgggacagaaaagctggacgacaactccatacaactgtttggtcctgggattcagccacatcactgcgacttaacgaatatggatggggtcgtgaccgttacacccagatctatggacgccgaaacatacgtggagggtcagcgcataagcgagacaaccatgctgcaaagtggcatgaaggtgcagtttggagctagtcacgtctttaagttcgtcgatccatcccaggaccacgcactggccaagcgctcggttgacggcggtctgatggtcaagggaccaaggcacaagcctggaattgtacaggagacaacgtttgacttgggcggagacatccatagcgggaccgctctccccacatccaagagcactacaaggctcgattccgaccgcgtgtcttctgccagctcaaccgccgagcgcggtatggttaagcccatgattagagtcgaacagcagcctgattaccgacgtcaagagagccgcactcaagatgcttccggacctgaactcatcctgccagctagtattgagttcagggaatcttcagaggacagtttcctaagcgctatcattaactacactaatagtagcactgtgcatttcaaactgagtccaacctacgtcctgtatatggcctgcaggtacgtactctccaatcagtacaggcccgacataagtcctaccgagcggacccacaaagtgattgctgtggtaaacaaaatggtaagtatgatggagggggtgattcaaaagcagaaaaatattgcgggagctctggctttttggatggccaacgcctcagagcttctcaactttatcaaacaagaccgagatttgtcccggatcacccttgatgctcaggatgtcctagcacacctggtccagatggcctttaagtacctggtgcactgtctgcagtctgagttgaacaattacatgccagcgtttttagacgaccccgaagaaaactccctccagaggcctaagatagacgatgtgctccacaccctgaccggagcaatgagcctcctgagaaggtgccgcgtgaatgccgcactcaccatccaattgttctctcagctcttccattttataaacatgtggctgtttaaccgcctagtgacagatccggacagcggcctctgctctcactattggggtgccatcatccggcagcaacttggacacatcgaagcctgggctgaaaaacagggcctggagctggcggctgactgtcatttgtccaggatcgtacaggccacgacacttctgaccatggataagtatgcacccgatgatattccaaacatcaattccacctgctttaagctaaactccttgcagctccaggccctgctgcagaactatcattgcgccccagacgagccgttcattcctaccgatttaattgaaaatgtggtcaccgtggccgaaaataccgcggacgagctcgctcggtctgatggaagagaagtccaactcgaggaggatcctgacttgcagctgccattcctcctccccgaggatggctactcgtgcgatgttgtgcggaatattccaaacgggctacaggaattcctcgatcccctatgtcagcgtgggttttgccggctgattccacatacccgctcgccaggaacttggaccatctattttgagggagcagattatgagagccatctcttgagggagaacactgagctagcccagcccttgcggaaggaacccgaaattatcacggtgacactgaaaaagcagaatgggatgggactgagtatcgtggcggctaaaggagctggccaagataaactaggcatttacgttaagtccgtcgtgaagggaggcgctgccgacgtggatggaagactggccgctggtgaccagctgctttctgttgacggaagaagtctggtgggtctgtctcaggagagagctgccgagctaatgacacgtacaagctccgtcgtcactttagaagttgcaaagcaaggcgctatctaccacggtctggctacactgctcaaccagccatcccctatgatgcagcgcattagcgatcgcagaggaagcgggaaacccaggccaaagtcagaaggttttgagctttacaacaattctactcagaatggctctccagagagtccgcagctgccctgggctgagtactctgagcccaagaagctgcccggagacgaccgcttaatgaaaaatcgcgcagaccatcgctcctctccgaacgtcgctaatcagcctccctctccaggcggaaaatcggcctacgccagcggcaccaccgccaaaatcacctccgttagcacggggaatttatgcaccgaagagcagacccctccgccaagacccgaagcatatccaattcccacccagacttacacgagggaatatttcacatttccggctagtaagtctcaggatagaatggcaccaccacaaaaccagtggccaaattatgaggaaaaaccacacatgcacacagacagcaaccactcgtccatcgcgatccagcgtgtcacccgatcccaggaggaactgagagaagacaaagcctatcagcttgagcggcacagaatcgaggctgccatggataggaaatccgatagtgatatgtggatcaaccaatcctctagcctggacagctctacatccagccaggaacatctaaatcacagcagcaagtcagttacacctgctagtaccctgaccaaatctggtccagggcgttggaaaactcctgcagctataccggctactccagtcgccgtttctcaaccaatccgaaccgatctgcctcccccacccccacccccaccagtacactacgcaggcgacttcgatggtatgagtatggacttacccctgccaccccctcccagcgccaaccagatcggcctgccctcagcccaggtagcagccgcagaaaggaggaagagggaggagcatcaacgatggtatgagaaagaaaaggcaagacttgaagaggagagagaaagaaagagacgagaacaagagcggaaactgggacagatgagaactcaaagcctcaaccccgcacctttcagtccactgactgctcagcaaatgaagccagaaaaaccttctactctgcagcgcccacaggagacagtgatcagggagctgcaacctcagcagcagccaaggacaattgaacggagagatcttcagtatattactgtgagtaaggaagagctgtcaagcggcgacagtcttagtcccgacccgtggaagcgcgacgcaaaggagaaactggaaaagcagcagcagatgcacatcgtagatatgctcagcaaagaaatccaggagctgcagtcaaagccagatagaagtgcggaggagtccgaccgtcttagaaagttaatgctggaatggcagttccagaaaagactccaggagagcaagcagaaggacgaagacgacgaagaagaggaagatgacgatgtcgacaccatgctgattatgcaacgcctggaggcagaacgccgtgctagacagacagcgatgcccgctatcagcgttctggacctgctgcaggacgaggagcgtagacgccaacagcagttagaagaaatgaggaaaagagaggcagaggacagggcacgacaggaagaagagcgcaggcgccaggaagaggaaagaacaaagagggacgcagaggagaaggttatggtgctttag

SEQ ID NO: 231441 - DNA, 5474 bp, synthetic construct
  misc_feature 1..5474: note = Description of Artificial Sequence: Synthetic coding sequence
  source 1..5474: mol_type = other DNA
atgtccgcagggggtcgggacgaggagagacgcaaactggcagacatcattcaccactggaacgcgaaccggctggacctcttcgagatttcgcaacctacggaagatctcgagtttcatggggttatgagattctacttccaggataaggccgctggaaactttgctacgaaatgtatccgggtctcaagcactgccacgacccaggacgtcatcgagaccctggccgagaagttcagacccgacatgcgcatgttgtcctctccaaaatactctttgtacgaagtgcatgtaagcggagagagaagactggacattgacgaaaaacctctagtggtccagcttaactggaacaaagacgaccgggagggacgctttgtgttgaagaacgaaaacgatgcaatcccgccaaagaaggcccagagcaatggacctgaaaagcaagagaaggagggggtgatacagaattttaagcgcacactgagcaaaaaagagaaaaaggagaaaaagaaacgtgagaaggaggcgttaagacaggccagtgacaaggacgataggccatttcagggtgaggacgtggaaaactctcgcctcgctgccgaggtatataaggacatgcctgagacatcgttcactcggactatctccaatcctgaagtcgtgatgaagaggcggcgacagcagaagctggagaaacgcatgcaggagttccgttcgtcggacggacgacctgactccggcggtaccctgagaatctatgccgattcacttaaacccaatattccttataagaccattctgctgtccactactgaccctgcagatttcgccgtcgcagaggcccttgagaagtatggcctcgagaaggaaaaccctaaggactattgcatagccagagtcatgctgccccctggcgctcagcactccgacgagaagggcgcaaaagagatcatccttgatgacgatgaatgtcccctccaaattttcagagagtggccctcagataagggcatcctggtgtttcagctgaagagacgtccacccgatcacatacccaagaagaccaagaaacacctggaagggaaaaccccaaaagggaaggagcgcgctgacggatcaggttacggatccacgctcccaccggaaaaactaccttacttggtcgaattgtcaccgggtcgacgcaaccatttcgcctactataattaccacacctacgaggacgggtccgattcacgtgacaagcctaagctctataggctccagctaagcgtgacagaagttgggactgagaagcttgacgataatagcatacagctgtttgggccaggcattcagccgcatcattgtgacctcaccaatatggacggggtcgtcactgtgacccctcgatccatggacgctgagacttacgtagagggccagcgcatcagcgaaactaccatgctacagtccggcatgaaagtgcagtttggtgcatcacacgtgttcaagttcgttgatccctcccaggatcacgcgcttgcaaagaggtcagtggacggcggactcatggtcaaaggaccacggcacaagcccggaattgtccaggagacaaccttcgatttagggggtgatatccactccggcacagccctccctacctcaaagtctaccactcggctcgattccgaccgagtcagtagcgcttcctccacagcagagcggggaatggttaaaccaatgatccgagtcgagcagcagcccgattaccggaggcaagagtctaggacccaggacgcgagcggacccgagctcattctgcccgcaagcattgaatttagagagagctcagaagattcgttcctctccgccattattaattacacaaacagcagtaccgtacactttaagttatcccctacatacgttctgtacatggcttgtagatatgtcctgagcaatcaatacagacccgatatatcacccaccgaacgaacacataaagttatcgccgtggtcaataagatggtctctatgatggagggtgttattcagaaacagaaaaatatcgccggtgcgttagccttctggatggccaacgcctcggagctgctgaatttcatcaagcaagaccgtgatctctctagaattacactggatgcccaagatgtgctcgctcaccttgttcagatggcctttaaataccttgtacattgcctccagagcgaattgaataactatatgcccgcatttctcgatgaccctgaggagaactccttgcagagacctaaaatcgatgacgtgttgcatacgctgaccggggctatgtccttactaagacggtgtcgagtcaatgccgctctcacaatacagctttttagtcagctttttcatttcataaatatgtggctgttcaatagactcgtaacagatcccgattccggtctgtgtagccactattggggcgctataatccgccagcagctggggcacatcgaagcctgggctgaaaagcaaggtctggaactggctgccgattgccatttgtcgcggatcgtgcaggccaccaccttgctcactatggacaaatacgcccctgatgatatacctaatatcaacagtacctgttttaagctgaacagtcttcagctccaggcacttttgcagaattaccactgcgcccctgatgaaccatttattcctaccgatctgatcgagaacgtggtgactgttgccgaaaacaccgctgacgagttggctcggtcagacggaagggaggttcagcttgaggaggaccctgatcttcagctcccctttctgctgccggaagacggatactcgtgtgatgtcgtgcggaatatacccaacggtctacaagagttcttggatccgctttgccagcgaggattctgccgcctgattccccacactagatcccccggtacctggacaatttactttgagggcgctgactacgaatctcacttgcttagagagaataccgaactcgccatccccctccggaaagagcccgagataattaccgttacattgaaaaaacagaatggcatggggctcagtatcgtcgctgccaagggtgccggtcaggacaaactcggaatatacgtaaaatccgttgtaaaagggggagccgctgatgttgatggtaggcttgccgcaggggaccagctcctgtctgtggatgggagatcactggtcggtctgtcgcaagaaagagcagccgaacttatgacacggactagttctgtggtgaccctcgaagttgccaagcaaggcgctatctaccacggcctggcaacactcttgaaccagccctctcccatgatgcagcgtatcagtgacaggaggggcagcggtaagccaagacccaaatccgagggctttgagctctataataactcaacccaaaacggaagtcccgagagtccacagctcccctgggcggagtacagcgagcctaaaaaacttcctggcgacgacagattgatgaagaaccgtgctgaccaccgatcctcccctaatgtggcgaaccagccgccttcccccggtgggaaatccgcatacgcgagcggaaccaccgccaagatcacttccgtgtctactggaaatctctgcaccgaagaacagacaccaccgccacgcccagaggcttaccctatcccaacccagacatatacacgagagtactttacttttccagctagcaaatcacaggatcggatggcgcctcctcagaatcaatggcctaattacgaggagaagcctcatatgcatacagactcaaaccactcttcaattgcaatccaacgagtcacccggtcacaggaagaactgcgagaggataaagcctaccagctagagagacataggatagaggccgctatggatcgcaaatccgacagcgacatgtggatcaatcagtcaagttccctggacagctctacaagctctcaggagcacttaaaccactcatccaagtccgttacaccagccagcaccctcaccaagtccggccctgggagatggaagacaccagccgcaatacccgctactccagtcgcggtaagtcaaccgatacgtacagacctccctccaccccctcctcctccaccagtgcactacgcgggtgattttgatggtatgtccatggacttacctctcccacccccaccctccgccaatcagataggtctgccctccgcccaggtggctgccgctgaaagacgaaagagagaggaacatcagcggtggtacgaaaaagagaaggctcgtctggaggaagaacgagagcgaaaaaggcgggagcaggagaggaaacttggtcaaatgcggactcagtctctgaaccccgcacccttcagtcccttaacagcgcagcagatgaagccagaaaagccctcaacactgcaaagaccccaggaaactgtcatccgggagctgcaaccccaacaacagcctagaactattgagcggagagatctgcaatacatcacagtctctaaagaggaactctcttccggagactcactctcaccagacccatggaagcgggacgctaaagagaagctagaaaagcagcagcagatgcacatcgtggacatgctatctaaagaaattcaagaattgcagagcaaaccagacaggagcgcagaagagtcggaccgactccgtaaactgatgctagagtggcaattccagaagcgtctgcaggaatctaaacagaaggacgaagacgatgaagaggaggaggacgatgatgtggacactatgctcatcatgcagcggttggaagctgagcggagagctaggctgcaagatgaggagagaaggaggcagcagcagctcgaagaaatgcgaaagcgggaggccgaagaccgggctcgacaggaagaagagagaaggcgccaggaagaagaaagaactaagagggatgctgaggaaaagcggcgacaggaagaaggatactatagccggctagaggcagagaggcgcagacagcatgacgaagcagccaggcgattgttggaacctgaagctccaggactgtgccgcccaccactgcccagggattacgagccaccttctccctcccctgccccaggggcaccgccaccccctccacagcggaatgcaagctaccttaaaacgcaagtgctttctcccgattccctgttcaccgccaagtttgttgcttacaacgaggaagaagaagaagaagactgtagtctggctgggcctaattcataccctggttctaccggggctgccgtcggggcacacgacgcctgcagagatgcgaaggaaaagcgctccaaaagccaggacgccgacagtcccggaagtagtggagctcctgagaacctcacttttaaagagagacagaggcttttttcacagggtcaggacgtgtctaacaaggtgaaagcctctcggaaactgaccgagctggaaaatgaactgaacacaaagta

SEQ ID NO: 231442 - DNA, 4955 bp, synthetic construct
  misc_feature 1..4955: note = Description of Artificial Sequence: Synthetic coding sequence
  source 1..4955: mol_type = other DNA
atgagcgcgggtggccgagacgaagagcgcaggaaactggccgatataatacatcactggaacgctaatcgcctggacctcttcgagatctcccaaccaactgaggacctggaattccatggcgttatgaggttctattttcaggataaggccgctgggaattttgcaactaagtgcattagagtgtcgagtacagctaccacgcaggacgtaatcgaaacactggctgagaagttccggcctgatatgcggatgctgtcttcccccaaatattccctatacgaagtgcacgtgagcggagagagacgtttggatatcgacgagaaaccgctcgtcgttcagcttaactggaacaaggacgatcgagaggggcgttttgtcttgaaaaatgaaaacgatgctatcccacctaagaaggctcagtcaaacgggcctgaaaagcaagagaaagaaggagtcatacaaaacttcaaaagaaccttatctaagaaagaaaaaaaggaaaaaaaaaagagggaaaaagaggccctgagacaggctagtgacaaggatgatcgtcccttccagggtgaggacgtcgaaaattcacggctggctgcggaggtgtataaggatatgccggaaacgtctttcactaggacaatctctaaccctgaggtggttatgaaacggcgacggcagcagaaacttgaaaaacggatgcaggagttcaggtcatcagatgggcgtcctgatagcggtgggaccctccgtatttacgccgattctctgaaacccaacatcccatataagaccatcctgttatctactaccgaccccgcagatttcgccgtcgctgaggccctggaaaagtacggcttggagaaagagaaccctaaggactactgtattgccagagtgatgttacctccaggtgctcagcacagtgatgaaaaaggagctaaggagattattctcgacgatgacgagtgtcctctgcagatcttccgcgaatggccctccgataaaggcatcctggtctttcagctgaagcggaggccacctgatcacatccccaagaaaaccaagaagcatctcgaaggtaagacacccaagggtaaagaaagagccgacgggagtggctacgggtccaccctgccccctgaaaagctgccgtaccttgtcgaactgtctccgggacggagaaaccactttgcctattacaactaccatacatatgaagacggttcggatagtagggataaaccgaaactgtatcgactacaactctcagtaaccgaagtggggaccgagaagctggatgacaatagcatacagttgttcggacccggtattcagcctcatcattgcgacttgacaaacatggacggcgtggtgaccgtgacacctcgctctatggacgcagaaacctacgtagagggacagcggatctcagaaacaaccatgctccagtcaggcatgaaagtgcaattcggcgcatcccatgtgtttaaattcgtggatccctctcaggatcatgctttggcaaaacggtctgtagacgggggtctgatggtgaaggggcctcggcacaaaccagggatcgttcaggaaactaccttcgatctcgggggtgacattcactctgggaccgccctccccactagtaaaagtacaactcgcctggacagtgatagagtgtcatccgcgagttccaccgctgagcgcggtatggtcaagccaatgatccgagttgagcaacagcctgactaccggcgacaggagtcccggacccaggatgcatctggaccagaactgattctgcccgctagtattgaattccgcgagagtagcgaggactcatttctgtccgcgattatcaattacacgaatagctctacagtgcatttcaagctgagccccacctacgtattatatatggcctgtagatatgtcctttcaaaccagtataggcctgatattagtccaactgagagaactcacaaggtgattgcggtcgtcaacaaaatggttagcatgatggaaggggtgatacagaagcaaaagaacatcgccggagcgctcgccttctggatggcaaatgcatccgaacttctcaacttcatcaagcaagatcgggatctgtccaggataaccctggatgctcaggacgttctggctcacctagttcagatggcttttaagtacctcgtgcactgtctccagtctgaactcaacaactacatgcccgcttttctggatgatcccgaggagaactcactccagcgccctaagatagacgatgttctgcacacacttaccggagctatgtcccttcttcggcgttgccgcgttaatgccgcattaacaatccaactattttcccagttgttccatttcattaatatgtggttattcaatcgtcttgtcacagacccagacagcgggttgtgctctcattattggggtgcaataatccgccagcagctcggtcacattgaagcctgggcggaaaagcaaggtcttgaattggctgctgattgccacttgtcccgcattgttcaagcgaccactctgctcacgatggacaagtatgccccagacgatataccgaacattaactcaacctgcttcaaactcaactcacttcaactccaggctctcttgcagaattatcactgcgcgcctgacgaaccttttattcctaccgatctcattgaaaatgttgtcacagtggccgagaacactgctgatgagctcgctcggagcgatggccgtgaggtgcagctggaggaggatcctgacctgcagttgccttttctcttacccgaagacggatattcctgcgacgtggtgcgcaacattcctaatggtctacaagaattcctagatccactatgccagcggggtttctgtcgtctgatcccacacacgcggtctcccggaacatggaccatatactttgagggcgcagattacgaaagccacctcttgcgtgagaatactgagctggcccagccattaagaaaggaacctgaaatcatcactgtgactctcaaaaaacagaatggaatgggtctgtctattgtcgccgcaaaaggtgccggacaggataagctaggtatttacgtgaagtcggtcgtaaagggtggcgctgcagatgtcgatggacgcctcgccgctggcgaccagctgttgagcgtcgacggcagatcccttgtgggactgtcacaagagagggcagctgagctgatgactagaacctccagcgttgtgactctggaagtggctaagcagggcgctatataccatggccttgcaacgctgcttaatcaaccaagtccaatgatgcaacgaatctccgaccggaggggaagtggcaagccacggcctaagagtgagggattcgagctttataacaacagcacgcagaatggcagcccagaaagcccccaactcccctgggctgaatattcggagcctaagaagctgcctggcgacgacaggctgatgaagaatcgcgctgaccacaggtctagccctaacgtggcgaaccagccgccttcgccgggaggtaaatcagcctacgcctctggcaccacagctaagatcactagcgtgtccactggtaatctgtgcaccgaggagcagaccccaccccctcgccctgaagcctaccccatcccgacccagacatacactcgggagtactttacttttcctgcttcaaagtctcaagacagaatggcaccaccacagaaccagtggcccaactacgaagaaaagccacacatgcatacagactccaatcatagcagtatagcgatccagcgcgttactcggtctcaggaggagctgagggaggacaaagcgtaccaactggagagacaccgcatcgaagccgcaatggatcgcaaatccgacagcgatatgtggatcaaccagtctagctctctagattctagcacttcctcccaggagcacctgaaccacagctctaagtcagtaacaccagcctcaactctgaccaagtcaggccctggcagatggaaaactccagctgccatacctgccacaccggtggctgtcagccagccaatcaggacggatttaccacccccacctccacccccaccagtccactatgcaggggattttgatggtatgagcatggacctgccgctcccccctcccccttccgctaatcagattgggctaccttccgcccaggtcgcagccgcagaaagacgcaagagagaggagcatcagcgttggtacgagaaggaaaaggctcgcctggaggaggagagggaaagaaagcggagggagcaggaacgtaagctcggtcagatgcgaacccagagcctcaaccccgctccctttagccccttgaccgcccagcagatgaagcctgagaaaccctcgaccttgcaaaggccccaggagaccgtgattcgcgaactgcagccccagcagcagccacggaccattgagagacgggacttgcagtacattaccgtgagcaaagaggagctctcttccggcgacagcctctcaccggatccctggaagagagacgccaaagagaagctggaaaaacagcagcagatgcatatcgtcgacatgcttagtaaggagatccaggagctacaaagcaagccagacagatctgcagaagagagcgacaggctgcgaaagctaatgcttgaatggcagttccaaaagcggttacaagagagcaagcagaaggacgaagacgatgaggaggaggaagacgatgatgttgacactatgctgatcatgcagagacttgaagctgaacgcagggcgagggatgaagaacggcgaaggcagcagcagctcgaagagatgcgcaagcgtgaagccgaagacagagctagacaggaggaggagcggcgtcgccaggaagaagagcggactaagcgggatgctgaagagaaagtgatggtcctgta

SEQ ID NO: 231443 - DNA, 5231 bp, synthetic construct
  misc_feature 1..5231: note = Description of Artificial Sequence: Synthetic coding sequence
  source 1..5231: mol_type = other DNA
atgtctgccggtggcagggacgaagagcggaggaagctggctgacattatccatcactggaatgcaaacaggctagacctgttcgaaatctcccagcctaccgaggacctggagtttcacggggtgatgcgcttctatttccaggacaaggccgctgggaactttgcaaccaaatgtatcagagtgagctctaccgccacaacacaggatgttatcgaaaccctagccgaaaagtttaggcctgacatgcggatgctatcttccccaaaatactcattatatgaagtccacgtgtctggggaacgaaggttggatatcgacgagaagccgcttgtcgttcagctgaactggaacaaggatgatagagagggtagatttgtcctaaagaatgaaaatgacgccatcccacccaaggctcagagcaatggaccggagaagcaggaaaaggaaggcgtcatccagaacttcaagaggacactcagcaaaaaagagaagaaagagaaaaagaaacgggagaaggaggcactgcgacaggcctcggacaaggatgatagaccctttcagggggaagatgtggagaactcccgcttggcggctgaggtgtataaggacatgccagaaacctcttttacacgaacaatcagcaatccagaggtggtcatgaaacgcagacggcagcagaagctcgaaaaacgcatgcaggagttccgcagcagtgacgggcgaccggatagtggcggaaccctccgaatatatgccgacagcctgaagccaaatatcccatataaaaccatcctgttatcgaccactgacccggctgacttcgccgtggctgaagcattggagaagtacggccttgaaaaggagaacccaaaggactactgtatcgcaagagtaatgctgcctcccggagcacaacactcggacgaaaagggtgcaaaagagattattttggacgacgacgagtgcccactacagatctttagggagtggccctccgataagggtattctcgtgttccagctgaagcgcaggcctcccgatcacatccccaagaaaacaaagaagcacctggaggggaaaacccccaaaggtaaggagcgggctgacggaagtggatacggctcgacactgcctcccgagaaattgccttaccttgtcgagctgtcccctgatgggtcagattccagggacaagcctaaactttataggcttcagctctccgtgactgaggtgggcactgaaaaactggatgacaacagcatacaattgtttggccctggaattcaaccccatcattgcgacctgactaacatggacggggtcgtgacagtgactccacgtagcatggatgccgagacgtatgtggaaggccagaggatcagcgaaactaccatgctgcagtctggaatgaaggtgcaattcggtgcgtcccacgtttttaagtttgtggatccttcacaggatcacgccctggcaaagagatctgtagatggcggtctgatggtgaaaggtcccaggcataagcccggaattgtgcaggaaacgacttttgacctggggggtgacattcactcgggaaccgcactacccacgagtaagtcaacgacccgtctggatagcgacagggtgtcctcagcttcttcgactgcagagcgaggtatggttaaacccatgatcagagttgagcagcagcctgattaccggaggcaggaatctagaacacaggatgcctctggcccagagctgattctccccgcttcaattgagtttagggagagtagcgaggatagtttccttagcgccatcatcaattacactaactcttccaccgtccactttaaactctcacccacgtacgttctgtatatggcctgtagatacgtgctaagcaatcaatatagaccagatattagccccacggagcggacacacaaagtgatcgccgtagttaataagatggttagtatgatggaaggcgtcattcagaaacagaagaatatagccggtgccctggccttttggatggctaacgcaagtgaattactcaactttatcaaacaagacagggatcttagtaggattacattggatgctcaagacgtgctcgcccatctagtgcagatggctttcaaatacctggtgcattgtctgcagagtgagctgaataactatatgccggctttcctggacgatccagaggaaaattccctgcagaggcccaagattgacgatgttctgcatactttaactggcgctatgagcctgctccgacgctgcagagtaaatgccgctctgactatacagctattttcccaattatttcacttcattaatatgtggctgtttaatcgcctggtcacagatcccgatagcggcttatgttcacattactggggggctatcattcgccaacagctgggacacattgaggcctgggcagagaagcagggactggaacttgctgccgactgtcatctatccaggatcgtgcaggctacaactctgctgacgatggataagtatgcccctgatgatattccaaatattaattccacgtgtttcaagctgaattcattacagttgcaggcccttctccaaaattaccactgcgctccagatgagcccttcatcccaacagatcttattgagaatgtggtgacagttgccgagaacactgccgacgagttggctcgcagcgacggcagggaggtgcagctcgaagaggaccctgacctccagctgccattcctattaccagaagatgggtactcttgcgatgttgtcaggaatatccctaatgggctccaagagtttttggaccctctgtgccagcggggattctgtcggcttatccctcacaccaggagtcccggtacttggaccatttactttgaaggcgcagattacgaatcacatttattacgcgaaaacactgagctcgctatcccgctgcggaaggagcctgaaatcatcaccgtaaccctgaaaaagcagaacgggatgggcctgagtattgttgctgctaaaggggctggacaggacaagctgggcatctacgtgaaatctgttgtgaagggcggagccgctgacgatggaagacttgctgcaggtgatcagctcctttctgtcgacgggagatccttggttggcttaagccaggagcgagccgcagaattgatgacgcgcaccagctctgtggttacattggaagtcgctaaacagggagccatctatcacggtctggcaaccctcctgaaccagccgtcccccatgatgcagcgcattagtgaccggcgtgggtccggcaaacccagacccaagagtgagggcttcgagctctataataatagtactcaaaatggctccccagagtcccctcagttgccatgggcagaatacagtgagcccaaaaaactccctggggatgatagactgatgaagaatagagcagaccatcggagtagccccaatgtcgcaaaccagcccccatctcctggaggaaaatccgcttacgcatctggcacgactgcaaaaataacctccgtatctactggcaacctttgtacagaggagcagacaccacctccccgtcccgaggcttaccccatacctacacagacctacacgagagagtacttcacattcccggctagtaaaagccaagaccgaatggccccacctcaaaatcagtggcctaactatgaagagaaacctcacatgcacaccgatagcaatcacagctcaattgctattcaaagagtaacaagaagccaggaggagctccgggaagataaagcataccagctggagcggcatcgaatcgaagctgccatggatagaaagagcgatagtgatatgtggatcaatcaaagttcaagtctggactccagtacatctagccaggaacacttgaatcactcatcgaagagcgttacccccgcatcaacgttgaccaaaagtggcccaggcagatggaagacccctgccgctatcccagccacccccgtggccgttagtcaacccataagaaccgacttacctccacctccaccaccaccacctgtacattacgccggtgactttgacggcatgtctatggacctcccattgcccccacccccttctgcaaaccagatcggattgccgagcgcccaggtcgcggctgcagaaagaaggaaacgggaggagcatcagaggtggtatgaaaaggagaaagctcgcctggaagaggaaagagaacggaagagaagggagcaggagcgcaaactcgggcagatgcgtacgcagagcctcaatcccgctcccttctcccctcttacagcccaacagatgaagcctgaaaagcccagcaccctccagcggcctcaggaaacagttattcgggagctgcagcctcagcagcagccacggaccatcgagcgtcgcgacttgcagtacatcaccgtgtcgaaggaggagctctcaagcggagactcactcagtccggacccgtggaaacgggatgcaaaggaaaagctcgagaagcagcagcagatgcacattgtggacatgctaagtaaagaaatccaggaactgcagagtaaaccagaccgatccgctgaggagtccgacaggctgaggaaactgatgctggagtggcagttccaaaaaagacttcaagaatctaaacaaaaagacgaagatgacgaagaggaagaagatgacgatgtggatacgatgttgatcatgcagaggctggaggcggagaggagagcacgcttacaagacgaggagaggagacgacagcagcagttagaagaaatgcgcaagcgtgaggcagaggacagagcacgccaagaggaggagcggcgacgccaggaagaagaaagaacaaagcgcgacgctgaggagaagcgcagacaggaagaagggtattactcacggttagaagccgagaggaggcggcagcacgacgaagcggcaaggaggctgctggagccggaagcccctggccctaatagctacccaggcagcacaggtgccgctgtgggtgctcacgacgcgtgccgggacgcaaaagaaaagcggagcaaatcccaggacgccgattcacccggtagtagtggtgctccggagaacctcaccttcaaagaacggcaaagactgttttctcaggggcaagatgtgtccaacaaggttaaagcaagccgaaaactgacagaactggagaacgagttaaataccaagta

SEQ ID NO: 231444 - DNA, 5474 bp, synthetic construct
  misc_feature 1..5474: note = Description of Artificial Sequence: Synthetic coding sequence
  source 1..5474: mol_type = other DNA
atgagcgccggaggaagagacgaagagcgaagaaaactggcagacattattcaccattggaacgccaatagactcgacctgttcgagatttctcagcctacggaggacctggagttccacggagtgatgagattttactttcaagacaaagcagctggaaactttgcaactaagtgcattagggtctcatctactgcaaccacccaggacgtgatcgagaccctcgcagagaagttccgcccagacatgcggatgttgtcttcacctaagtactccctttatgaagttcacgtgagcggtgagcgtagactggacatcgacgaaaagccgcttgtcgtgcagctgaattggaataaggacgaccgggagggcagatttgtgctgaagaatgagaacgacgctatccccccaaaaaaggcccagagcaatgggccagagaagcaggagaaggaaggcgtgatccaaaacttcaagcgtaccctgtccaagaaggaaaagaaagagaagaagaagagggagaaggaggcccttcgccaggcctctgataaggacgacagacccttccaaggagaggacgtcgagaatagcaggctggccgcagaggtgtataaagatatgccggagacgtcctttacgcgaactatcagcaatccggaagtggtaatgaaaagacgacgccagcagaaactggaaaagcggatgcaggagttccgatcatctgacggcagacccgattctggagggactctcagaatttatgcagacagcctcaagccaaatattccttataaaacaatcctgctcagtacaacggaccccgcagacttcgccgtcgctgaggccctcgaaaagtacggactagaaaaagagaaccccaaagattattgtatcgccagggtcatgctccctccaggcgcacagcacagtgacgagaagggagccaaagaaatcatactggatgatgacgaatgtccacttcagatattccgtgagtggccttccgacaaaggaattctggtgttccagttgaaacgcagaccccctgaccatattcctaagaagaccaagaagcatctggaggggaagacgcctaagggcaaggaaagggctgatggctctgggtatggttctacactgccacccgaaaagctgccatatctcgtggagctgtcacctggcagaagaaatcacttcgcctattacaactaccatacctacgaggatggcagtgacagtcgagataaaccaaagctgtaccgactgcagctgtcagtaaccgaggtagggactgagaaactagacgacaattctattcagctattcggtcctgggatccagccacatcattgcgacctgacgaacatggatggcgtcgtgactgtaactccgagatcaatggatgcagagacttatgtggagggacagcggatatccgagacaaccatgctgcaaagcggtatgaaagttcaattcggcgcttcccacgttttcaagtttgtcgatccctcgcaagaccatgcactggctaagcgcagcgtggacggtggcttaatggttaaggggcctagacacaagccaggcatcgtgcaggagaccacctttgacctgggcggtgatattcatagtggtacagctttgccaacctccaaatctactacgcgactagatagtgatagggtgagttcagccagttccacagctgagcggggtatggtgaagccaatgatccgcgtggaacagcagcctgactacagaagacaagagtcacggacccaggacgccagcggccctgagctcatcctccccgcatctatcgagttccgtgaatcttccgaagattcattcttgtccgcaataattaattacaccaacagttctaccgtacattttaaactgagcccaacttacgtgctgtatatggcttgcaggtacgtgctgagcaatcagtaccgcccagacattagcccaacggaacggacccataaggtcattgcagttgttaataagatggtatccatgatggaaggagtgatccagaaacagaagaatatcgccggagccctggcattttggatggctaatgcttcagagttgctgaatttcattaaacaggatcgggatctcagcaggataacactcgatgctcaggacgtgctcgctcacctggtacagatggctttcaagtatctcgtgcactgcctacagagcgaactcaataactacatgccagcttttctcgacgaccctgaggagaacagccttcagcggcctaagatagacgacgtactacataccctcaccggcgcaatgtctctgctgcgcagatgtcgggtcaatgctgcgctgaccatacagctgttttctcagctgttccacttcattaatatgtggttattcaaccggctcgtgacagatcccgacagcggcctttgttcccactattggggtgctatcatcagacagcagctgggacacatcgaagcctgggctgagaagcaaggtttggagctggcagccgactgtcacctatccagaattgttcaggcaactacacttctgacaatggataagtatgcgcctgacgacattcccaatattaactctacgtgctttaagctgaatagcctccagctgcaggccctactacaaaattatcactgtgcacccgacgagccattcattcctactgatctgattgaaaatgtggtcactgtagccgagaatacagccgacgaactggccaggtccgatgggagggaagtgcagcttgaagaagatcctgacctccagcttccctttctgttaccagaagacggatatagttgtgatgtagtgagaaacatccccaacggtctgcaggagtttttggatcccttgtgccagaggggcttttgccgcttgattccacacactcgctcacccggaacctggaccatttatttcgagggcgctgactacgagtcccacttattgagggagaacacagagttggcacagcccttgaggaaggagccggaaattatcacggtgaccctgaagaagcagaacggcatgggcctctctattgtcgcagctaagggcgctgggcaggacaagctgggaatctatgtaaaatcggtggttaagggtggagccgctgacgttgacggtcgcctggctgccggtgatcagctcctgagtgttgacggaagaagcctggttggcttaagccaggagagagccgcagagctgatgacacgaacatcttcagtggtgaccctcgaggtcgccaaacagggagcaatctaccatggtctggctacgctgcttaaccagccctcccccatgatgcagaggatttcggacagaagggggtctggcaaacccaggccaaagtcggaggggtttgaactgtacaacaactcaacccagaatggctcaccggagtctccccagctcccttgggctgagtactccgagcctaagaagctaccgggagatgacaggttgatgaaaaatcgcgcagaccatcgctcctcgcccaacgttgccaaccagcccccatcacctggcggaaagagtgcctatgcttccggaaccaccgcaaagataacatccgtctccactgggaacttgtgcaccgaagagcagacgccacctccaagacccgaggcctatccaatccccacccaaacgtacacgcgcgaatatttcacttttccagcttcaaaatctcaggaccgcatggctcctcctcaaaatcagtggcccaactacgaagagaagccccacatgcacaccgactccaatcactccagcatagcaattcagcgcgtgactcggagccaggaggagctgagagaagacaaggcctaccaattagaacggcaccgtatagaggctgctatggaccggaaatctgactcggatatgtggattaatcagtcaagcagccttgattccagcacatcatctcaggagcacctgaaccacagcagcaaaagcgtcacaccagcatctacgctaactaaaagcgggccagggagatggaagaccccagctgccatccccgcaacaccggtcgcagtgtcgcaaccaattcgcacggatttgcccccaccacctcccccacctcccgtacactatgctggagactttgacggcatgtcaatggacctgccactacccccacctccaagtgctaaccagatcgggctgccttccgcccaggtggctgccgcagaacggagaaaaagggaagagcatcaaagatggtacgaaaaagagaaagctcggctagaggaggagagagagaggaagcggcgtgagcaggaaaggaaactcgggcagatgcggacacaaagcttaaatccagcgccttttagccctctgacagcacagcagatgaaacccgaaaaaccctctacactgcaacgacctcaggaaactgtcatccgggaactgcaaccccagcaacaaccacgcaccatcgagcggagagatctgcagtacatcaccgtgtcaaaggaagaactcagctccggggacagcctctcccctgatccgtggaaacgggacgccaaggaaaagctagaaaagcagcagcagatgcacatcgtagacatgctctccaaagagattcaggagctgcagtccaagccagatagatctgctgaggagtcagatagattgcgaaagctgatgcttgagtggcagtttcagaaacggctgcaggaatccaaacagaaggatgaggatgacgaggaggaggaagatgacgacgtggatactatgctgattatgcagcggcttgaagcggagaggagagccaggctgcaggatgaagagcggaggcgccagcaacagttggaagaaatgagaaagcgcgaggctgaggaccgggcacgccaggaagaggaaagaaggcggcaggaagaagagcgcactaaaagggacgctgaagagaagagacgacaggaagaggggtattattctagactcgaagcagaacgaaggaggcagcacgatgaagcagcccgtcggctgctcgaacccgaggctccaggattgtgccgaccgcctctgcctcgagactacgaacccccttctccatcgccagccccaggagccccaccaccgccaccccagagaaacgcttcgtatctcaagacgcaggttctgagccccgattcactgtttactgcaaaattcgtggcttataatgaggaggaagaggaggaggactgtagtctcgccggaccaaattcgtatccagggagtacaggcgctgcagtgggagcgcatgacgcctgcagggacgctaaggagaagcggtcaaagagccaggatgcagactcccctggctcctcgggggctcctgagaacttgacctttaaagagaggcagagactgttcagtcagggccaagatgtttccaacaaagtgaaggcaagtaggaaactgacggagttagagaatgagctgaatacaaaata

SEQ ID NO: 231445 - DNA, 3282 bp, synthetic construct
  misc_feature 1..3282: note = Description of Artificial Sequence: Synthetic coding sequence
  source 1..3282: mol_type = other DNA
atgaaggagatggtgggcggatgttgcgtttgttctgacgaacggggatgggcggagaatccgctagtgtactgcgacggccacgcttgctctgtggttgttcaccaagcgtgttatgggattgttcaggtgccaacagggccatggttctgcagaaaatgtgagagccaggagcgggctgctcgggttaggtgtgagctgtgccctcataaggatggagctctgaagaggactgacaacggtggctgggcccacgtcgtgtgtgccctgtatattcccgaggtccaattcgctaacgtcctaactatggaaccaatcgttttacaatatgtcccacacgaccggttcaacaagacttgctacatttgtgaagaacaggggagggaaagtaaagcagccagcggcgcttgcatgacttgtaacagacatggctgccgccaggcattccatgtgacgtgtgcgcagatggccggactgttgtgtgaggaggaggtccttgaggtagacaatgtgaaatactgtggatattgcaaataccattttagcaagatgaagacatctcgccactcaagcggaggtggcggtggtggggcagggggtggtggcggatcgatgggaggaggcggatccggtttcattagcgggcgaaggtctcgctctgcatccccttcaacccagcaggaaaagcacccaacacaccacgagagagggcagaagaagagccggaaggataaggaaaggttgaagcaaaagcacaagaagcggcctgaatcccctccctccattcttaccccacccgtcgtacccaccgccgataaggtgagtagttccgcatccagtagttcccaccacgaagcaagcacacaggagaccagtgagtctagtcgcgaatctaagggcaaaaagagctcttctcattccttatcacacaaaggcaagaagttgtccagcggcaagggagtatcgagctttacctctgcgtcttcctcgagttcatcctcctcttccagcagtggagggccttttcagccagccgtgagctctctgcagagttcacctgatttttctgcatttccgaaactggagcaaccagaggaggacaaatatagtaagccaaccgcccctgctcctagcgctccacccagccctagcgcacccgagcctcctaaggccgatttgttcgagcagaaggtggttttttcaggattcggtccgatcatgcgctttagtaccaccacttcctcctccggtagggcacgtgccccatccccaggagattacaaaagccctcacgtgaccggtagcggggcttcggctggcacgcataaacggatgccagcactgtcagccactcctgtccctgcggacgagactccagaaactggattaaaagaaaagaagcacaaagcctcgaagcgttctcgacatgggccaggtagacctaagggatctcggaataaagaaggaaccggcggacctgcagcgccaagcctcccctctgctcagcttgctggtttcaccgcaacagctgcctctcctttttccggtggttcgctggtgtctagtggactcggaggcctgtccagcaggacttttgggccttcaggcagtcttccgtctctgtctttggagagtcctctgttaggagccggaatttatacaagcaataaggacccaatttctcactccgggggtatgctccgcgctgtgtgcagcacacccttaagttctagcctgctcgggcctcctggtactagcgccctccctagactcagcagatccccttttacttccaccctgccctcatccagtgctagcatcagcaccacccaagtcttttctcttgccggatctacattcagcctaccttcgacacatatcttcgggacacctatgggagctgtgaaccctctgctttcacaggcagagtctagtcatacagagcctgacttggaggattgttcttttcggtgtcggggtacaagtcctcaggaatccttgtctagtatgtcacccataagtagcctccccgcactctttgaccaaacggcaagtgccccatgcgggggtggccagctggatcctgccgctcctggcactacaaacatggagcagctgctggaaaaacaaggagacggcgaagctggggtcaacatagttgagatgctgaaagcgctgcatgctctgcaaaaggaaaaccagcgactgcaagagcaaattctctccctgactgcaaagaaggagcgcctccaaatccttaacgtgcagctgtcagttccgttcccagccttgccagccgctttgcccgctgcaaacggtccagtccccggaccctacgggctcccccctcaggcaggatctagtgatagcctgtcaacctctaagtctccccctggtaagagtagcttggggctcgacaatagcctgtctacaagtagtgaagacccacattcaggatgcccttctcgaagctccagtagtctgtcctttcatagcacacctccacctcttcctctgttgcagcaatctcctgccactttgcctctagccctcccaggagccccagcaccactgcccccacagccccagaatggattaggaagagcaccaggagccgctggactgggagccatgcctatggccgaggggttgttaggcggactcgcgggtagtgggggacttccccttaacggactgctaggaggtctgaacggggctgctgcaccgaacccagcctctctgtcgcaagctggaggagctcctaccctgcagttgcctggttgcctgaacagtcttacagaacagcaaaggcacctgctgcagcagcaggagcagcagctgcagcaacttcagcaactgctcgcttccccccagcttacacccgagcaccagacggtcgtgtaccagatgatccaacagatccagcaaaagcgtgagttgcagagactgcagatggctgggggatcccagctgccgatggccagtctgctcgctggctcgtccacgccccttctgagcgccggaacacctggactgttgcccacagcttcagcacctcccctgctgccagctggggctctggttgccccttcactcggcaataatacgagtctgatggccgcagcggctgccgcagcggctgttgctgctgcgggaggccctcctgttctgaccgcccagaccaatccttttctgagtttgtctggcgctgaaggcagcggcggagggcctaaaggtggaacggcagacaagggcgcatcagctaatcaagaaaaaggatag

SEQ ID NO: 231446 - DNA, 978 bp, synthetic construct
  misc_feature 1..978: note = Description of Artificial Sequence: Synthetic coding sequence
  source 1..978: mol_type = other DNA
atgaaggagatggtcggaggctgttgcgtgtgtagcgacgagagggggtgggcggagaacccccttgtttactgtgacggacatgcgtgctctgtcgttgttcaccaggcctgttacgggatcgtacaggttcccacgggaccctggttttgtaggaagtgcgagtcacaggaaagggcagcccgagtacgctgtgaactctgtcctcacaaagatggggcattgaagcggaccgataatgggggatgggctcatgtggtctgtgcactttacatccctgaagtccagttcgctaatgttctgaccatggaacccatcgtgcttcagtatgtaccacacgaccggtttaacaagacctgctacatttgtgaggagcagggcagagagtccaaagccgcttctggcgcttgtatgacttgcaaccgccacggttgtcggcaggcttttcacgttacatgcgcccagatggccggtttgttgtgtgaagaggaagtgctcgaggtggacaacgtgaaatattgtggctactgtaaatatcatttctcaaagatgaaaaccagtcggcactcttcaggcggaggaggaggcggagccggaggcggaggaggctccatgggaggaggcggttctggcttcatctcgggtcgaagatcgcgaagcgcaagcccctccacgcagcaggagaaacacccaacacaccacgagagaggacaaaagaagagcagaaaggataaggagcgtctaaaacaaaaacataagaagcgacctgaatctcctccaagtatcctcacccctccagtggtgcccaccgctgataaacccaggcgtggacaccagagcccaactaaccatggcattggcagtcttggctgttgcctgccagatacaccgatttgcctgtgtcctgaaggcctgtccccaggcctgcttagcgctgaatcagggggaaggcattctgggctcttgtccaagttctag

SEQ ID NO: 231447 - DNA, 16614 bp, synthetic construct
  misc_feature 1..16614: note = Description of Artificial Sequence: Synthetic coding sequence
  source 1..16614: mol_type = other DNA
atggattcccagaaactagctggcgaagacaaggattccgagcctgctgcagatggtcctgcggcatccgaagatccatctgccacggagtctgacctgccaaatccacacgtaggtgaagtcagcgtgctcagtagtgggagcccccgactgcaggaaaccccacaagattgttctggcggacctgttcgaaggtgcgcactctgtaactgcggggaaccatcccttcacggccagcgcgaattacgccgattcgagctcccattcgactggcccaggtgtcctgtcgtgtcacctggcggatcaccaggccctaacgaggcagttctgccttctgaggatctgagtcagatagggttccccgagggcttaacacccgctcaccttggtgaaccaggtggatcatgctgggcacaccattggtgcgccgcttggtccgcaggggtctggggacaggagggacctgaactgtgtggggtggacaaagccatattcagcggaatttcccagcggtgcagccattgtacccgtttgggggcatctattccttgtcgcagtccaggatgtcctaggctgtaccatttcccctgtgccacggcatcaggatccttcctgtctatgaaaactctccagctgttgtgcccagagcattccgaaggtgccgcatacctggaagaggcccgatgcgctgtttgtgagggccctggggagttgtgcgacctatttttttgcactagctgtgggcaccactaccacggagcctgccttgatacagctttaaccgcgaggaaaagggccggttggcagtgtccagaatgcaaagtgtgccaggcctgtcggaaaccgggaaatgactccaagatgcttgtgtgcgaaacctgcgataagggatatcatactttttgcctaaaaccgccaatggaggaactgccagctcattcctggaagtgcaaagcatgcagggtctgcagagcatgtggggctggcagtgcagaattaaaccccaactcagagtggtttgagaattattctctgtgtcaccgttgccacaaggcccaaggtggacagactatcaggagcgttgctgagcaacatactccggtttgctcccgattttcgcctcctgaaccgggagacactccaacggacgaaccagatgccctttatgtggcgtgccaggggcagccgaagggaggacacgtaacatcaatgcagccaaaagaacccggaccattacaatgcgaagcgaagccgctcggaaaggccggagttcagctagagccacaattggaggcacccctgaacgaggagatgccattgctgccaccaccagaagagtctcctctcagtcctccgcctgaagagtcgcctaccagtccacctcccgaggctagtcgcctgtctccgccacctgaagagttgccagcctctccacttcctgaagcactgcatctcagcagacctctggaagagagccctctgtcccccccaccggaggagagtcccctgagtcctccgcctgagtccagcccttttagccccctagaggagtcccccctgagcccacctgaggagagcccaccctcgcctgcgctcgagaccccactgtccccaccgcctgaggccagccccctgtctccaccatttgaggagagcccgctgtctccacctccggaggagttgccgacttcacctccaccagaagctagtcgcctttctccaccacccgaggaatcaccgatgtccccccctccagaggagtcgccaatgtctccaccgccagaagcgtcaaggctattcccccctttcgaagagagcccactgtctcccccacccgaggagtctcccctgagtccgccaccagaggcctctagactttcgcccccaccagaggattctccaatgagtccacctcctgaagagagccccatgtcaccgccaccggaggtgagtcgactcagtcccctgccggtcgtgagtaggttatcaccgccaccagaagagtccccccttagtccccctccagaggagtctcccacttcccccccaccggaggcctcacgacttagccctccccctgaggacagtcccacaagtccaccacctgaagacagtccagcctcacctccgccagaagactctctaatgagtttaccacttgaggaatcaccattgctacccctccctgaggagccccagctctgccccaggtcagaaggcccacacctaagcccacgaccagaagaaccacatctatctccaagaccagaagaaccgcatttgtctccccaggctgaagagcctcatctgagcccacagcctgaagaaccttgcctttgcgccgtacctgaagaaccacatcttagcccccaagctgagggccctcacctgagtccccagccagaggagctgcacctatcacctcagactgaggagccccacctctctcccgtgccggaggaaccctgtctgtccccacaacctgaggagagtcatctcagtccccagtccgaagaaccttgtctgtcccctcggcctgaagagtcacacctgagtcctgaactggaaaaaccacccctgagcccaagaccagaaaagcccccagaagagcccggtcaatgccccgcacccgaggaactgccactctttccacctccaggagaaccttcgctgagtccacttctgggcgagccagcgctgtccgaaccgggtgagccaccactctcacctcttcctgaagagctccctctttccccttctggcgagccaagtctctccccccaactcatgcctcctgacccgctgccacctcccttgagccccattattacagcggctgcccctccagctctgtcccccctgggagaattggaataccctttcggtgcaaaaggagattcagatccggagtcccctttagctgcacctatcctcgagacacccatctccccaccacctgaagccaactgtaccgatcccgagcccgtcccgccaatgatcctacccccaagccccggaagtcccgttggtccagctagccccattctgatggagcctctgccgccacagtgcagtccactgcttcagcacagcttggtgcctcagaactcacctccaagccagtgttcccctccagcactccccctgagtgtccctagcccgctgtcaccaataggaaaagtcgtgggcgtgtccgatgaggccgagttgcacgaaatggagaccgagaaggtgtctgagcccgagtgtccggcactggagccaagcgccacgagtccccttcctagccccatgggtgacttatcctgccccgctccgtcccctgccccagccctggacgacttctccggcttgggagaggataccgcgcctttagacggcatcgacgctcccggtagccagcccgaacccggtcagacacccggatcactggcttcagaattgaagggcagccccgttttgttagatccagaggagctggcccctgtgacccctatggaagtgtatccggaatgtaaacagacagcaggtcaggggtccccttgcgaagaacaggaagagcctagggcacccgtggcccctactccacccactctgattaaatcagacattgtgaacgagatctcaaacttatcgcagggagacgctagcgcctcctttccaggcagtgagccactcctggggagccccgatccagaggggggtggttcactatccatggagctgggcgtctctacggacgtgtctcccgcacgcgacgagggctcactcaggctgtgcacagactcgctccccgagaccgatgattccctcctgtgcgatgctggcaccgccattagcggaggcaaagccgagggggagaaaggcaggagaaggtcttccccggctaggtctagaataaaacaaggtaggtcctcaagcttccctggcagaagaaggcctagggggggagcgcatgggggtagaggcagaggcagggcccgtcttaaatctaccgctagctccatcgaaacactagtggtggccgacatcgatagctccccctctaaggaggaagaggaggaggatgacgacactatgcaaaatactgttgtgctgttcagcaacacggacaagttcgttttgatgcaggacatgtgcgtggtttgcggaagtttcgggcgaggggcagaaggacatctattggcgtgctcccaatgttcacagtgttatcatccgtactgtgtcaacagtaaaattaccaaggtaatgttactcaaaggttggcgctgcgtggagtgcatcgtgtgtgaagtgtgcggccaggcctctgacccgtcaagactcctgctgtgcgacgattgtgacatttcctaccatacctattgcttagacccaccacttcttacggtcccaaagggaggttggaagtgtaaatggtgcgtgtcttgtatgcaatgtggcgcagctagtcccggtttccattgcgagtggcagaactcgtacactcactgtggaccatgtgcttcactcgttacttgtcctatttgtcacgcaccttacgtcgaagaggacttgctgatccagtgcaggcactgcgagagatggatgcatgccggatgcgaaagcctgtttactgaggatgacgtggaacaagcagccgatgaggggttcgattgtgtcagttgccagccctatgttgttaagcccgttgctccagtcgcccctccagaactcgtacccatgaaagtgaaggagcctgagcctcagtatttcagatttgagggtgtgtggcttaccgagactgggatggcccttctccgcaacctgactatgtccccgctgcacaagaggcgccaacggaggggaagacttgggttgcctggggaggccggactggagggtagtgaacctagcgacgccctcgggcctgatgacaaaaaagatggcgaccttgacactgacgaactgttgaaaggtgaaggaggagtggaacacatggagtgcgagatcaagctggagggtcctgtttcccccgatgtcgagccaggaaaagaggagaccgaagaatctaagaagaggaaaagaaagccttatagacccggtatcgggggattcatggtgcgacagaggaaatctcatacacgaaccaaaaagggccctgcggctcaagctgaggttctgagtggggacggccagcccgacgaagtgattccagccgacctgcccgctgagggcgctgtcgagcaatcactggccgaaggagacgaaaagaagaagcagcaaagaagaggcaggaagaagtctaagcttgaagacatgttcccggcataccttcaggaagctttctttggaaaagaactactcgacctgagtcgaaaagcattgttcgccgtgggcgttgggaggcctagtttcggcttaggcaccccgaaggcaaaaggtgatgggggttctgagaggaaggagttacccacatctcagaaaggcgacgatggtccagacatcgccgatgaggagagcagggggttagaggggaaggcggacacacctggtcctgaggatggtggcgtcaaggcctctccggtaccgtcagaccccgagaagcctggaacacccggagagggaatgttgtcgtctgacctggaccggatttctactgaggaacttcctaaaatggaatctaaggaccttcagcagctttttaaagacgtgttgggcagcgaaagagaacagcacctgggctgtggtaccccgggacttgaggggtccaggactcccctgcagcggccattcctccaggggggattacccctaggaaacctgccaagttcctcccccatggactcataccccggtctgtgtcagtctccctttttggatagtcgcgaaagagggggtttcttctccccagaacccggagaaccggatagcccctggactggatccggcggaacaacgccgagcacgccaaccacccctacaaccgaaggggagggggacggcttatcctataatcagagaagtcttcagagatgggagaaagatgaagagttgggtcaattgtcaaccatttctcctgtgctatatgcaaacatcaactttccaaacctgaaacaagattatcccgattggagctcccgctgtaaacaaatcatgaagttgtggaggaaggtgccggctgcagacaaggccccatatctgcaaaaagccaaagataacagagcggctcataggatcaataaagtacagaaacaggctgaaagtcagatcaataagcagacgaaggttggcgatatcgctagaaaaaccgatcggcctgccctgcaccttagaataccccctcagccaggcgcattaggctcgcctcccccagcagccgctcctacaatctttatcggctctcctaccacaccagcaggactctctacatccgcggatggttttctgaaaccacccgcagggagcgttcccggaccggactctccaggagagttgttccttaagctgcccccacaggtcccagcccaggtaccttcccaggatccctttgggttggcacctgcatatcccctcgagcctcggtttcccaccgccccacctacttacccaccctatccctctcccacaggcgcacccgctcaacctcctatgctgggagcaagcagtagacccggtgctggacagccaggcgagttccacacaacacccccaggcacccctaggcatcagccctccacacccgatcccttccttaaaccgaggtgtccctctctggataacctcgccgttcccgaatcgccaggagtcggaggagggaaagcatccgaacccctgctgagcccgccaccttttggagagtcgcgcaaggctctcgaagtgaaaaaggaagagcttggagcgtcttcaccctcgtatggcccacctaacttgggcttcgtagacagtccatcttccgggactcacctggggggtctagagctcaaaacccctgacgtcttcaaagctcctcttacaccacgggcttctcaggtggaacctcaaagccccggtctgggcttgagaccacaggaaccacccccagcacaggccctcgccccatcgccaccctctcatcccgatatcttccgccctgggagttataccgacccctatgcacagccacccctgacccccagaccacagccacctccaccagaatcgtgctgcgctcttccccctagatccttgccttccgaccctttttcaagggttccagctagcccccagagccagagtagcagtcagtcacccctgactcccagacctctctcagccgaggccttttgtccttcccccgtgacccctaggtttcaatccccggacccgtattccagacccccttcgcgtccacagtcccgcgatcccttcgcccctctgcacaagcctccgagacctcagccccctgaagtggcatttaaggccggttccttggcgcatacgtccttgggtgctgggggattcccagccgctctcccagctggacctgccggagagctccacgctaaggtgccttctggacaaccccctaactttgtcaggagtcccggaactggggcttttgttggaactccatctccgatgaggtttacatttcctcaggctgttggcgagccctcccttaagccccctgtaccccagccaggtcttccacccccacatgggattaatagccatttcggaccgggaccaacccttggaaagccccagagtacgaattacactgtggccactgggaattttcacccaagcggttccccccttggaccgagcagcggatccactggcgagagctatggactgtcaccactgcgaccgccaagtgttttacctccccctgctcctgacggcagtctgccatatctcagccatggagcctcccagcgttccggaatcaccagccctgtggagaaaagggaagaccctgggacgggaatgggatcctctttggctaccgccgagctgccaggcacccaggatcctggaatgagcggactcagtcaaaccgaactggaaaaacagcgtcagagacagcggttgcgggaactgcttattcggcagcagatacagcgtaatacgcttcggcaagaaaaagaaactgcggctgcggcagcaggagctgtagggcctccaggcagctggggggcagagccgagctctcccgctttcgagcagctgagcagaggacagacacctttcgccggtacacaagataagtccagtctggttggcctgcccccaagcaaattatcaggtccaattctgggaccgggatcattcccctcggatgatagactgagcaggccaccccctcccgctacaccaagcagcatggatgtaaattcccgtcaactggtcggcggttctcaggcgttttatcaacgggctccctaccccggttcgttgccattacagcagcagcaacaacagctctggcaacagcagcaggccactgccgctacctctatgcgctttgcaatgagcgctcgcttcccaagcacccctgggcctgaactaggtagacaggcccttggatctcccctcgctggcatctcaacccgcttgcccggacccggagagccggtgcctgggcctgcaggccctgcccaatttatcgagttgcgccataatgtccagaagggtctgggcccaggtgggacaccattccccggtcagggtcccccacagaggccccgtttttacccggtgagtgaagaccctcaccgcctggcccctgaaggcctccgaggcctggcggttagcggtttgccgcctcaaaagccgtcagcccctccggcacccgagctgaacaatagcttgcacccaacaccacacaccaaagggccaacccttccaacaggcctggaattggtgaacagacccccttctagcacagaattgggcaggcctaaccccctagcccttgaagcaggtaagttaccttgcgaggatcctgagctcgatgacgacttcgatgcccataaggcgttggaggatgatgaggagctggcacatctgggcttaggtgtggacgtggctaaaggagatgacgaattgggcaccctggaaaatctcgaaacaaacgatccccacctggacgatctgctgaatggcgatgagttcgatctgctggcctatacggaccccgagctcgacacaggcgataagaaggatatcttcaatgagcatctgcggctggtggagagtgccaacgaaaaagccgagcgcgaggctctactgaggggtgtggagccgggtccactcgggccagaagagcgcccaccaccagccgctgatgctagcgagcccagattagcatctgtcctcccggaagtgaaacccaaagttgaggaggggggtaggcatcctagcccttgtcagttcaccatcgcaacaccaaaagtggaaccagcccctgcagccaactcactggggctgggactgaaacccggtcagagtatgatgggctcacgggatactcgcatgggcaccggcccattctcgagttctggtcatactgcagagaaggcttccttcggtgccacgggaggcccacctgcccacttgttgactcccagcccattgtcgggtccaggtgggtcttctttgctagagaagtttgagctggagtctggggctttgacactccccggtggtccggcagccagcggagacgagctggacaagatggagtccagcctggttgccagtgagctcccgctgcttattgaggacctgctggaacatgaaaagaaagaactccagaagaagcagcaactcagtgcccagctccaaccagcccaacaacagcagcagcagcaacagcagcattccctgctgtccgcccctggccctgcacaggctatgtcactcccgcacgagggttcatcacctagcctggcaggaagccagcaacagctttccctgggtctggccggagccagacagcccggactacctcagcccttgatgccgacacagccgccagcacacgccctgcaacagcgtctcgccccaagcatggccatggtgagcaatcagggacatatgctctctggccaacatggcggtcaggccggactggttccccagcagtcttcacagcccgtgttgtctcagaaacctatgggcaccatgccccctagcatgtgtatgaaaccacagcagttagccatgcagcagcaactggctaattctttcttccctgatacggacctcgacaagtttgctgcggaagatatcatcgatcctatcgcaaaggccaaaatggtcgcactaaaaggcataaagaaggtaatggcccaggggagcatcggggtggcacctggtatgaatcgacagcaggtcagtttattagcgcagcggctgagcggtggaccgtcttcagacctccagaaccacgttgccgctgggagtggccaagagaggtctgccggtgatccttctcagcccaggcctaacccaccgaccttcgcccaaggcgtgatcaacgaggccgatcagaggcagtacgaggaatggttattccacacccagcagctactgcagatgcagttgaaagtgctcgaggaacagattggcgtacaccgaaagagtcgaaaagcgctttgcgctaagcagcgcactgcaaagaaagcagggagagagtttcccgaggccgatgctgaaaaactaaaattagtgaccgaacagcagtctaagattcagaaacagctggaccaagtccggaagcagcaaaaggaacatacaaatctgatggccgagtacaggaacaagcagcagcagcagcagcagcaacagcagcagcagcagcagcagcattcggccgtactggcacttagccccagccagagccccaggttgctcactaaacttcccggtcaacttctgcccggacacggcctgcagcctccacagggccctcccggagggcaggcgggtgggctaagactaactcccggagggatggctctcccgggtcagccaggaggcccattcctaaataccgcactggcccagcagcaacagcagcagcacagcggcggagccggtagtctggcgggaccctcggggggattctttcccggaaatctcgctctgcggtcactggggcctgactctcgcctactgcaggaaaggcagttgcagctccagcagcagcgaatgcagctggctcagaaactgcagcagcaacagcaacagcagcagcagcaacagcacctactgggtcaagtcgccatccagcagcagcagcaacaaggacccggagtacagaccaaccaggctctcggaccaaagccacaaggcctcatgccaccgagttcacatcagggtctgctcgtgcagcagctttcaccccagccgcctcaagggcctcaaggcatgctcgggcctgcccaggtcgcagtgctccagcaacagcaccccggtgctcttggaccccagggtccccaccggcaggtgttgatgactcagtcacgtgtgttgtcatctccccaattggcccagcaggggcagggactgatgggccaccgactggtgacagctcagcagcagcaacagcagcagcagcatcaacagcaggggtctatggctggcttaagtcatctgcaacagtctctgatgtctcatagtgggcagcccaagctcagcgcccagccaatgggttctctgcagcagttacaacagcagcagcaattacagcagcagcagcagctgcagcagcaacaacaacaacaactacagcagcaacagcagcttcagcaacagcagctccaacagcagcagcagcaacaacagctgcagcaacagcagcagcagcagttacagcagcagcagcagcagctccagcaacagcagcaacagcaacagcagcagttccagcagcaacaacaacagcagcaaatgggactacttaaccagtccaggaccctgttatctccccagcaacagcagcagcagcaggtggcacttggcccagggatgccagctaaaccgctgcaacacttttcttcccccggagccctaggacctactctcttgcttactggcaaagagcagaacactgtggatcctgccgtgagctctgaagccacagagggcccatccactcatcaggggggacccttggctattggcaccactcctgagagcatggcaaccgagcccggtgaggtcaagccttcattatccggtgactcccagctgttactagtccagccacagccacaaccgcaaccatccagtctacagctccaaccgcctctccgccttcccggacaacagcagcagcaagtcagcttactccatactgccggaggtgggtctcatgggcagctgggatccgggagttctagtgaagctagctccgttcctcatctgttagcgcagccctcagtgagtctgggggaccagccgggtagcatgacccagaatttactgggacctcaacagcccatgttggaaagaccaatgcagaacaacacgggccctcagcccccaaagccagggccagttctccaaagcgggcagggcctcccaggagtcggtataatgcctaccgtgggacagctgagagctcaactgcagggcgtgctggcaaagaacccacagctgcggcacttatctcctcaacagcagcagcagcttcaggccctgctgatgcagcgccagcttcagcagagtcaggccgtgcgccagacacccccataccaggagcctgggacccagacaagtccactacagggcctgttaggatgtcagccacaacttggcggttttcctggacctcagaccggtccactccaggagcttggcgctgggcctcgaccccagggccctcctaggcttcctgccccacctggagccctgagcactggaccggtgctcggacctgtccaccctacacctccaccctcaagtccccaagaacctaagcggccaagtcaactcccttctccaagctcgcagctgcctaccgaagcccagctgcccccaacccacccagggactccaaagccacagggcccaacactggagcccccaccaggcagggtgtctccagcggctgctcagctcgctgacacacttttttcaaaaggtttaggcccatgggacccccctgacaaccttgctgaaacccaaaagcctgagcagtcaagtctcgtacctggacacctcgaccaggttaatggccaggtggtccctgaggcttctcagttgtcaattaagcaggaacctagagaggaaccatgcgctctgggcgctcaatctgtgaaaagagaagcaaatggcgagcccattggcgctcccggtaccagcaaccacttgctactggctggccctaggtccgaagccggtcatctgctcctgcaaaagctccttcgtgccaaaaacgtgcagctgtcaaccggccgaggttccgagggcctcagagcagagataaatggacacatagactccaaactcgctggcttagagcagaagctgcagggaacgcctagtaacaaggaggacgctgccgcacggaagcctttgactcccaagccaaaacgggtgcagaaagcctcggacaggttagtctcgtcacgcaagaaactgagaaaggaagatggggttcgggctagtgaagcactcctgaagcagttgaagcaggagctcagtttactgccactgaccgaacctgctatcaccgctaacttttcgctcttcgcaccctttggatctggttgtccagtgaacggccagagccaactccgcggtgcctttggctctggggcactgcccacgggacccgattattattcacagttgcttactaagaataacttgtctaaccccccaacacccccaagcagcttgcctccaacaccgccacctagcgtgcaacagaaaatggtgaacggagttacccccagtgaagaactcggagaacaccccaaggacgcggcatccgcaagagattctgaaagggctctgagggacacatccgaggtgaagagtctggacttgctggcggctctgcctacccctccgcataaccagactgaggatgtgaggatggagagcgatgaagatagcgactcacccgattcaatcgtgcctgcctcttcacccgaatccatcctgggcgaagaagcccctcggtttccacatctggggtccgggcgatgggagcaggaagatcgcgctttgtctcccgtgatacctctaatcccaagagcctctattcctgtgttccctgacactaagccttatggagccttgggtctggaggttcctggaaaactgccagtaaccacatgggagaaagggaaggggtctgaggtgtcagtgatgctgaccgtctctgctgccgctgccaagaatctgaacggggtaatggttgctgtagccgagctgctgagtatgaaaatacctaactcgtacgaagttctttttccagagtcgccggcaagagctgggacagagccaaagaagggcgaagctgaaggaccgggagggaaggagaagggactggaaggtaaatcacccgatacagggccagactggctcaaacagtttgacgccgtgttgccgggttacaccttgaaaagtcaactcgatatccttagtctcctgaagcaggaaagtcctgccccagaacctcccacccaacacagctacacttacaatgtgtctaatctggacgtgcgtcagttatctgcgcctcctccagaggaaccttcgcccccaccctcccctctggctcccagtcctgctagcccaccaacggagcctttagttgagctaccaaccgaaccgctcgcggaacctcctgtgccttcccccctacctttagcgtctagccccgaatcagcacggcctaaaccgagggcgcgtccaccagaagagggagaggactcacgccctccaagacttaaaaaatggaaaggcgtccgctggaaacggttacgtctcctgctgactattcagaaagggtctggcagacaggaggatgagagggaggtggctgaatttatggagcagctggggacagccctgcggccagacaaagtccctcgagatatgagacggtgttgcttttgccacgaagagggcgatggggctacagacggccctgccaggctattgaacttggacctagacctatgggtccatctcaattgtgctctgtggtctacagaagtttatgagacccagggcggagccttgatgaacgttgaggtggcacttcaccgtggcctgcttacaaaatgctcactctgccagcgaacaggagctacctcttcatgcaaccgcatgaggtgccctaatgtgtaccatttcgcttgtgcgatccgggctaagtgtatgttttttaaggacaaaacgatgttgtgccccatgcacaagatcaaaggaccatgcgagcaggagttaagcagttttgccgtgtttcgtagagtctatattgaaagagacgaagttaagcagatcgcttctatcatccaaagaggcgagcgactccacatgtttagggtcggcggactggtgttccacgccatcggtcagctgctgcctcaccaaatggccgacttccattctgctaccgccctttaccctgtgggatacgaagccacaaggatctattggtcactccggaccaacaatcggagatgttgctaccggtgctcgatcggtgagaacaacggtcgccctgagtttgtgattaaggtgattgagcaaggtctcgaggacctcgtatttacagacgcctctccacaggctgtgtggaaccggataatcgagcccgtcgccgctatgcggaaagaagcagatatgttgcggctgtttccagagtatctgaagggtgaggaactgttcgggttaactgtgcacgctgtcctaagaatagcggagtccctccccggagtcgagtcctgtcagaattacttatttcggtatggccgtcatcccttgatggaattgccattgatgattaatcccaccggttgtgccagatctgagcccaagattctgacccactataagcgtccccacaccctaaatagtacctccatgagcaaagcctaccagagcacctttaccggtgagactaacaccccctacagcaagcagttcgtgcacagcaaaagcagtcagtaccggagactgagaacagagtggaagaacaacgtgtacctggccagatcgaggatccagggccttggactctacgccgctaaggatctggagaagcatacaatggtgatcgagtacataggcaccataatcagaaatgaggtagccaataggcgcgagaagatatatgaagagcagaatcgaggcatctacatgttccggattaataacgagcacgtgattgacgctaccctgaccggcggacccgctaggtatatcaatcattcctgcgccccaaattgcgtggccgaagtggtgacctttgacaaagaagacaagatcattattatttcctcaagaagaattccgaaaggcgaggagttgacgtatgactatcagttcgacttcgaggatgatcagcataagatcccatgtcactgtggtgcatggaactgccgcaagtggatgaattac

SEQ ID NO: 231448 - DNA, 441 bp, synthetic construct
  misc_feature 1..441: note = Description of Artificial Sequence: Synthetic coding sequence
  source 1..441: mol_type = other DNA
atggatagccagaagctggccggtgaggataaggattccgaaccagctgctgacggaccggcagcctccgaagaccctagcgcaactgagtctgacctgcctaacccgcatgtgggggaagtttcagtcttgtctagtggatctcctagactgcaggaaacgccccaagactgtagcggaggacccgtgcggaggtgtgcactatgtaactgcggcgagccgtcactgcatggccagcgggagctccggagattcgagctgccattcgactggccacgttgcccagttgtgtcaccgggaggaagtcctggtcccaatgaggctgttctgccctctgaggatctttcccagattgggtttcccgagggcctgacacctgctcacctgggggaaccgggtggttcttgctgggcccaccactggtgtgctgcatggtcctag

SEQ ID NO: 231449 - DNA, 14736 bp, synthetic construct
  misc_feature 1..14736: note = Description of Artificial Sequence: Synthetic coding sequence
  source 1..14736: mol_type = other DNA
atgtccagcgaggaggacaagtctgtggagcagccacagccccctcctccccctccagaggaacctggcgcacccgctcccagcccagctgccgctgataagcggccaagaggtagaccacgcaaagatggagccagtccctttcaaagggcccgaaaaaagcccagatccagagggaagaccgctgtggaagatgaagattccatggatggcttggaaacaacggagaccgaaaccatagtggagaccgagatcaaggagcagagcgcagaggaagacgccgaggcagaagtggataattccaagcaactaattccgactctgcagcggagtgtttccgaggagtctgcgaactcgcttgtcagtgtaggtgttgaagccaaaatctccgaacagctttgtgcattctgttattgcggggaaaagagtagtctgggacaaggcgatctcaagcagttccgaattaccccaggattcatactcccatggaggaatcaaccttcaaacaagaaggatatcgacgataactccaacggtacatacgagaagatgcagaattcggctccccgaaaacagcggggacagcgaaaggaaaggagccctcagcaaaacatagtcagctgcgtgtccgtgtccacccagaccgcctcagatgaccaggcaggaaagctgtgggacgagctcagcctggtcggcctgccggatgccattgatatacaagcgctgtttgattctacgggcacctgctgggcccaccatcgttgtgtggagtggtctctgggcgtctgccagatggaggagcccctgcttgtgaacgttgataaagctgttgtttctggctctacagagcggtgtgccttctgtaagcatctgggcgctacaataaagtgttgtgaggaaaagtgtactcaaatgtaccactacccttgtgctgcaggtgctggaacgtttcaagacttcagtcacatctttctgctgtgtcccgagcacatagatcaggcgcctgagaggagcaaggaagatgctaactgtgctgtgtgcgattctcctggtgatttgttagaccaattcttttgtaccacatgtggccaacattaccacggtatgtgtctggacatcgcggttacaccactgaaacgtgccggttggcaatgtcctgagtgcaaggtctgccaaaactgcaagcagagcggtgaggactccaaaatgttggtgtgcgacacttgtgacaagggataccacacattctgcttacaacctgtgatgaaatcagtcccaacgaatggttggaagtgcaagaattgtcgaatctgcatcgaatgcggaactcggtcgtcctcacaatggcaccacaactgtctcatttgtgacaattgctaccagcaacaggataacctgtgcccattctgcggcaagtgctatcatcctgaactgcagaaggacatgctgcactgcaatatgtgcaagcggtgggtgcaccttgaatgcgacaagccaacagatcacgaactggacacccagttaaaggaggagtacatttgcatgtactgtaagcacctgggggcagagatggataggctccagccaggagaggaggtcgaaattgcagagctcacaacagactataacaacgagatggaagtagagggcccagaggaccagatggtcttctccgagcaagccgctaataaggacgtgaatggccaagaaagcactccaggcattgtccctgatgccgttcaggtgcacactgaagagcagcagaaatcccatccgagcgagtccctagatactgatagcctactaatcgctgtgagctcccagcacacagtgaatacggagttggaaaaacagatctctaacgaagtggatagcgaggatctgaagatgtcttcggaggtcaagcacatctgcggggaagaccagattgaagacaagatggaggtcaccgagaacattgaggtggtgacacaccagatcaccgtgcagcaggagcaactgcagctgctggaagagcctgaaacagttgtttcacgggaggaaagccgccctcccaagctagtcatggagagtgtgacactccccctggagacgctagtttcccctcacgaagaatctattagtctctgtcctgaagagcagctggtaattgaaagactgcagggggaaaaggaacaaaaagaaaactccgaattatcaacaggtctgatggattccgagatgacgcctacgatcgaaggctgtgtaaaagacgtgtcctaccagggtggtaagagtatcaaactatcttcagagactgagtctagcttcagctcttccgcagatattagcaaggcagacgttagttcatcccccaccccatcctctgatctcccttcccacgacatgctacacaactatccttctgccctgtccagcagcgcagggaatattatgcccaccacctacatctcagttaccccaaagatcggcatgggcaaaccggctatcaccaaacgcaagttttcacctgggaggccacgatcaaaacagggcgcttggtccactcataacaccgtcagtcctccgtcatggagccctgatatcagcgaggggagagaaatcttcaagcccagacaactgcccggaagcgcaatatggtccataaaggtgggcagaggctctgggtttcctggcaagcgaagacctagaggagcaggcctctctggtcgtggcggaagagggcgaagcaagctgaagtccggcattggtgctgtagtcctgcccggtgttagtacggcagacatcagttctaataaggatgacgaggagaactctatgcacaacaccgtggtgcttttttcctcgtccgacaaatttactctgaatcaggatatgtgcgtggtctgtggttcattcgggcagggagctgaaggtcgactgttagcctgctcccaatgtgggcagtgttatcacccctattgtgtcagcatcaaaatcaccaaagtagtgctgagtaagggctggcgctgcttggaatgtactgtctgcgaagcctgtggcaaagccaccgatcctgggagactgctgctgtgtgacgactgcgatatttcttaccacacatactgtctggaccccccactccagaccgtgccgaaaggagggtggaagtgcaagtggtgtgtgtggtgtcggcactgcggtgccacgagcgcagggctgagatgcgaatggcagaacaactatactcaatgcgcaccctgtgcatccctgtcctcttgcccagtatgttaccgcaactaccgggaagaggatctgatcctccagtgccgtcagtgcgatcggtggatgcacgctgtttgccagaacctgaacactgaagaagaggtagagaatgtggcggatattggcttcgattgtagcatgtgccgaccttacatgcctgcgagtaacgtccctagcagcgactgctgcgagtcttccctcgtcgctcagatcgtgacaaaagtgaaggaactggaccccccaaaaacctacacacaggatggggtgtgcctgacagaatctggaatgactcagctccagtcacttacggtaacagtcccacgcaggaaacggagcaagcccaagctgaagctgaaaataattaatcagaacagtgttgcggtgcttcagacaccgcctgatattcagtctgagcacagtcgggacggcgagatggacgattcgcgagaaggagaactgatggactgcgacgggaagtctgagtcttcacctgagcgtgaagccgtcgatgatgaaacaaaaggcgtggagggaacagatggcgttaagaaacgaaagcgcaaaccatatagacctggtatcggaggctttatggtgagacaaaggtcccgaacaggtcagggaaagaccaagcgatccgttatccgcaaagattctagcggtagcatcagtgagcagctgccatgtcgggatgatggttggtcggaacagctgccggatacactcgtggacgagtctgtgtctgtaactgagtctacggagaagattaagaagcgatacagaaaacggaaaaacaagttggaggaaacctttccggcttatctgcaagaagccttttttgggaaagacctgctggatacctctagacagagtaagatctcactggataacctttccgaggacggcgcacaactgctgtacaagaccaacatgaatacgggctttttagaccctagtcttgatcccctactctcgtcttcgtccgcaccaacaaaatcaggcactcacgggcctgctgatgaccccctggctgacattagcgaagtactgaacacggacgatgatatactgggcatcatctcagacgacttagctaagtccgtagaccattccgatatcggtcccgtcaccgatgatccgagctcattgccgcagcccaatgtgaaccagtccagcagaccgctgagcgaagaacaactcgatggtatactttcccctgaactagacaagatggtcactgacggtgcgattctgggcaaactttataagatccccgaactaggtggaaaagatgttgaggacctgttcacagcagtgttgtcaccagctaacacacaaccaacgcctttgccccaaccccctccacctacccaactgctgccaatccataatcaggatgctttctccagaatgcccttgatgaacgggctaattggctcctcaccccacctgccccacaactcacttccgcctggctcaggcctggggacattctcagccatcgctcagagcagctacccagatgccagggataaaaattctgccttcaatcccatggcctccgacccaaataactcctggactagctccgcccctacagtggagggggagaatgacaccatgtctaacgcccagcggagtacactgaaatgggaaaaagaggaagccctaggagaaatggcaaccgttgctcccgtgctgtacactaatattaactttcccaaccttaaagaggagttcccagattggaccactagagtgaagcaaattgccaagctgtggcggaaagcttcaagtcaggaacgggctccatacgtacaaaaagcgcgtgacaaccgagccgcactgcggattaacaaggtccaaatgtcgaacgattccatgaagcggcaacaacagcaagatagcatagatccatcgagcaggatcgactccgagctgttcaaggatcccctcaagcagagagagtccgaacacgaacaagaatggaaattccggcaacagatgagacagaaatctaaacagcaggcaaagatcgaggctactcagaagttagagcaggtcaaaaatgagcagcagcagcagcagcagcagcaatttggatctcagcacttgctagtgcagagcgggtctgacactcccagctctgggattcagtcccccctcacgcctcaaccaggcaacggcaatatgtctccggcacagtcttttcataaagagctgttcacgaagcagcctcctagtaccccaacctcgaccagctcagatgacgtgtttgtgaaaccacaggcgccacctccacccccagctccttcccgaatccccattcaggactccctgtctcaggcccagactagtcagcctcccagccctcaggtgtttagtccaggatcgtctaatagccgcccaccaagtccaatggacccctatgctaaaatggtgggtacacccaggcctccgcctgtgggccacagtttctcgcgccgtaatagcgccgctccagtggaaaactgcacccccttgagttctgtgagtagaccattgcagatgaatgagaccactgcaaatagacccagcccagtgcgagacctgtgtagttcgtctacaaccaacaacgatccatatgcaaagccacccgatacacctcgcccagtgatgactgaccagttccccaaaagtctagggctctcacggagccccgtggtgtctgagcagactgccaagggtccgattgctgcaggcacctctgaccattttacaaagccttctccgcgagctgacgtgtttcaacgccagaggatcccggatagttatgcccgtcctctgctgacaccagcgccactggattcaggcccagggcctttcaagacgccaatgcagccgcctccatcatctcaggatccttatggtagcgtgagccaagccagcagaagactgtccgtggatccttacgagcggcctgcacttacgcctcgaccaattgacaattttagtcacaatcaatctaatgatccctacagccagccacccttaacccctcacccagctgtaaacgagtcattcgcacatcccagtcgcgctttttctcaacctggcacaattagtagacctacgagtcaggatccatattcgcaacctcctggaactcccagaccggtggtggactcctacagccaatccagcggcaccgcacgcagcaataccgacccatacagccagcccccagggactccccgtcctacaaccgtggacccatactctcaacagccccaaactccacgcccttctacccagacagatcttttcgtgacacctgtcaccaatcagaggcacagcgacccctacgcccatccacctggtaccccacggcctggtatctccgtcccttattcccagcctcccgctacccccaggccccgaataagcgagggatttacaaggagttcaatgacgcgcccagtgctgatgcccaatcaggaccctttccttcaggccgctcaaaatcgagggcctgccctgcccggacctctggtcaggccccctgacacatgctcccagacacccaggccgccaggcccaggactgtcagacacctttagtcgcgtcagccccagcgccgcacgggacccttatgaccagtcaccgatgactccacgatcacaatccgacagctttggcacaagccagactgcacacgatgtagcagatcaaccacgccctgggtctgaaggctctttttgcgcatcctccaatagtccaatgcactctcaggggcagcagtttagcggggtgtctcagctacctggtccagtccctacctccggcgtcaccgacacccagaatacggtgaatatggcgcaggctgacacggaaaaactgagacagaggcagaagcttcgtgagattatcttacagcagcaacaacaaaagaaaatcgctgggagacaggagaaaggctctcaggacagtccggcagtgccccatccaggtcccttgcagcattggcagccagagaacgtcaaccaagcctttacccgccctccgccaccttaccccggaaatatacgcagcccggttgctcctcctttaggaccacgatacgccgtctttcccaaggaccagaggggcccttatccacctgacgttgcttctatgggcatgcgtccacatggattccggttcgggttcccaggtggaagtcacggcaccatgccttcacaagagcggtttttggtcccaccccaacagatacaggggtctggcgtgtctcctcagcttcggagaagcgtgtccgtcgatatgcccagacccctcaacaactcccaaatgaataaccccgtagggttaccacagcacttttcgcctcaatccttgccagttcaacagcataatatcctgggccaagcttacatcgagctcaggcatagagcccctgatggacggcagaggctgcctttctccgctcccccaggatccgtagtggaggctagttctaacctgcgtcacggcaacttcatccctaggcctgacttccctgggcctcggcacacggacccgatgcgccgaccccctcagggactaccaaatcaactccctgtgcacccagatcttgaacaagtcccacccagtcagcaggagcagggtcacagcgtgcacagcagctcaatggtgatgagaaccctcaatcatccactcggaggggagttcagtgaagcccctctcagcacctcagtcccttccgaaaccacctctgacaatttgcaaattaccactcaaccctcagacggattggaggaaaagttggattccgacgatccaagtgtgaaggagctcgatgtcaaagacttagaaggcgtagaagtgaaagacctggatgatgaggacctggagaatctgaacctggatacagaagatggaaaggtcgtggagctagacacgctcgataatctggaaaccaacgatccaaatttagatgatctcctcagatctggagaattcgatattatcgcatacacagatcccgagctggacatgggagataagaagtccatgttcaatgaggagctggacctcccaatcgacgataaactggacaatcaatgcgtgagcgtggagcccaaaaagaaagaacaggaaaataagacgttagtcttaagcgacaaacactccccacaaaaaaagtctacggtgactaatgaagtcaaaaccgaagtactgtctccaaactcgaaggttgaaagtaaatgtgaaactgagaagaacgacgagaataaggataatgtagacacaccctgctctcaggcaagcgctcattcagatcttaacgatggggaaaaaacaagcttacatccgtgtgatcccgatctttttgaaaagcgcacaaacagggaaactgccggaccttcagcgaacgtgattcaagcttcaacccagctgcctgctcaggatgtgattaactcctgcggcattacagggagcacaccggtcctgagctcgctgctcgcaaatgagaagagtgataattcagacataagaccaagcggaagcccaccccctcctaccttgcctgcctccccctcgaaccatgtcagcagcctccccccttttatagcaccacctggaagggtgctggataatgccatgaattctaacgtgacagtggtcagcagggtgaatcacgttttttcacagggagtgcaagtaaaccctggcctgatcccaggacagagcactgtgaaccattctcttggcaccggaaagcctgcaacccagaccgggcctcagacctctcaatccggcacttctagtatgagcggccctcagcagttaatgattccccaaacactggcgcagcagaaccgggaaaggcctctcttgttggaggaacaaccactgttgctccaagacctgctggatcaagaaaggcaggaacagcaacagcagcgacaaatgcaggccatgatccgacagagaagcgagccattttttccaaacattgactttgatgccattactgaccccattatgaaagccaagatggtcgcactgaaaggcatcaacaaggtgatggcccagaataacttgggcatgcctcccatggtcatgtcaagatttccttttatgggccaggtcgtgaccggaacccagaactctgaaggccagaatctaggcccacaggcaatccctcaagacggttccatcactcatcagatcagtcgacccaatcctccaaatttcggacctgggtttgtgaatgatagtcagagaaagcagtacgaggagtggcttcaggaaacccagcaactgctccagatgcagcaaaaatatttggaagagcagatcggagcgcacagaaagtctaaaaaagctctgtccgccaaacagaggaccgctaagaaggccggtagggagtttcccgaagaggacgccgagcagttgaagcatgttacagagcaacagtctatggtccaaaagcagctggagcaaataaggaagcagcagaaggaacacgccgagctgatcgaagattacaggatcaaacagcagcagcagtgtgccatggccccaccaacgatgatgccctcagtgcagccccagccaccacttatcccgggagccaccccccctacaatgtcccagcctacttttcccatggttcctcagcagctgcagcaccagcagcatacaaccgttataagcgggcacacaagtcctgtgaggatgccttcactgccaggttggcaaccgaactctgcacccgcacaccttcccctgaatcctcccaggatccagccacccattgcgcagctcccgatcaaaacatgcacaccagcacctgggaccgtgtcaaacgccaatcctcagtcagggcctcctccccgagtggaattcgatgataacaatccattcagcgagagctttcaggagagagaaagaaaggagcgcctgagagaacagcaagagagacagcgcatacaacttatgcaagaggtggacaggcaaagggctctgcagcagcggatggagatggaacagcatgggatggtcggatctgaaatctcctccagtagaacatccgttagtcagattcccttctattcctctgatctgccctgtgactttatgcagccactggggcctctccagcaatccccccaacaccagcagcaaatggggcaggtgctccagcagcagaacatccagcagggttctattaactctccatccacgcagaccttcatgcagactaatgagaggcggcaagtagggccaccttcattcgtgcccgattctccgagcattccggttggctctccgaatttctcatccgttaagcagggacatgggaacctcagtggcacgtcttttcagcagtcccctgtccggcctagcttcacccccgcactgcctgccgctcccccagtagctaactcaagcctgccttgtggccaggactccactatcactcatggacattcatacccaggcagcactcagtctctcattcagttatattccgatataatcccagaggagaaaggcaagaaaaaacggactaggaaaaagaagagagatgatgacgctgagtctactaaggctcctagcactccacatagtgatatcacagcccctccaactcccggtatctctgagaccaccagcacaccggcagtgagcacaccatccgagctccctcagcaggcagatcaggagagcgtcgaacctgtgggaccctccactccgaatatggcagccggacagctctgcactgagttagagaacaagctgcctaattccgacttttctcaagccacaccaaaccaacagacctatgctaacagtgaagtagataagttgtcaatggagacccccgcaaaaaccgaagaaataaagttggagaaggcagagacagagagttgtcctggacaggaagagcccaagttggaggagcagaacggtagcaaggtcgaagggaacgccgtggcctgtccagtgagcagcgcacaatccccccctcacagcgcaggtgccccagcggctaagggcgacagcggtaatgagttgctgaaacacttactgaaaaacaagaagtcatctagcctgctgaaccagaagcccgaagggtccatctgctccgaggatgactgcacgaaagacaacaagctggtagaaaaacagaaccctgcggagggtttacagaccctcggcgctcagatgcagggcggatttgggtgtggcaatcagctacccaaaaccgatggtgggtccgagacaaagaagcagcgctccaagcgcacccagcggacaggtgagaaggctgcacctaggtccaaaaagcggaagaaagatgaggaggagaagcaggccatgtacagttcaaccgacacattcacccacctgaaacaacaaaacaacctttccaatcccccaactccgcctgcctcactgccacctacaccccctccaatggcatgtcagaagatggcaaacggctttgctaccaccgaggagcttgctggtaaagccggtgtcctggtaagccatgaggtcactaagaccctgggtccgaagccctttcagctaccattccggccacaggatgacctcttggccagagcactggcccagggtccaaagaccgtcgacgttccagcctcactcccgacgccacctcacaacaatcaagaggagctgagaattcaggaccactgcggcgatcgggacacacccgacagctttgtcccttctagttcacctgagagcgtggtgggggtggaagtttcacgatatcccgatctttccctagttaaggaagagcccccagagccagtgccttccccaatcattcccatcctgccctcaacagctggaaaatctagtgaaagccgcaggaatgacataaagacagagcctggcacgctctatttcgcaagccccttcgggcctagcccgaacggccctagatcaggcttgatttccgtggccatcaccctgcatcctacagctgccgagaatatttccagtgtggtcgctgctttctctgatttgctacacgtcaggattcccaacagctatgaagtaagcagcgcacccgacgtgcccagcatgggactggtctcaagccatcgtatcaaccctggcctggagtaccggcaacatctcctgctgagaggacctccacctggcagcgccaatcctcccaggctcgtgtccagctaccgacttaaacaacccaatgtgccattccctcccacaagtaatgggttgagcgggtataaggacagctcacacggcattgcggagagtgccgcactgcggcctcagtggtgctgtcattgtaaggtcgttatccttggatctggagtgaggaaaagtttcaaggatctcactttgctcaataaagattccagagaatccaccaagcgggttgaaaaggatatagtgttttgttctaacaattgcttcatcctttacagctcaacagcccaggcaaaaaattctgagaacaaggagagtatcccatctctcccacaatctccaatgcgggagacaccgtcaaaagcattccaccagtacagcaataacatctccaccctggacgttcactgcctccctcagctccccgagaaggcatctccacctgcaagcccgccaatagcctttccacctgctttcgaggccgcacaggtcgaagctaaaccagatgaattgaaggtgacagtgaagctgaagccaagactccgcgcagttcatgggggttttgaggattgccggccactgaacaagaaatggagaggcatgaaatggaaaaaatggtccattcatatcgtgattccaaaaggtacatttaaaccaccctgcgaagacgagatcgacgagttcttaaagaagctcggcacttccctgaagccagaccccgttcctaaagattaccgcaaatgttgcttttgccacgaagagggtgatggactaaccgatggccctgcccgactcctgaacctagatcttgatctttgggtgcatttaaattgtgcactgtggagtacagaggtttatgagacccaagccggagctctgatcaatgtggagctcgcgttacgcagaggtttacagatgaaatgcgtcttctgtcacaaaactggcgctaccagcggctgtcatcggtttagatgtaccaacatttatcacttcacctgtgcaataaaggctcagtgtatgttcttcaaggataagacaatgttgtgcccgatgcacaagccaaagggaatccatgagcaggaactctcctatttcgctgtgttccgaagagtgtacgtgcaaagagacgaggtccgtcagatcgcaagcattgtgcagaggggcgaaagggaccacacatttcgggtgggcagcttgatctttcacacaatcggtcagttgctaccacaacaaatgcaggcgtttcactcccccaaagcccttttccctgtcgggtatgaggcctctcggctttattggtcaacacggtatgccaatcggagatgccggtacctgtgtagtatcgaggagaaggatggtcgcccagtgttcgtgattcgcatcgttgagcaggggcacgaggacctcgtcctttcagatatttccccgaagggagtttgggacaaaatattggaacccgttgcatgtgttaggaagaagtccgagatgctgcaactgttccccgcttatttaaagggagaggaccttttcggcctgaccgtgtctgcggtggccagaattgccgaatcgctgccaggcgttgaagcttgcgaaaattacacattccgttatggaagaaaccccctgatggaactgcccttggcagtgaaccctacagggtgtgccaggtccgagccaaagatgagcgcccatgtgaagagatttgtcctgagaccacataccctgaattctacgtctacctccaaaagtttccagtccacggtgactggagaactgaatgccccatatagcaagcaatttgtccacagcaaatcaagccagtaccggaaaatgaagaccgagtggaaatccaacgtctacctagctaggagtcgcatccaaggtctgggcctgtatgccgctagagatatcgagaaacatacgatggtaattgagtatatcggcaccattatcagaaacgaagtggctaatcgcaaggaaaaactatacgagtcacagaacaggggcgtgtatatgtttaggatggacaacgatcacgtcattgatgctactcttaccggcggacccgcaagatatatcaaccatagttgcgccccaaactgtgttgccgaggtcgttacgtttgaaagaggccacaagattatcatctcctcctcaaggcgcattcagaagggcgaggagctctgttatgactacaaattcgatttcgaggacgatcagcataaaattccttgccattgtggggcagtgaactgtagaaagtggatgaattat

SEQ ID NO: 231450 - DNA, 14907 bp, synthetic construct
  misc_feature 1..14907: note = Description of Artificial Sequence: Synthetic coding sequence
  source 1..14907: mol_type = other DNA
atgagctcagaagaagataagagtgtagagcagccccaacccccaccaccaccacctgaggaacccggagctcccgctccttctcccgctgctgcagataagcggcctaggggcagacctcgcaaggacggggcatcccctttccagagagcgaggaaaaagcctcggtcaaggggcaaaaccgccgtcgaagacgaggatagcatggacggtttggaaacaactgagacagagacgatcgttgaaacagagattaaagagcagtccgctgaggaggacgccgaagccgaggttgataacagcaagcagctgataccgaccttacagcgatcagtctccgaagaatcagcaaacagtctggtaagtgtgggagttgaagctaagatttctgagcagttgtgcgcattctgttactgcggcgagaagtctagtctgggacagggcgacctcaaacaatttcgaatcactcccggatttatacttccctggcgcaaccagccctctaacaagaaggacattgacgacaatagcaatggaacctatgaaaagatgcagaattcggctccaaggaagcagcgtggacagaggaaggagcggtctccccagcagaacatcgtgagttgcgtatcagtgagtactcagactgcctctgacgaccaagctgggaaactttgggatgagctgtcgctggtcgggttgcccgacgccattgacattcaggcgctcttcgattccaccgggacctgctgggcccatcaccgatgtgtcgaatggagtttgggggtttgccagatggaggaacctttgttagtaaatgttgataaggcggttgtctcaggttctaccgagagatgtgccttctgtaagcacctgggtgctaccattaaatgttgtgaagagaagtgtacccagatgtaccattatccatgcgccgctggcgcagggactttccaggatttcagtcatattttcctgctctgtcctgagcatattgatcaggccccagagcgaagcaaggaagacgccaactgtgccgtgtgtgattcgcccggtgacttgctggaccagtttttctgcaccacctgtggacagcattatcacggcatgtgtctggacatcgccgttactccactgaagcgagcagggtggcagtgtcccgagtgcaaggtgtgtcagaactgtaaacagagtggcgaggacagcaagatgctggtttgcgatacatgcgacaagggataccataccttttgtctgcagcctgtcatgaaaagtgtgccaacaaacgggtggaagtgtaagaattgcagaatctgcatcgagtgcggaactagatccagcagccagtggcaccataactgtctaatttgcgacaattgctaccaacagcaagacaatctgtgccccttttgcgggaaatgttaccaccccgagctgcagaaggatatgctacactgtaacatgtgtaaacggtgggttcacctggaatgtgataagccaacggaccatgaactggacacacaattaaaagaagaatacatttgcatgtattgcaagcatctgggcgctgagatggaccgtttacaacccggagaggaggttgaaattgcagaactcacaaccgattacaacaatgagatggaggtggagggtcctgaggaccaaatggtattctcagaacaggccgctaacaaagatgtgaacggtcaggagtctacgcctgggatcgtcccagacgctgtgcaggtgcacacagaagaacaacaaaaaagccacccatctgagtctctggatacggactccctgcttatagccgttagcagccaacatactgttaacactgaactcgagaagcagatttctaatgaagttgattcagaggacttaaaaatgtcatccgaggttaaacacatctgcggagaggatcaaattgaggacaagatggaggtgactgaaaacattgaagtggtgactcatcagataaccgtccaacaggaacagttgcagttgctagaggaaccggagaccgttgttagcagggaagaaagtcgaccaccaaagctcgtgatggagagcgttacattgccgcttgagaccctggtgtcccctcacgaagagtcgatctctctgtgtccagaggagcagctcgtgatagaaagattgcagggcgaaaaagagcagaaggagaactccgagctatctacagggttgatggactcggaaatgacccctactatcgaaggatgcgtaaaagatgtatcctaccaggggggtaagagcatcaaactgtccagtgaaacagagtctagcttttcctccagtgcggatatctctaaggccgacgtttccagcagccctacaccctctagtgacctcccgtcacacgacatgctgcacaactatccctccgcactcagcagttctgccggtaacatcatgccaactacatatattagcgtcactcccaaaattggcatgggcaaacccgcaatcaccaagcgaaaattctcaccaggtaggcccagaagcaagcagggggcatggtccacccacaacacagtatcacctccgtcctggtcccctgatatttccgaaggcagagaaatatttaagcctcgtcagctgcccggaagtgcgatttggagcatcaaggtgggacgaggcagtggcttccctggcaagcgtcgccctcgcggtgcaggtctctccggtcggggtgggagagggagatccaaattaaagtctggaatcggtgctgtggttctgcccggtgtgtcaactgctgatatttcctcgaacaaggacgatgaagaaaatagcatgcataatacagtggtcctgttctcatcctctgataaatttaccctgaatcaggacatgtgtgtggtgtgcggttcctttgggcagggagctgaaggacgccttctggcctgctcccagtgcgggcaatgttatcacccctactgcgtgagcattaaaattactaaggtggtgctgagcaagggctggaggtgcctggagtgcactgtctgcgaggcatgcggtaaggccacagatcctgggaggctgctgttatgcgatgactgtgacatcagctaccacacttactgcctggaccctccgctgcagacagtacctaaagggggttggaaatgtaagtggtgcgtgtggtgcagacactgtggagctacaagcgccggattaagatgcgaatggcagaataactacacccagtgtgcaccctgcgcttcactgtctagctgcccagtctgttataggaactaccgcgaagaagatttaatactgcaatgtcggcagtgcgaccggtggatgcacgccgtctgccaaaatctgaacacagaagaggaagtagaaaacgtggccgatattgggtttgattgcagtatgtgccgcccatatatgcctgcgtctaacgtcccaagttcagattgctgcgagtcttccctcgtggctcagattgtcactaaggtgaaggagctggacccccctaaaacttacactcaggatggcgtgtgcctcacagagtcaggcatgacacaacttcagagtctgacagtcactgtccctagaaggaagcggtcaaagccgaaactgaagctgaagataattaaccagaattccgtggccgtcctacagaccccacctgacatccagtccgagcactcccgcgatggagaaatggacgattcaagagagggcgagctaatggattgcgatgggaaaagtgagtctagccccgagcgcgaggccgtggacgatgaaacaaagggcgtcgagggcactgatggtgtcaagaaaagaaaacggaagccttacaggcccggtatcggcggttttatggtgcggcaacgcagccgcaccgggcagggtaaaaccaagaggagtgtcataaggaaggactcctcaggctccatttccgagcagttgccatgtcgggacgacgggtggagcgaacagctccccgatactcttgtcgacgaatccgtgtctgtaacggagtccacggagaagatcaagaaaagataccgaaagcgtaagaacaagcttgaagagactttccctgcatatctgcaagaggcctttttcggaaaggacctcttagatacttcccgccaatctaagatctcccttgataacttatccgaagatggggctcagctgctctacaagacaaatatgaataccggcttccttgatcccagtctggacccattgttatcttcatcctccgctccgacaaaatcaggcacgcacggtcccgctgatgatcccttagccgatatatcagaggtgttgaacaccgacgacgacatcttgggaatcatctctgatgatctggccaagtcagtggaccactctgatattgggccagtcacagatgaccctagttcattaccccagccaaacgtgaaccagagctcccgtcccctgagcgaggaacagcttgatggaatcttgagccctgagctggacaagatggtgacagacggcgcaattctcgggaagctatataagatccctgaactgggaggcaaagacgtcgaggacctcttcaccgcagtgctctcaccggctaatacgcagcccaccccactgccgcagcctccaccccctacccagctgctccctatccataaccaggatgctttttcccgcatgcctctgatgaacggactcatcggtagttctcctcacctcccccataactctttgccccctggatccggcttaggcactttctccgctatcgcacagagtagctacccagatgcacgcgacaagaatagtgcctttaaccctatggcatccgacccaaacaatagctggacctctagcgcccctaccgtggagggagagaacgacactatgagcaacgctcagcgaagtacattgaaatgggaaaaggaagaggccctgggagaaatggcgacagtggcaccagtcctctatacaaacattaactttccaaaccttaaggaggagtttcctgattggaccacgcgtgtgaagcagattgctaaactgtggaggaaagcatcgtctcaggaacgcgctccgtacgtccagaaggcacgtgacaacagagccgctctgcgtatcaataaggtccaaatgtctaacgatagtatgaagagacagcagcaacaggacagtatcgaccctagctcccgcatcgacagcgaactctttaaagatcctctaaaacagagagagagcgaacatgagcaggagtggaagttcaggcaacaaatgaggcagaagagtaagcagcaggcaaagattgaggccactcaaaagctggagcaggtgaaaaacgaacagcagcagcagcagcaacaacaattcggtagccagcatcttttggtacagtccggatctgatacaccctctagtggtatacagagccccctgacccctcaacccggtaacggcaatatgtcccctgcccagtcttttcacaaggagctcttcacgaagcagcctcccagtactcccacgtctacctcgagcgacgatgttttcgtgaaacctcaagcccctcctccacctccagcaccaagtcgaatcccaatccaggactccctgtcccaggcccagacctcacaaccacccagccctcaggttttttccccagggtcctctaactccagacccccttctccaatggatccttatgcgaaaatggtcggcacaccgagaccgcctccagtgggccattcattctcgcgacgaaatagcgcagctcccgtggagaattgtactcctctctcatctgtaagtcgtcccttacagatgaatgaaaccaccgccaacaggccttccccagtgcgggacctctgctccagctcaacgacgaacaatgacccttatgccaaacctcccgatacacccagacccgttatgaccgaccagtttccaaagtcacttgggctgagccggtctcctgtagtgtcagaacagacagcgaaaggtccaatcgctgccggaacaagcgatcacttcacaaaaccgtccccacgagccgacgtttttcagagacagagaataccagactcctacgcacgaccactcctcacacccgctccactcgattctgggccaggcccattcaaaaccccaatgcaaccgccacctagctcacaagatccatatggttcagtgagtcaggccagccgtcggctgagcgtggacccatacgagcgacccgcactcactcctcgcccaattgataatttttctcataatcagtcaaatgacccatactcccagccaccgctcactccacacccagccgtgaacgaaagctttgctcacccttctagagcattcagccagcctggcactatctcgcggccaaccagccaggatccatatagccagccacccggaactccacggccagtggtggattcttattcacaatcaagcggaaccgcacgtagcaataccgacccttattcccagcctccaggcacaccaagaccaaccactgtggatccctattcccagcagccacaaaccccacgcccttcaacacagactgatctctttgtcacaccagtgactaatcagcgccacagcgacccctacgcccaccctcccggaacccctaggcctgggattagcgtgccttacagccagccgcctgcaacacccagacctaggatcagtgaaggcttcacacgctcttcaatgacaagacctgtgcttatgccgaaccaggacccgttcctccaggcagcccagaaccggggaccagctctgcctggccctcttgtcagaccgccagatacttgttcccagacacctcgaccacccggtcccggtctgagcgataccttctctcgtgtgagccctagtgccgctcgggatccatatgatcagagcccaatgacacctagaagtcagtcagacagcttcggcacatcccagactgctcacgacgtggccgaccagccccgacctgggtccgagggatccttctgtgcgagcagcaactcacccatgcattctcagggtcagcagttctccggtgtgtcgcagctgccaggcccagtgcctacaagcggagtgactgatacgcagaatacggtgaatatggcccaggcggataccgaaaagctccgtcagagacaaaaattgcgtgaaattattctgcagcagcaacaacagaagaagatagccggacggcaagaaaaaggatcacaagactcccccgcagtgccccatccaggccctctgcaacactggcagccagagaacgtcaaccaggcatttactaggcctcctccgccttatccgggtaatataagatccccagtagcgcctcctctcgggcctcggtacgcagtgttcccaaaggaccagaggggaccataccctcccgacgtcgctagcatgggtatgcgaccccatgggtttaggttcgggttcccagggggatcacacgggaccatgccctctcaagagcggttcctggtcccccctcagcagatccaagggtcgggggttagtccccagcttcgaagatcagtctccgtggacatgccaagaccgctgaacaactcacagatgaataacccggtaggactgccccagcacttttctcctcagtccctgccagtgcagcagcacaatatccttggccaggcttatattgagctgcgacacagggcgcctgatggcagacaacggttacccttctcagcccctccagggagcgtcgtagaggctagttccaatcttcgacatgggaacttcatacctcggcctgattttcctggacccaggcatacagaccctatgcggagacctcctcagggactcccaaatcaactacctgttcatcccgacttagaacaggtgccacccagtcagcaggagcagggacacagtgtgcacagctcaagtatggtaatgcgaactctaaaccaccctctgggaggggagttctctgaagccccattgagtacctcggtgccctccgagaccacatctgacaatctgcaaatcacaacccagccctccgacgggctggaggaaaagctggatagtgacgatccctccgtgaaagagctggatgtgaaagatctggagggggttgaggtcaaggatctcgatgacgaagatctcgaaaatctgaaccttgacaccgaggacggaaaggttgtcgaattggacacactggacaatctggaaaccaacgatcctaacctggatgacctgctgcgctcaggagagttcgacatcatcgcctatacggatcccgagctggatatgggagataaaaaatctatgtttaacgaagaattggatctgccgattgatgacaagctggacaaccagtgtgtttctgtcgaaccgaagaaaaaggagcaggaaaataaaaccctcgttctgtccgataagcactcccctcagaagaagtcgacagtgacaaacgaagtcaaaaccgaagttctaagcccaaattcaaaggtcgagtctaaatgcgaaacggagaaaaatgatgaaaacaaggataatgtggatactccatgtagccaggctagtgctcattccgatcttaacgacggtgagaaaacttccctacatccctgcgaccccgatcttttcgagaagcggaccaatagggagacagctggacccagcgctaatgtgatccaggccagcacgcaactaccagcccaagatgtaatcaacagctgcggaattacaggttctacgcccgtgctcagctccctgctggctaacgagaaaagcgacaatagtgatatcagaccgtccggaagcccccctcctcccaccctgcctgcatccccgtctaatcatgtgtcaagtctccctcccttcattgctccacctggtcgagtactggacaatgctatgaatagtaacgtgactgtggtgtcaagggtgaaccatgtcttcagccagggggtccaagttaacccaggactgattccaggtcagagtaccgttaatcatagcttgggaaccggcaagccggctactcagacaggcccacagacaagccagagcggaacttcttctatgtccggccctcaacaactcatgatcccgcagactctcgcccagcaaaacagggagaggcctctgctcctggaggaacagccactgttgcttcaagacctgcttgaccaggaacgtcaggaacagcagcagcagcggcagatgcaggccatgatccgccagaggtcggagccgttcttccccaacattgacttcgacgcgatcaccgatccgatcatgaaggctaagatggtggctctgaagggcataaataaggtgatggcccagaataatcttggcatgccacctatggtgatgtccagattcccgttcatgggtcaggtggtgacgggaactcagaattcagagggacagaacttaggccctcaggcaatcccccaggacggatctattactcaccagatctctagacctaatcccccaaactttgggcctggattcgtaaacgattcccagcgaaaacaatatgaggaatggttgcaggagacccaacaactcctgcagatgcagcagaagtatctggaagagcagatcggcgctcaccgaaaatctaaaaaagctctctccgctaagcagcgtaccgcgaagaaagccggaagagaatttcccgaagaggacgcggaacagttaaagcacgtgacagaacaacagtctatggtacagaaacagctagagcagatacgaaagcaacagaaggagcacgctgaacttatagaagattatagaattaagcagcaacagcagtgcgcaatggctccgcctactatgatgccaagtgtgcaaccacagccgcctctgatccctggcgcaacgcccccaactatgtctcagccaacttttccaatggtgccccagcagttgcagcaccaacagcatactacggtgataagtggtcacacatctcccgtcagaatgccttctctgcccggatggcagcccaactcagcccctgcgcatctacctctgaacccccctaggatccagccaccaatcgcacaactgcccatcaagacctgcactcccgcaccaggaactgtgtctaacgcaaacccacagtccgggccacctccccgagtggagtttgacgataacaatccattctccgagtcattccaggaaagagaaagaaaggaaagactgagagagcagcaggaaagacaaaggatccagttgatgcaggaagtcgaccggcaacgcgctctacaacaacgtatggaaatggaacaacatggaatggtaggaagcgagatctcatctagcagaacctcagtcagccaaatcccattctattcttctgatcttccatgcgacttcatgcagcccctgggccctctgcagcagtcccctcagcatcaacagcagatgggacaagtgttgcagcaacagaacattcaacagggctccataaattcaccctccactcagactttcatgcagacaaatgagcggcgacaagttggacccccttcttttgttcctgactcccctagtatcccagtgggaagtccaaacttcagctctgtcaagcagggccacggaaatctgagcgggacctcctttcaacaaagccctgtgaggccaagctttactcctgcgttgccagcggctccaccagtggcaaacagctctctcccctgtggtcaggactccaccatcacgcatggccacagctaccccggttcaacacagtcattgattcagctctatagtgatataatccccgaagaaaaagggaagaagaagaggacacgtaagaagaagcgtgatgacgatgctgaaagtaccaaggctccttctacacctcatagcgatatcactgcccctccaacccccggaatatccgagacaacaagtactcctgctgtatccacaccgagtgaacttccgcagcaggccgatcaggaatcggtggaacctgtggggccttccacacctaatatggccgctggacaactctgcaccgagctcgaaaacaagttgcctaattccgatttttcccaggccacgcctaatcagcagacatacgctaattccgaagtggataagcttagtatggaaacccctgccaaaacagaggagattaagttggagaaggccgagacagaaagctgtccgggtcaggaggaacccaagctggaagagcagaacggatctaaggtggaaggaaacgcggttgcctgccccgtttcctccgcccaatctccacctcatagcgctggggcacccgcagctaagggcgactccggtaacgagctcctgaaacacttgctaaagaataagaaaagctccagtttactgaaccagaagcctgaggggagtatctgttcggaggatgattgtacaaaagacaataagcttgtcgagaagcagaaccccgctgagggcttgcagactcttggggctcaaatgcagggtggattcgggtgtggcaaccagctgcccaaaacagatggtggctcagaaacaaaaaagcagcgatctaagcggacgcaacgtaccggagaaaaagcagcccctagaagcaaaaaacgcaagaaagatgaagaggagaagcaggccatgtactccagcacggacacattcacccatctaaaacaggtgcgccaactatctctgctgcctctaatggagccaattatcggcgtgaactttgctcacttcctgccctacggttcagggcagttcaatagtggcaacaggctactggggacctttggatctgcgactttggaaggcgtatccgattactacagccagttaatctacaaacaaaacaatctctcaaaccccccaactcccccagcctcgctgcctcctacccctccacccatggcttgtcagaaaatggctaacggcttcgcgactactgaggagctagccggaaaagccggtgttctcgtttcacacgaggtgaccaagactctggggcctaaaccctttcagctcccttttcgtccccaggacgaccttttggcaagggccctggcacagggcccaaaaaccgtggatgtgcccgcatctctcccaactccccctcataacaatcaggaagagttgcgcatccaggaccactgcggtgatagggacacccctgattccttcgtgccaagtagcagccccgaatcagtggtaggagtggaagtgtcgcgatatcccgacctgagtctagtgaaagaggagccaccagagcccgtaccaagtcccatcataccgattttgccgagtaccgccggaaagagctctgagtcgagaagaaacgatataaaaactgaaccgggaactctgtacttcgcaagcccatttggaccttcaccaaacggcccaaggagtgggctgatatccgtcgccatcacccttcaccccacagccgctgaaaacatttccagcgtggtggcagcgttctctgaccttttgcacgtgcgcatccctaactcctacgaagtcagctctgccccagacgtcccatccatgggtttggtgtcatcacaccgcataaatcccggtctcgagtaccgtcagcacttactcttgaggggaccgcctcccggatccgccaatccccctcggctggttagctcataccgcctgaaacagccgaacgtcccattcccccctacatctaatggcctgagcggctataaagattctagccatggaatcgcggagagtgccgctctacggccacaatggtgctgccactgtaaagtggtgatcctagggtcaggggtgcgcaaatcattcaaggacttaacgctcctgaacaaggactccagggaaagtaccaaaagagttgaaaaggatattgtgttttgttccaacaattgctttatcctgtatagcagcacagctcaagctaaaaacagtgagaataaggaatctatcccttcgctccctcagtcccctatgcgtgaaacaccttctaaagcattccatcagtattctaataatattagcacattagacgtccactgccttccacagctccctgaaaaggctagtcctccagcctcacccccaatagccttcccaccggcattcgaagctgctcaggttgaggccaaacctgacgaactcaaagtgaccgttaagctaaaacctcgactgcgcgcagtgcatggcggattcgaagactgtcgacccctgaataagaaatggcgaggaatgaagtggaagaagtggtcgatccacattgtgatccctaaagggacatttaagcctccctgcgaagatgaaatcgatgagttccttaaaaagcttgggaccagccttaaaccagacccagtccccaaggactatagaaagtgctgcttctgtcatgaggagggcgacggactgacagatggaccagcacggcttttgaatctcgatctggacctgtgggtccatctcaactgcgcactgtggagcaccgaagtgtatgagactcaggcaggcgcactgattaacgtagagctcgcccttcggagggggctgcagatgaagtgtgttttctgccacaagacgggagccacctccggctgccataggttccggtgtaccaacatttaccattttacatgcgctatcaaggcacagtgcatgtttttcaaagataagacaatgctgtgccctatgcacaagcccaaagggattcatgagcaggaattgtcttattttgccgttttccgcagggtctacgtgcagagggatgaggtgcggcagatcgcaagtatcgtgcaacgaggcgaaagagatcacacgtttcgcgtcggcagtctgatttttcacactatcgggcagctgctgccacaacagatgcaagcattccactcacccaaggcactctttcctgtagggtatgaagccagcagactctattggtccaccaggtacgctaatagaaggtgcagatacctgtgcagcatcgaagagaaagatggcaggcccgtgttcgtgatccgaattgtagagcagggccatgaggatttggtcctcagcgacatttcccctaaaggcgtgtgggacaagattcttgagcctgtggcctgcgttcgcaagaagtctgaaatgttgcagttattccctgcatacctgaagggcgaagacctgttcggcctgaccgtctctgcagtggctcgaattgcggagagcttaccgggagtggaggcctgcgaaaactataccttccgttacggtagaaatcccctaatggagttacccttggccgttaaccccacgggctgcgcgcgtagcgagcctaagatgagtgctcatgttaaacgctttgtgttacgccctcatacccttaactccacctcaacatctaagagctttcaaagtacggtgacaggcgagctcaatgcaccttacagcaaacaatttgtccacagcaaatcttcgcagtaccgaaaaatgaaaactgaatggaagagtaacgtgtacctcgctagatcacgtatccaaggcctgggcctctatgccgctagggatattgagaagcacaccatggtgatcgaatatatcgggactataattagaaacgaggttgctaacagaaaagaaaagctttacgagtcgcaaaaccggggtgtatacatgtttcgcatggataacgatcatgtcattgacgccaccctcacaggtggcccagctagatacattaatcatagctgtgcgcctaactgcgtagccgaagtggtgacgttcgaaagaggccacaagataatcatctccagtagcaggaggatccaaaagggagaggaactttgctacgactataaattcgactttgaagatgatcaacacaagatcccgtgccattgcggagcggttaattgtaggaagtggatgaactaa

SEQ ID NO: 231451 - DNA, 4575 bp, synthetic construct
  misc_feature 1..4575: note = Description of Artificial Sequence: Synthetic coding sequence
  source 1..4575: mol_type = other DNA
ctaatgcaggaggtcgaccgacagcgggctctccagcagcggatggagatggaacagcacggaatggtggggagcgagatctcaagctcccggacatctgtcagtcagatccctttttactccagcgacctgccgtgtgacttcatgcaaccactggggcctttacagcagtcccctcagcatcagcagcagatgggacaagtgttgcagcaacagaacatccagcaagggtcaatcaacagtcccagcactcaaacattcatgcagactaacgagagacggcaggtgggtcctccttctttcgtgcccgactcacctagtattccagtcggcagccccaactttagttcagtgaagcaaggccatgggaatctgtctggaactagcttccagcaaagcccagtccggccttcattcacacccgcactgcccgcagcccctccagtggccaactcatctttgccctgcggacaagattccacaatcactcacggacattcctacccaggatcaacccagtcattgattcagctgtacagcgatattatacccgaagaaaaaggcaagaaaaaacggaccagaaagaagaaacgagacgatgatgctgagagcactaaagcgccatctaccccacacagcgatattacagcaccaccaacccctggaataagcgagactacttccacaccggcagtgtctacgccctccgagctgccgcagcaggccgatcaggaaagcgtggagcccgtgggtcccagtacgccaaacatggctgccggtcagctttgcacagagctcgagaataaactccctaacagtgacttctctcaagcaacccctaatcaacagacctacgccaactcagaagtggataagctgagtatggagacccccgcaaaaaccgaagaaattaaactcgagaaagcagagactgagtcctgtcctgggcaggaagagcccaaactggaagaacagaatggttctaaggtggaagggaacgcggtagcgtgccctgtatccagcgcccagagcccgccacactcagctggggctccagccgctaagggagactccggtaacgaattgctcaaacacctacttaagaacaaaaaatcctcctcactactgaaccagaaaccagaaggatcgatctgttccgaggatgattgcaccaaagacaacaagctggtggaaaagcagaatcccgctgagggacttcagactttaggagctcagatgcagggcggtttcgggtgcgggaatcagctgccaaaaaccgatggcggaagtgaaactaagaaacagagaagtaaaagaacgcagcggactggcgagaaggccgctcctcgaagtaagaaacgcaagaaagacgaggaagaaaaacaagctatgtactcaagcacggacactttcacgcacctgaagcaacaactgtctttactcccactcatggaacctattattggtgttaattttgcccactttcttccctatggaagcggccagttcaatagcggcaaccgcctgctggggaccttcggttcagctaccctggagggggtatccgactactacagccagctgatctataagaagatggccaacgggttcgcgaccacagaagagcttgcaggcaaggccggagtgcttgtcagtcacgaggtgactaaaacactcggcccaaaacctttccagctcccgttcaggccccaagatgacctcctggcacgagccctagcgcagggtcccaaaaccgttgacgtgcccgcatcccttccgacaccgccacacaataatcaggaagagttacgcatccaggatcactgtggagatagagacacaccagacagcttcgtgccttcatctagtcctgagtcagttgtaggcgttgaagtgtctaggtatcccgatttgagcctggtgaaagaggagccgccagagcctgtacccagtccaattatccccatcctccccagcacagcgggtaagtccagcgagagccggagaaatgacattaaaactgagccagggactttgtatttcgcaagtccctttgggcctagccccaacggacccaggtcaggattaatcagcgtcgcgatcaccctgcaccccaccgccgcagagaatatttcttctgtggtcgccgcattctctgatttgctccacgtgagaatcccgaacagctacgaggtgagttcagcccctgacgtaccctcgatgggactcgtgagttcacaccgcatcaacccaggcctggaatatcgtcaacatttactgcttcggggtcctccccctgggtccgctaatccgccaagattggtctccagctatcgcctgaagcagccaaacgtgccctttcctcctacttcaaacggactttccggctacaaagatagctctcatggcattgctgagagcgccgcactccggccacagtggtgttgccactgcaaggtcgtgatactggggtccggtgttaggaagtccttcaaggaccttaccttacttaataaagattccagggaaagtaccaaaagagtggaaaaggatatcgttttctgctcaaacaattgctttatcctgtattcctcgacagcccaggccaagaatagcgagaacaaggagagcattccatctctcccacagtccccaatgcgggagacccccagtaaagcattccaccaatacagcaacaacatctctacactggacgtgcactgccttccccaactgcctgaaaaggcttccccacccgcaagcccacctattgcctttcccccagcctttgaggcagctcaggtcgaagccaaacctgatgaactcaaagtgacagttaagctgaaaccccgtctcagggctgtccatggaggcttcgaggattgccgccctcttaataaaaagtggcgaggaatgaagtggaagaaatggtcgatccatattgtcatacctaagggaacctttaaacccccttgcgaggatgagatagacgaattcctcaagaagcttggcacttccctcaagccagaccctgtccctaaggactaccggaagtgctgtttctgccacgaagaaggtgatggcttgactgatggccctgctcgcctgcttaacttggaccttgacttgtgggtccaccttaactgcgcactctggagcactgaggtttatgaaacccaggctggagcgctgatcaatgtcgagctggcactcaggcggggactccagatgaaatgtgtattctgccacaaaactggcgcaacgagcggttgtcacagatttagatgcacaaacatctaccatttcacgtgcgcaattaaggcccaatgcatgttcttcaaggacaagacgatgctgtgcccgatgcacaaacccaaagggattcacgaacaagagctatcatacttcgcagttttcagacgtgtatacgtacagagggatgaagtgcggcagatcgcttcgattgtgcaaagaggagagagggaccacacattcagggttggctcccttattttccatactatagggcagctcttaccacagcagatgcaggcttttcacagccccaaggccttattccctgttggctatgaggcttcccggctttattggagcacccgttatgcgaaccggagatgcaggtacttgtgctcgatcgaggagaaggacggcagacccgtctttgtgattagaatcgtcgagcaaggccatgaggacctcgtactgtctgatatttctccgaaaggagtgtgggacaaaattctggagcccgttgcctgcgtgcgcaagaagtcagaaatgctccagttatttcccgcatatctgaaaggggaggatctctttgggctgaccgttagcgctgtggccagaattgcagagtcactgcctggggttgaggcctgtgagaattacaccttcagatacgggaggaacccccttatggaactgccattagcagtgaatccaaccggatgtgccaggtcggaacccaagatgagtgcccacgtgaaaagaccacacacgctgaacagcacaagtacaagtaagtcattccagtctaccgtcacaggagaattgaatgcgccttacagtaagcagttcgttcactccaaatcatcacagtatcggaagatgaagactgaatggaagtcaaatgtttacctcgcgcgttcccggatccaagggctgggtctgtacgctgcgagggatatagaaaaacacaccatggtgattgagtatatagggaccattattaggaacgaggtggccaaccgaaaagaaaaattatatgagtctcaaaataggggcgtttacatgtttcgaatggacaacgatcacgtgattgacgccactctgactgggggaccagccagatacatcaatcattcttgcgctcctaattgcgtggccgaagtcgtcaccttcgagcggggacataaaatcataataagctcgtcacggaggatacagaagggagaggaactgtgctacgactataagttcgacttcgaggatgaccagcacaaaattccctgccactgtggagctgtcaattgccgaaagtggatgaactag

SEQ ID NO: 231452 - DNA, 351 bp, synthetic construct
  misc_feature 1..351: note = Description of Artificial Sequence: Synthetic coding sequence
  source 1..351: mol_type = other DNA
atggtcattgaatatatcggaactataatcagaaatgaagtagcgaacaggaaggagaagctgtatgagtctcagaaccgtggggtgtacatgtttagaatggataatgatcacgttattgatgcaactcttacaggcggacccgcaaggtacattaaccattcttgtgctcctaattgcgttgccgaagtggtaacgttcgaacgcggtcataagattattatcagttcatcgcgcagaatccagaagggagaagagctctgttatgattacaagttcgatttcgaggacgatcagcacaagatcccttgccactgcggggctgtgaattgccggaaatggatgaactag

SEQ ID NO: 231453 - DNA, 5576 bp, synthetic construct
  misc_feature 1..5576: note = Description of Artificial Sequence: Synthetic coding sequence
  source 1..5576: mol_type = other DNA
atgtccattgtgatacccctaggcgtcgatacggctgagacaagctacctggagatggcggctggcagcgagccagaatccgtggaggcttcccccgtcgtggttgagaaaagtaatagctatcctcatcaactttataccagctccagtcatcattcacattcttatattgggctgccatatgctgatcacaactacggagcgcgtcctccccctacaccacctgcatcccctccaccgtctgtcctcatctccaaaaatgaagtcggaatcttcaccacaccaaactttgacgagacctcaagtgcaacaaccatatcaacatcggaagatggttcatacggcacagatgtaactagatgtatctgcggcttcacacacgatgacggctacatgatctgttgcgacaaatgctctgtttggcagcacatcgactgtatggggatcgatcgtcagcatatcccagacacttatttgtgtgagaggtgtcagcccagaaatttggataaggaaagggcagtcctccttcagagacggaaaagggagaacatgagcgatggcgatacaagcgctactgagagcggcgatgaggttccagtcgagctgtatacagccttccagcacacccctacgtccattactctcactgcttcaagagtatcaaaggtgaacgataagaggcggaagaagtcaggggaaaaggagcagcatattagcaagtgtaaaaaggctttccgtgaaggttcaagaaaaagcagcagagtcaaggggtctgctcccgaaatcgacccttcctccgacggatccaatttcggttgggaaactaaaatcaaggcgtggatggaccgatacgaggaagcaaacaataaccaatactccgaaggggtgcagcgggaggcgcagcggatcgccttaaggctcggaaacggcaatgacaaaaaggaaatgaataaaagcgatttgaatactaataacttgctattcaagccgcctgttgaatcccacattcagaagaataaaaaaatcctgaaatcggcaaaagacttgccccctgacgcgttaatcatcgaataccgcggtaaattcatgctccgcgagcaattcgaagcaaatgggtacttcttcaaacgcccatatccgtttgtactcttctactctaaatttcatggcttggaaatgtgcgtggatgctcgcactttcggcaatgaggctaggtttatcaggcggtcatgcaccccgaacgcagaggtcagacatgaaatccaggatgggaccattcacctatacatctatagtattcattcgattccaaaggggactgaaatcaccattgctttcgactttgactacgggaactgtaagtataaggtggactgcgcttgcctcaaggagaatcccgaatgccctgtactgaagcggtcctctgagtccatggagaatattaatagtggctatgagacgcgtcggaagaaagggaaaaaagacaaagacatcagcaaagaaaaggacacacagaaccagaatatcaccttagactgtgagggtacaacaaacaagatgaagagcccagagactaagcagcggaaactttcccctctgaggctctcggtttcaaataatcaggaacctgactttatcgacgacatcgaagaaaaaacacctatctctaacgaggtcgagatggaatctgaagagcaaatagccgagagaaaacggaaaatgacccgggaggaaaggaagatggaggcaattttgcaggccttcgccagactggagaaacgagagaaaagaagagagcaagctctcgaacgcattagcaccgctaaaactgaggtgaaaacagagtgtaaggacacgcagatagtttccgatgccgaggtgattcaagagcaggcaaaggaggaaaatgcatccaaacccaccccagccaaggtcaaccgtaccaagcaaagaaaaagcttctctaggtcccgtactcacatcggacaacagcggaggagacaccgtaccgttagcatgtgtagcgatatccagccaagttcccctgatattgaagtgacaagtcagcagaatgacatcgaaaatactgtcctgaccatcgagcctgagacagaaacagccttagcggagatcataaccgaaacagaggtgccagccctgaacaaatgtccgacaaagtaccctaagacgaaaaaacacctcgttaacgagtggctttcagaaaaaaatgagaagactggaaaaccttctgatggactgtcagagcgtccgctgaggattactaccgatcctgaggtgctagccacccaactgaattccctcccgggacttacgtatagccctcacgtctattccaccccaaagcattatattcggttcacttctcccttccttagtgagaaacgcaggaggaaggaaccaacagaaaacatttccggctcctgcaagaagaggtggctcaaacaggcactggaggaagagaatagcgccattctgcaccgattcaatagtccctgccaggagagatcaagaagtccagcagtcaatggtgagaataaatcgcccctgctcctgaacgatagttgttccctaccggatctaaccacaccactgaaaaagcgtaggttttaccaattactggattccgtttattcagaaacaagcaccccaacgccatccccctacgccaccccgacacacacggatattaccccgatggatccttcatttgccacaccccctcggataaagtccgacgacgaaacgtgcagaaatggttataagccaatctattccccggttactccagtcactcccggaacccctggcaacactatgcactttgagaatatttctagtcccgaaagtagtcccgagatcaagagaagaacttattcccaagagggatacgacaggagtagcacaatgttgacactcgggcctttccggaattcgaatctgacggagctcgggctccaagaaattaaaactatcggctatacgtcccccagatctaggaccgaggttaaccggcaatgcccaggcgagaaagaaccagtctcagatttacagcttggattagacgctgtggagcctaccgcgctccacaaaaccctggagaccccagcccatgacagggctgaaccaaactctcaactggatagtacccatagcggacggggtaccatgtatagcagttgggtaaaatcgcccgaccgcaccggggtgaacttttctgtgaatagcaatcttagagatttaactccttcccaccaactggaagtaggaggcggatttcgaatttccgagtctaagtgcctgatgcaggacgacacaagaggaatgttcatggagacaactgttttttgtacaagtgaagatggcctggtgtcaggcttcggcaggactgtgaacgacaacctcatcgatggcaactgtaccccacagaatccaccgcagaagaaaaaggtgtcactcctagagtacaggaagcgtcagcgagaggcacgtaagagcgggagcaaaacagagaacttcccactcatctctgtgagtcctcacgcatccgggtcactgtccaataacggagacgggtgcgcgagttctaacgacaatggggagcaggtggaccacaccgcttcgcttcccctgcctactcccgctacagtgtacaacgccacttctgaggagacaagcaataactgcccggtgaaggatgccactgcatctgagaaaaatgaaccggaggtacagtggactgcttctacgagcgtggagcaggtgcgtgaaaggagctaccagcgcgcactactcctcagcgatcatcgcaaggataaggactccggtggggagagcccgtgcgtttcttgcagcccctcacatgtgcagagcagcccatcttctcactcaaatcatatcccacagctgcaggcaaaggggcctgtgccaagctttagcgagctaatggaagatcctgaccccgagaaccctgagcctactactaccaatgagtgtccctccccggacacaagccagaatacatgtaagtcgccccctaaaatgtcaaagccaggcagccctggcagtgttatccctgcccaggcccatgggaagatcttcaccaaacccgatccgcagtgggactcaactgtaagcgcctccgaagccgagaatggagtacacttaaagactgagcttcaacagaagcagttgtcaaataacaaccaggctctttcaaaaaaccacccccctcagacacatgtacggaatagtagcgaacagctctcccaaaaactccctagtgtacctacaaaactgcactgcccgcctagcccccatctcgaaaaccccccaaaaagttctacaccccacacgcccgtgcagcacgggtacctctctcctaagccccctagccaacagctgggcagcccttacaggccccatcattcacagtcgcctcaagtgggaactcctcagcgggaaccccagcgtaacttctacccagccgcacagaatttacccgctaatacacaacaagctacctctggcaccctgtttacccagacaccatccggccaaagtagcgccacctacagtcagttcaatcagcaatctttgaactccaccgcgcctccacctccacctcccccaccaccatccagttcgtattaccagaatcaacagccatcggccaacttccagaattacaaccagctgaaagggtcactatcccagcaaacagtgtttactagcgggccaaaccaggccttgcctggtaccacaagtcagcaaactgtgccaggccaccatgtaacccccggacattttctgccttctcagaatcccaccatccatcatcaaacagctgccgctgtggtgccccctccccctccccctccacccgcacccggaccccatctggtgcagcagccaaattcccatcagcagcactcagtggcccatgtcgtgggcccagtgcacgccgtcacacccggtagccacattcactctcagaccgcgggacatcacctgcccccaccacccccaccacccggtccagctccgcaccatcacccaccaccacatccatccacaggtttgcaagggcttcaggcacagcaccagcacgttgtaaatagtgccccaccccctcctccacctccgccaccgtcgtctgtcctggcatctggccaccacacaacgtcggcccaggccctgcaccaccccccacaccagggacctcctctatttccatcaagcgcccacccaactgtgccaccgtatccatcccaggcaactcatcatactaccctggggccagggccacaacatcagcctagtggcacaggaccacactgtcctctgccagtcaccgggcctcatctgcagcctcagggcccaaattcaatcccgactcccaccgcatccggattctgcccccaccctggcagcgtggcactgcctcatggcgtccaggggcctcagcaagccagcccggtacccggacagatccccattcaccgagcccaggtgcctccgacctttcaaaataattatcacggcagcgggtggcacta

SEQ ID NO: 231454 - DNA, 5577 bp, synthetic construct
  misc_feature 1..5577: note = Description of Artificial Sequence: Synthetic coding sequence
  source 1..5577: mol_type = other DNA
atgtctattgtgatccccctgggagtcgacaccgccgaaaccagttatctcgaaatggccgcaggaagtgaacccgagtctgtggaggctagccccgttgtggtggagaagtctaactcatacccgcatcagctgtatacttcttcaagccaccattcacactcctacatcggtcttccatatgccgatcacaattatggagccaggcccccacccaccccgcctgcttcgcctcccccatctgtcctgatctcaaagaacgaggtgggcatttttacaacacctaactttgacgaaacctcttccgcaaccacaatctctaccagcgaggacggctcctatggaactgatgttactcgatgtatctgcggattcacacatgatgacggctatatgatatgctgtgacaagtgttctgtgtggcagcatattgattgcatgggtattgatcggcagcatatacctgatacctatttatgcgagaggtgccagcctcgaaacctagataaggaacgcgcagtcctgctccagcggagaaaacgggagaacatgagcgatggggatacaagcgccacagagtccggcgatgaggtgcctgtggagctttacactgccttccagcatactcccactagcataacactgacagcctcccgtgtgtccaaggtcaacgataaaagaaggaaaaagtctggcgaaaaggagcagcatatcagtaagtgtaagaaggcatttagggagggctctaggaaatcctcgagagtcaaggggagcgccccagaaatcgacccatcttctgatggttctaattttggatgggaaacgaagattaaggcctggatggatcggtatgaagaggccaataataaccagtatagtgaaggtgtgcaacgtgaagcccagcgcatagcgctgaggctcggtaatggtaacgacaagaaagagatgaataagtccgatttgaacacgaacaatctcctgtttaaaccgccagtggaatctcatattcagaagaataagaaaatcttgaaaagtgcgaaagatctacctcccgacgcactgatcatagagtatcggggtaaatttatgctgagggagcagttcgaagccaatggatatttcttcaaaaggccttacccattcgtgctattttatagtaagttccacggactggaaatgtgtgtggacgctcgtacattcgggaatgaggcccgtttcatcagacgaagttgtacccccaacgcagaggtcagacatgagatccaggatggaactattcatttgtacatctattccatccattccataccaaagggaactgaaatcacaattgcgttcgacttcgattacggtaattgcaagtataaagtggattgtgcctgcctgaaggagaatcccgaatgtcccgtgctcaaacgctcttccgagtctatggaaaacataaacagtggctatgaaacacgccgaaagaagggtaagaaggataaagacataagcaaagagaaggatactcagaatcagaatattaccctcgactgtgaaggaactacaaataagatgaaatctcccgagacgaagcagagaaagctttcccccctgcgacttagtgtttctaataaccaggagccagatttcatcgatgacatcgaggagaaaaccccaatctcaaatgaggttgagatggagtccgaagagcagatcgctgagcgaaaaaggaaaatgacccgggaagaaaggaaaatggaagccatcttgcaagcgttcgcacgcttggagaaacgcgagaagcggagagagcaagcattggagcgcatcagcaccgctaagactgaggtgaagactgagtgcaaggacacccagatcgttagtgacgcggaggttatccaggaacaggcaaaggaggagaacgcctccaagccaactcctgccaaggtaaacaggaccaaacagagaaagagtttctccaggagcagaacccatatcggtcaacagagacggaggcacaggaccgtctccatgtgttcggacatccagccaagctcgcctgacattgaggtgacctcccagcagaacgacattgaaaataccgtcctgactattgaacctgaaaccgaaacagctctcgcagaaatcattacagaaacagaggttccagcattgaataaatgccccaccaagtatcctaaaactaagaaacacctagtaaacgaatggttgtccgagaaaaacgagaagaccgggaagccgagcgatgggctgtccgagaggcctcttcggattaccactgacccagaggtcctggccacccagctcaactctctccccggtctaacttactcaccacacgtatactctactccaaagcattacataaggtttacgtcacccttcctttccgaaaaaagaaggagaaaggagccaactgagaatattagtggttcttgtaaaaagagatggcttaaacaagcccttgaagaagagaactccgctatcctgcacaggttcaactctccttgccaggagcgctctcgatcccccgcagtgaacggtgagaacaagtccccactcctgctcaacgatagttgcagtttgccggacctaaccacaccgctgaagaaacgcaggttctaccagctcctcgattctgtctactctgagactagtacacctaccccttctccctatgctactcccactcacacggatatcacccctatggaccctagttttgctaccccgcctagaattaagagcgacgacgaaacttgtaggaatggatacaaacccatttacagccctgtgacccccgtgactcctggaacacccggaaacacaatgcacttcgagaacatttcttcccctgaatcctcccccgagatcaagaggcgaacgtacagccaggagggctatgacagaagttcaaccatgctcactctaggtcccttccggaatagtaatttgaccgagctggggctgcaggagattaagaccattggttataccagtccaaggagccggaccgaagtgaaccggcagtgccccggagagaaagagcctgttagtgacctgcagctgggactcgatgcagtggaacctacggcgctgcacaaaacgctcgagacacccgcacacgaccgggcagagccaaactcgcaactggactctacgcactcaggaagaggaacaatgtactcttcttgggtgaagtcaccagatcgcacaggagtgaattttagcgtgaactccaacctacgagacctgacgccatctcaccaactcgaggtgggaggtggcttccgtatttccgagagtaaatgtctgatgcaggacgacacaaggggaatgtttatggaaaccacagtgttctgtacaagtgaagatggcctggtgtccggattcggacgcaccgtgaacgacaacctgatcgacggaaactgcactccgcaaaacccaccccagaaaaagaaagtgtccttgctagagtaccgaaaaaggcagcgcgaggcaaggaagagtggctctaaaactgagaattttccgctgattagcgtgtcccctcatgcttccggcagcctgagtaacaacggagacggctgtgccagtagcaacgataatggagagcaagtagaccacaccgccagcctgccgctgcccaccccagccaccgtgtacaatgccacgtcggaggagacctccaacaactgtcccgttaaggacgccaccgcttccgagaagaatgagcccgaagtgcagtggacggcatccacatcagtcgaacaagtgcgtgaaaggagctaccagcgggctctgctgctgtctgatcaccgaaaagacaaagacagcggcggtgaaagcccctgcgtgtcctgcagtccctctcacgtgcagtcctcgccaagctcacattccaatcatatccctcagctgcaggcaaaggggcctgtgccatctttctcagaactgatggaggatcctgatcccgaaaatccagagccaactaccactaacgagtgcccgtcccccgatacatctcagaatacttgtaagtctcctccgaaaatgtcgaagccaggaagcccaggcagcgtcattccagcccaggctcatggcaaaatctttactaagcccgatccacagtgggacagcactgtctccgctagtgaagcggagaacggcgtgcacctgaagactgaactgcagcagaaacagctgagcaacaacaaccaggcgctcagcaagaatcacccgccacagacacacgtgagaaattccagcgagcaactgtcacagaagctgccgagcgtgcccacaaagcttcattgccctccttccccacacctggaaaatccgcctaagtccagcacccctcacaccccagtccaacatggttacctttcccccaaacctccctcacaacagctgggctctccgtatcggcctcaccattcccaaagcccgcaagtcggcaccccccaacgcgagccacagcggaacttctaccctgccgctcaaaatctaccggctaatactcagcaggctacgagtggaactctcttcacccagactccgagcggacagtcttcagctacatattcccagttcaaccagcagtcccttaacagcaccgcccctcctccacccccacctcccccaccatcttcctcctactatcaaaaccaacagccatcagccaacttccagaattacaatcaacttaaaggaagtctcagccagcagacagtgtttacttctggccctaatcaggccttgccgggaaccacaagtcagcagacagtccctggacatcatgtcactcctggacactttctacctagccaaaaccccacgattcaccaccagacagccgctgcagtggttcctccgcctccaccaccccctccggctcccggaccccatttggtacagcaaccaaactcacaccaacagcattctgtcgcccatgttgttggaccggtgcatgcggttacacccggttcccacatccactctcagaccgccggtcaccatctgccacctccacctcctccgccaggccctgccccacatcaccacccccctccacatccatccaccggtctccagggcctacaggctcagcatcagcatgtggtgaacagcgcccctcctccaccccctccaccacccccatcaagtgtgctggcttctgggcaccacactacttctgcgcaagcattgcatcatccacctcatcagggtcccccacttttccccagttctgcccacccaaccgttcctccttacccaagtcaagcaacccaccatacaaccctgggcccaggcccacagcaccagccaagcggcaccgggccacattgtcctctcccggtgaccggcccacacctgcaaccacagggtcctaactctatcccgaccccaacagcttctggattctgcccccaccccggatccgtggcgttaccacatggggtacaagggcctcaacaggcttcaccagtgccaggccagatccccattcaccgggcacaagtccccccaacattccaaaacaattaccatggtagcggatggcattat

SEQ ID NO: 231455 - DNA, 5450 bp, synthetic construct
  misc_feature 1..5450: note = Description of Artificial Sequence: Synthetic coding sequence
  source 1..5450: mol_type = other DNA
atgagtatcgttattcctcttggcgtcgacacagcggagacaagctatctagaaatggctgccggaagcgagcccgaaagcgtggaggcatcaccagtcgtggtagaaaagtctaacagttaccctcatcagttgtatacctcctcctcacaccactcgcactcatacatcggcctgccctatgccgatcataactacggggcaaggccccctccaactccacccgcttctccccctcctagtgtactgatctcaaaaaacgaggtgggaatctttactacccccaacttcgatgaaacaagttccgctaccacgatatcgacttctgaggacggctcgtacgggactgacgtcacaaggtgtatctgcgggttcactcatgacgatggttatatgatttgctgcgataagtgcagcgtgtggcagcacatcgattgcatggggattgatcggcaacacattcccgacacctatctgtgcgagagatgccagcccagaaacctcgacaaggagcgcgctgtgctcctgcagcgacgaaagcgcgaaaatatgtccgacggggatacaagcgctaccgagagcggcgacgaggtcccagtggagctgtatactgccttccaacacacgcccaccagtatcaccttgaccgcgtcccgtgtgtctaaagtgaatgacaaacgcagaaagaagtcgggagaaaaagaacaacatatcagcaagtgcaaaaaagccttccgggaaggctctcgaaaaagctcgcgtgtgaagggctcagcccctgagatagatccgagctccgatgggagtaactttggatgggaaactaaaattaaggcatggatggatcgctacgaggaagcaaacaacaatcagtactcggagggggtgcaacgcgaagcgcagcgcattgctctgcgactcggaaacgggaatgacaaaaaagagatgaacaagagcgatctgaacacaaacaacctgctcttcaagcccccagtggagagtcacatccagaagaacaagaagatcctcaagagtgctaaagatttgcctcctgatgctctcatcattgaatatcggggtaagtttatgctgagagagcagttcgaggctaacggatactttttcaagagaccctatccgtttgtcttattctattctaagttccacggactagagatgtgcgtggatgccagaacattcggaaatgaagccagatttattagacgcagctgtacgcccaatgcagaagtgcggcatgaaatccaagatgggaccatccacctctatatctattccatccattcgattccaaaagggacagagattaccattgcattcgattttgattatggcaactgcaagtacaaggtcgattgtgcttgcctaaaagagaaccccgaatgcccagtgcttaaaaggtcgagtgagtccatggagaacattaacagcggatacgaaacgagaaggaagaaaggcaaaaaagacaaagatatctctaaagagaaggacacccagaatcagaacatcacactcgattgcgagggaaccactaataaaatgaagagccccgagactaaacagaggaagctctcccctctgcgcctgtcagtgagcaacaaccaagaacctgattttatcgacgacattgaggaaaaaaccccgatctccaacgaggtcgaaatggagtcagaagagcagatcgccgagcgcaaaagaaaaatgacacgagaggagagaaagatggaggcaattctacaggcctttgcaagattagagaaacgggagaaacgcagagagcaagctctggaacgaatctctacagcaaaaacagaggtcaaaaccgagtgtaaggacacccagatcgtgtccgacgccgaagtgattcaggagcaggcgaaggaggagaacgcctctaaacctaccccagcgaaagtaaaccgcacaaagcagagaaagagtttcagccgcagtaggactcacatcggtcagcagcgtaggcgccatagaacggtttctatgtgttccgacattcagccatcgagccctgatattgaggtaacttctcaacagaacgacattgaaaacactgtcctgaccattgagcccgagaccgaaaccgcacttgccgagatcatcacagaaactgaagtgccggcattgaacaaatgccccactaaatatccaaagactaagaaacacttggtcaacgaatggctgtcagaaaaaaatgaaaagacagggaaaccctccgatggcctcagtgaaagacccctacgaataaccaccgacccagaggtgctggccacgcaactgaattcacttcctggcttaacctactctcctcatgtttattcgacccccaagcattatatacgatttaccagcccctttctctctgaaaagcgacggaggaaagagcctaccgaaaacatctcaggctcatgtaaaaagagatggttgaaacaggcactcgaggaagagaatagtgcaattctgcacagatttaattcgccttgccaggaacgcagtaggtcccccgcagttaatggggaaaataagagtcccctgctgctgaacgattcttgctcccttcctgacctgactaccccgttaaagaaaaggcggttctaccagctgctggattcggtgtacagtgaaacttcgacccctaccccatcaccctatgcaactccaacccataccgatatcacgccaatggacccatcctttgcaactcccccacggataaagtccgacgatgaaacctgtagaaacggttataaacctatctattccccagtgaccccagtaacccctggcacgcctggtaatacgatgcatttcgaaaacatttcctcccctgagtcaagtcctgagattaagaggcgtacttactcccaggaaggatatgaccgtagctccactatgctcactctcggtccgtttaggaacagtaatctgacggaattggggctgcaggaaatcaagaccatcggctatacttctcctcgaagtcgtacggaagttaaccggcagtgccctggagagaaggaaccagtatcagacctgcagctgggtctggacgctgtggagccgacggccctgcataagaccctagaaacgccagcacatgaccgggctgagccaaatagtcagctagattcaactcacagcggcaggggcaccatgtatagcagctgggttaagagcccagatagaaccggcgtgaatttcagcgttaacagtaatctcagggacctgacaccctcccaccagctcgaggtaggcggaggtttcaggatttctgaatccaagtgcctgatgcaggacgatacacgcggaatgtttatggagacaactgttttttgcacctcagaggacggactggtatcagggttcggtagaactgtgaatgacaatctaatcgacggtaactgtaccccccagaatccgccacaaaagaagaaggtgtcccttctcgagtataggaaaaggcagcgggaagcaaggaagtctggcagcaaaacagaaaatttccccctgatttccgtctcccctcacgcctccggcagcctgtcaaataatggagacggctgcgccagctccaatgacaacggagagcaggtggatcacacggcaagcctccccttgcccactcctgctaccgtgtataatgccacctctgaggagacctctaataactgtcctgtcaaggatgcaaccgccagcgaaaagaacgagcctgaggtgcagtggacagcctcaacctcagtggagcaagtgcgggaacgcagttatcaaagagccctcctgctgagtgaccatcgtaaggacaaagattccgaccctgaccccgagaacccagagcctacgacaaccaatgagtgcccatcccccgacactagccaaaatacatgtaaatctccaccgaagatgtcgaagcccggaagtcccggttcagtgatacccgctcaggcccatggaaagatattcacaaagccagatccacagtgggactctaccgtctccgcaagcgaagcagaaaatggcgttcacctgaagactgagctgcagcaaaaacaactgtccaacaataaccaggctcttagcaagaaccacccccctcagacgcacgtacggaattcttctgaacagctctcccagaagctgccttctgtccccaccaaattgcactgtcctccctctccgcatttggagaaccccccaaaaagttctacacctcacacaccggtgcagcacggctacctgagtcccaagcctccatcccagcagctcggaagcccttacaggcctcaccacagccagtctccccaggtaggaacccctcagagggaaccccagcggaacttctaccccgcagctcagaatctccccgctaatacccaacaggctacctccggaacacttttcacccaaaccccatccgggcagtcatctgccacttattctcagttcaaccagcagagtttaaatagcactgcgcctccccctcccccaccccctcccccatctagctcctattatcagaaccagcaaccctccgccaatttccagaactacaaccaactgaaaggctctctctcacagcagaccgtatttacgtccggacccaaccaagctttacccggtaccaccagccagcaaaccgtacccggacaccacgtgaccccagggcacttcttacctagtcagaatccaactattcaccaccagaccgctgctgctgtcgtgccccctccgccacccccaccacctgccccaggcccacacttagtccagcagcccaactcccaccagcaacactctgtggctcacgtggtcggcccagtccatgcggtgaccccgggatctcacattcactcccagaccgccggacatcacctgcctccacctccaccaccaccgggacccgctcctcaccaccatcccccaccacacccctctacaggcctgcagggattgcaggcccagcaccagcatgtggtcaattcagcccctcctccccctcctcccccacctccaagctctgttcttgcctccggtcaccatactactagcgcccaagcgctccaccatcccccacaccagggtccgcctttgtttccttccagcgcacatcccacggtgcccccttacccaagccaggcaacacaccatacgaccttgggtcctggtccacaacatcagcctagtggcacaggaccccactgcccactgcccgtgacgggcccacatctccagccacaggggccaaactctatccccacacccactgcctctggattctgtcctcatcccggatccgtggccctgcctcatggcgtacagggcccacaacaagcctcgcctgtgcctggtcagattccaattcatcgcgcacaggtaccacccacatttcagaataattaccacggctctggctggcacta

SEQ ID NO: 231456 - DNA, 1770 bp, synthetic construct
  misc_feature 1..1770: note = Description of Artificial Sequence: Synthetic coding sequence
  source 1..1770: mol_type = other DNA
atgcacttcgaaaacatcagttctcctgagtctagcccagagatcaagagaagaacatactcccaagagggctatgatagatctagcactatgctcacactgggcccatttcgcaatagtaatcttaccgaactgggcctgcaggagattaagaccatcggatacacaagccccagaagtagaacagaggtgaataggcagtgtcccggagaaaaagagcctgtcagcgacttacagttgggtctagacgcagtggaacctaccgccttacataaaactctggaaaccccagcgcacgatcgtgcggaacccaactcccagctcgattccacacacagcggcagaggaacgatgtacagttcctgggtgaaatcacccgaccgcaccggcgtgaacttctccgtgaacagcaacctccgggacctgacccctagtcatcagctggaagtgggcggaggcttccggattagcgagagcaagtgtctgatgcaggatgatacacggggaatgtttatggagactaccgtgttttgtacctccgaggacggacttgtgtcaggctttggtcggaccgtgaacgacaaccttatcgacggaaattgcaccccccaaaatccaccacagaagaaaaaagtgagtctcctggaataccgaaagcgccagagggaagctagaaaatcaggctctaaaacagagaacttccccctgatcagcgtgtctccgcatgcctctgggtcattgagcaataatggtgacgggtgtgctagcagcaacgacaacggagagcaggtggaccacactgcaagtctgccacttcctacaccggctactgtctacaacgccacaagcgaagaaaccagtaataattgcccagtgaaagatgcgacagcctcagaaaaaaacgaacctgaagtgcaatggacagcttccaccagcgttgagcaggttcgggagcggagttatcagagggcgctcctactgagcgatcaccgtaaggataaggactcaggcggtgaatcaccgtgcgtgtcttgctccccctcacatgtccaatctagcccttcctcacactcaaaccatattccacagctgcaagccaaaggccctgtgcccagctttagcgaactcatggaagatcccgatccagagaaccctgaacccactaccactaacgagtgcccgtctcctgacacatcgcagaacacctgtaaatctccacctaaaatgtccaagcccggttccccgggatcagtgattcccgctcaggcccacggcaagattttcacaaaaccagacccacagtgggattcaaccgtttcggcctctgaagcggaaaatggggttcacctcaaaactgagttacaacagaagcaactgtccaataacaatcaggctctgagtaaaaaccatccacctcaaacccacgtcaggaactcctccgagcaattaagccagaagctcccttccgtgccaacgaaacttcactgcccccctagtcctcatctggaaaaccctcccaagagctcaaccccccatactccggtgcaacatgggtatctgagccccaagcctcccagtcaacagcttggctccccttaccggcctcaccattcccaaagcccgcaggtgggtacacctcaaagagagccccagagaaatttttatcctgctgcccagaacctccccgctaacacccagcaggctaccagtggcacgctctttacccaaacgcctagcggccagagctccgcaacttacacacagagatag

SEQ ID NO: 231457 - DNA, 5336 bp, synthetic construct
  misc_feature 1..5336: note = Description of Artificial Sequence: Synthetic coding sequence
  source 1..5336: mol_type = other DNA
atgagcatagtgattcccctgggcgtcgacactgcagagacaagctacctggaaatggccgctggaagcgaacccgagagcgtggaggcttcccctgtagtcgtcgaaaagtctaatagctatccgcaccaattgtacacgtcaagcagtcaccactcacactcttatatcggattaccttatgctgatcacaactacggcgcacgcccacccccaaccccccctgcatcccctccgccatcggtgctcatatctaagaatgaggtcgggatttttactactcctaacttcgacgaaacgagttccgcaacaactattagtacaagcgaagacggctcctatgggactgacgtgacacgatgcatctgcggcttcacccacgacgacggctacatgatatgttgcgacaaatgtagtgtgtggcagcacatcgattgtatgggcattgatcgccaacatatccctgatacctatctatgtgaacgatgtcaacccagaaacctggataaggaaagggcggttctccttcagcggagaaaacgagagaacatgtccgacggcgacacttcagctaccgaatcaggtgatgaggtccctgtagagttatatacagcatttcagcacacccctactagcattacgctgaccgcgtcacgcgtgtccaaagtcaacgacaagagaaggaaaaaaagcggtgagaaagagcaacacatttcaaagtgtaagaaagccttccgggaaggtagtcgaaaatctagtcgcgtcaaaggatctgctcctgaaattgaccccagcagcgatggaagcaacttcggatgggagaccaaaattaaggcgtggatggacagatacgaggaggctaataacaaccagtacagtgaaggagttcagagggaggctcagcggatcgcgctgcgcctgggtaacgggaacgataaaaaagaaatgaacaaatcagatttgaacaccaacaatctgctgtttaagccgccagtagagtcacacatacagaaaaataagaaaatattaaagagcgccaaggacctccctccagacgccctgataatcgaataccggggaaagtttatgcttcgtgaacagttcgaggcgaatggctactttttcaaaaggccatacccctttgtactgttttactcgaagttccacggcctcgaaatgtgcgtggatgctagaactttcggaaacgaggcgcgatttattcggcgtagttgtaccccaaacgctgaggtccgacacgaaatacaggacggtacgattcacctctatatatattcaatccatagtatccctaagggcaccgagataacgatcgcattcgacttcgactacggcaattgcaaatataaggttgactgtgcatgcttgaaggaaaaccctgaatgtcccgtcctgaaacgttctagcgaatcaatggagaacatcaactccggatacgagaccaggcgaaagaagggcaaaaagacacgggaagagaggaagatggaagcaattctgcaggcctttgcaaggctagaaaaaagagaaaagagaagagaacaggcccttgaaagaatctcaaccgcaaagacggaggtgaagaccgagtgtaaagacacccaaatcgtcagcgatgccgaagtcatccaggagcaagctaaggaagagaacgcgagcaagcccactcctgccaaagtgaaccgtacaaagcagagaaagagcttttctagaagtcgaacacatatcgggcagcagagacgccgtcatagaacagtgtcaatgtgctctgacatacagccaagctcacccgacatagaggtaacttcacagcagaatgacatagagaatactgtgcttacgattgagccagagactgaaacagcactggcggagataattactgagaccgaggtgcctgcattgaacaagtgtcccaccaagtaccctaaaactaagaaacacctggtgaacgaatggctgagcgagaaaaatgagaaaaccgggaagccgtcagatggcctcagcgagaggcctcttcgcattaccactgatcccgaagtgcttgccacccaattgaattctcttcccggtctcacttacagcccccacgtgtactccacccccaaacattatattagatttacttctccctttctcagcgagaagaggagacgcaaagagcccactgagaatatcagcggaagctgtaaaaaacggtggttgaagcaggctctggaggaagagaattccgcaattcttcaccggtttaattcaccctgtcaggagcggagtcgtagcccagccgtgaatggagaaaacaagagccctctcttgcttaatgactcgtgctcgctgccagacctaaccacaccactcaaaaagagacggttctaccagctgttggatagtgtgtactctgaaacaagtaccccaaccccctccccttacgccacacctacccataccgatatcaccccaatggatccaagcttcgccactccgcctcggatcaaatccgacgatgagacctgccgtaatgggtacaagccaatttatagtcccgtgacaccagtcactccgggaaccccgggaaatactatgcacttcgagaacataagctcaccagagagttcaccagaaatcaaaagacgcacatattctcaagagggctacgatagatcctcaacgatgctgacactggggcctttcaggaacagcaatttaaccgagctgggtttgcaggagattaagactattggttatactagcccccgatcgcggacagaggtgaatcgtcaatgccccggagaaaaggaacccgtgagcgacctgcagttaggactggacgccgtcgagcctaccgcccttcacaaaacgcttgaaactcccgctcatgacagggctgaacctaactcccagctggacagcacacactccgggaggggtacaatgtactcctcctgggtaaaatcccctgacagaactggagtgaatttctccgtgaactccaacttacgcgacctgacccctagtcatcagctggaggttggtgggggatttcggattagcgaaagcaagtgtctgatgcaggatgatactaggggtatgttcatggagacaactgtgttttgcacatctgaggatggattggttagcggcttcgggcgaaccgtgaatgataaccttatagacggaaactgcacaccacagaatcccccacagaagaagaaggtaagcctcctagagtatcgtaaacggcaacgggaggctcggaaaagtggatctaagactgaaaacttccctctgattagcgtgagcccccacgccagcggctccctttctaacaatggtgatggctgcgccagctcaaatgacaacggtgaacaggtggatcatacagcttcactcccactcccaactccagcgactgtttacaacgcaaccagcgaggagacaagtaacaactgccctgtgaaagatgcaaccgctagcgaaaaaaacgaaccagaggttcagtggaccgcctccactagcgtagaacaggtccgcgaacgttcttaccagagagccctgctgttatcggatcaccggaaagacaaggactccggcggagagtcaccttgtgtgagttgcagcccaagtcacgttcagtcatctccttcctcacactctaatcatatcccccagctccaagcgaagggccctgtgcccagcttctcagaattaatggaggaccccgaccccgagaaccctgaacccacaaccaccaacgaatgtccctcgcccgacacaagccagaacacatgcaaaagccctcccaagatgtctaaaccaggctctcccggtagcgtgatcccagcccaggctcacggtaaaatctttaccaagcccgatcctcagtgggactctaccgtttccgcctccgaggccgagaatggggtgcatctgaaaaccgagctgcagcagaagcagctcagcaacaacaaccaggccctgtctaagaatcatcctccacagacccacgtgaggaacagcagcgaacagctgtcccagaagctccctagtgttccaacaaaactgcattgtccaccgagtccccacttagaaaaccctccgaagagcagtaccccccacacccctgtgcagcacggctacctgagcccaaagcctccctcgcagcaactaggaagcccctatagacctcaccactcccagtccccccaggtcgggacaccccaaagggaacctcaacgaaacttttaccccgctgcacagaatttgccagcgaatacccagcaagctacctctggtacgctctttacacaaacgccctcgggacagtcatctgccacttactctcaattcaaccagcagtccctgaattctacggctcctccgcctcctccaccacctccacccagctcatcatattaccagaatcaacagccaagtgcaaatttccaaaattataatcagttaaaagggtccctgtcccagcagaccgtgttcacaagtggcccaaaccaggcactgcccggtacaacatcccagcaaaccgtcccaggacaccacgtaaccccgggtcattttctgccgtcacagaaccctaccatccatcaccagactgctgcagctgtcgtgcccccacctccccctcctcccccagctcccggtccacacctcgtccagcagcccaattcacaccagcagcacagtgtggcgcatgtggtggggccagtgcatgcagtgacacctggctctcacatacattcccaaacggccggacaccatctccctcccccaccaccccctcccggtccagcgccacaccaccacccccctccgcatccatccactggccttcagggcctgcaggcccagcatcagcacgtggtgaactccgccccaccacctcccccaccacccccaccctcctccgtgttggcctcagggcaccacaccacttcagcacaggctctacaccacccacctcaccaagggccaccattattccccagttcggcacaccctaccgtccctccttacccaagccaagccactcaccacacaactctggggccaggtccccaacaccagccttccggaacgggaccccactgtcccttacccgtaaccggacctcatttacaaccgcaaggaccaaacagtatcccgacgcctactgccagtggattttgcccccaccccggtagtgtggcccttcctcatggagttcagggcccacagcaggccagcccggttccgggtcaaatccctattcatcgtgcacaggtgccccctacctttcagaataactatcacggcagcggctggcacta

SEQ ID NO: 231458 - DNA, 4962 bp, synthetic construct
  misc_feature 1..4962: note = Description of Artificial Sequence: Synthetic coding sequence
  source 1..4962: mol_type = other DNA
atgtctatcgtgatcccccttggcgtcgatacagcagaaacaagctacttggagatggcagcaggaagtgagcccgaatccgtcgaagcgagccctgtcgttgtggagaaatctaatagctatccacaccagttgtacacaagctctagccaccactcccattcttacattggactgccctacgcggaccataattatggagccaggcccccacctacacctcctgcttcccctccccctagcgtcctgatttccaaaaacgaagtggggatattcactacacccaatttcgacgagacctctagcgccaccacaattagcacaagcgaggacggctcttatggcacagatgttaccaggtgcatttgcggattcacccatgatgacggttatatgatctgttgtgataagtgtagcgtttggcagcatatagattgtatgggcatcgatcggcagcatatacccgacacatacttatgtgaaaggtgtcagcccagaaatttagataaggaaagggccgttctgttgcaaagacggaagcgtgagaacatgtccgacggcgacacttctgccacggagtctggtgatgaagtgccggtggagctgtatactgcttttcaacacacaccaacgtccattaccctgacagcgtcccgggtaagcaaagtgaacgacaaacgtcggaagaagagtggcgagaaagagcagcacatttcaaagtgcaaaaaggccttcagagaaggaagcagaaaaagctcaagagtcaagggctccgctcccgagattgaccctagctccgatggatctaattttggatgggaaacaaagatcaaggcttggatggatcggtacgaggaagctaacaacaaccagtacagcgaaggggtgcaaagggaggctcaaagaatcgcgcttaggcttgggaatggaaacgataagaaggagatgaacaagtctgatctcaacactaataatcttcttttcaagccaccagtggagtcacatatccagaaaaataaaaagattttaaaaagtgccaaggacctgccccctgatgctcttattatcgagtataggggaaagttcatgctcagagagcagttcgaagctaatggatacttcttcaagaggccttacccctttgtgctgttctattccaagttccatggactcgaaatgtgtgtggacgcccgtacatttggcaacgaggccagattcataagacggagttgcacaccgaacgcagaggttagacacgaaatccaggacggaaccattcacttgtatatatactccatccatagtattccaaagggaacagaaatcacgatcgcatttgacttcgattacggcaactgtaagtacaaggttgattgcgcatgtctcaaagagaatcccgagtgccctgttcttaaacggtcttctgaatccatggagaatataaattccggatacgaaactcgccgtaagaagggcaagaaggataaggatatatccaaagagaaagatacccaaaaccaaaacatcacactggattgtgagggcacaacgaacaaaatgaaaagtccagagactaagcagagaaagctttctccactccggctttcagtttccaacaaccaggaaccggatttcattgatgacatcgaggaaaaaaccccaattagcaacgaggtcgagatggagtcagaggagcagattgcagaacgtaaacggaagatgaccagggaggaaagaaaaatggaggctatactgcaagcttttgccaggcttgaaaaaagagagaaaaggagagagcaggcgctggaaagaatttctacggctaagactgaggtcaagaccgagtgtaaagatactcaaatcgtgtctgacgcagaagtcatacaagaacaggcaaaagaagagaatgcgtctaaaccaactcccgctaaagtgaatcgtactaagcagagaaagtcattcagtcggtctaggacgcacatcggacagcagagaagacggcatcggactgtgtctatgtgttctgatatccaaccaagctccccagacattgaagtaacaagccagcaaaacgacattgaaaacactgtgctcactatcgagcccgagaccgagactgcccttgcggagattataaccgagaccgaagttcccgcattaaataagtgcccaacaaagtatcctaagaccaaaaaacatctggtaaatgagtggttgtccgagaagaacgagaagacggggaagccttcagacggcttatctgagcggccactcagaataaccactgatccagaggtccttgccacccagctgaactcgttgcccggtctgacttactccccacacgtctactcaaccccaaaacactacattcgttttacctctccctttctgtccgaaaaacgaagacgtaaggaaccgacagaaaacatctcaggctcttgtaagaagcgatggctgaaacaggcactggaggaggaaaactccgccatccttcatagatttaatagtccttgtcaggagcgctctagatctccagcagttaacggcgaaaacaagtcccctcttttgctgaacgactcctgctcgctgcccgatctcaccacacccctgaagaagcggcgtttctaccaactcctcgatagcgtgtatagcgagacatccacaccgacgccctccccctacgcgacgcccacacacacggacattactccaatggatcctagtttcgcaaccccaccgaggattaagtccgacgatgagacatgcaggaacgggtacaagcccatctattctcctgtgactcccgtcacgcccggaacccccggtaataccatgcacttcgagaacatttctagtcctgagtctagcccagaaataaagcgcaggacctactcccaggagggctacgatcggagttctacaatgctaaccttgggtccattcagaaattccaatctgaccgaactcggactccaggaaatcaagaccattggatacacaagcccaagaagtaggacggaggtgaacagacaatgccctggggagaaggaacctgtctcagacctgcagcttgggctggatgctgtagagcccaccgccctgcataaaacgttggagaccccggctcatgatcgggctgagcccaacagccaactggacagtacacactccggacgcggaaccatgtactcctcctgggttaagtctccggatcgaaccggcgtgaatttcagtgtcaacagcaacttgagagacttaaccccctcccaccaacttgaagtgggtggcggttttcggatcagtgagagtaagtgtttgatgcaggacgacacccgaggtatgtttatggagaccaccgtgttctgcacgagtgaggacggcctagtgtcaggctttggacgcacggtgaatgacaacttaattgacgggaactgcactcctcagaacccacctcagaagaaaaaggtgtccctcctggaatacagaaaacggcaacgcgaggcgaggaaatctggatccaaaactgagaactttcccttgatcagcgtcagcccacacgcttccggaagtctttccaacaatggtgacggttgtgccagcagtaatgataatggggaacaggtcgatcacacagctagcctgccactcccgacacccgctacagtttacaacgccacctctgaagagacaagcaataattgccccgttaaggacgcaacagctagtgagaagaatgaacccgaggtccagtggactgcctccacctctgtggagcaagtgagggagaggtcctatcaacgcgctctccttcttagcgaccatcggaaggataaagactctgggggtgaatccccatgtgtctcatgcagccccagccacgtgcagtcttctccatcctcccactccaaccatatcccccaacttcaagccaaaggccctgtcccatcgttcagcgagctgatggaggatccggatccggagaatcccgaacctacaactactaatgaatgtcccagcccggacacatcccagaacacgtgtaagtcgccccctaaaatgagtaagcctggctctcccggtagcgtaatccctgctcaagcacatgggaagatctttacaaagcctgatccccaatgggactctaccgtgagcgcctctgaagccgagaatggtgtgcacctgaaaacagaacttcagcagaagcagctgtctaacaataaccaggccctgtcaaagaaccaccctccacagacgcatgtgaggaacagtagcgagcagctgtctcagaagcttccctcagtgcccaccaaactccactgtcctccctcccctcacctggagaacccaccaaaatctagtaccccacatacccctgtgcaacacggctatttgtctcccaagcctccctctcagcaactcgggtctccctatagaccccatcattcccagtcaccccaggtgggaacccctcaaagggagccccagcggaatttttatcctgcagcacagaatctgccagtcttctggttgctaggtattatcccacatcagctgaagccatataccacacatctcatcaaagacttacatttctttctaagggtactgatacagctgtaccataggattcctcacaaactccacataatccccctctgggaccgagacccttcaacttctctcctggagcagggtcatattgtacactacttgagccaggtgcttatctcatctcctaaggatcaaaccgtcttccagcatctcctccttcaagggagcgtactgattctggcattatggccgtgtcacatgggatttaaagatctgtcccggcatctccagtgcctcgaccgcttccaattcaccgaacacagatgccaccagcacttcaaaactatcactatggggcaaggcggtataaaaatggactcaaagaacattttcctgaacgtcctctag

SEQ ID NO: 231459 - DNA, 378 bp, synthetic construct
  misc_feature 1..378: note = Description of Artificial Sequence: Synthetic coding sequence
  source 1..378: mol_type = other DNA
tagggcagcttgtccaataatggcgacgggtgcgcatcatccaatgacaacggcgagcaggtggaccacaccgcatcgctccctttgcccactcctgccaccgtgtataacgccacatccgaggagaccagtaacaactgtcctgtgaaagatgccactgcatcagagaaaaacgaacccgaggtgcagtggactgctagtactagtgttgagcaggtccgggagcggtcttaccagcgcgcattgctcctctccgatcaccgcaaggacaaggacagcgatcctgacccggagaatccagagcccacaaccacaaatgagtgcccatcgccggacaccagtcagaacacttgtaagagccctcccaaaatgtcttag

SEQ ID NO: 231460 - DNA, 216 bp, synthetic construct
  misc_feature 1..216: note = Description of Artificial Sequence: Synthetic coding sequence
  source 1..216: mol_type = other DNA
atgagcatcgtgattcctcttggtgtcgataccgcagagacctcttacctggaaatggccgctggcagcgagccagaatccgtagaggcttctcccgtggttgtcgagaagtccaatagctacccccaccagctatacacatccagttcacaccacagccattcttacattggcttaccatatgccgatcacaattacggcgcacgacctccatag

SEQ ID NO: 231461 - DNA, 1830 bp, synthetic construct
  misc_feature 1..1830: note = Description of Artificial Sequence: Synthetic coding sequence
  source 1..1830: mol_type = other DNA
atgagcattgtgattcccctgggggtagacacggctgagacatcatacctggagatggctgcaggcagcgagccagaatctgtggaggcgagccctgtggtggtagaaaaatctaactcctaccctcatcaactgtacacctcaagttcccatcactcgcatagttacatcggacttccttacgccgatcacaactacggagccagaccaccccctacccctcccgcatcccccccaccctccgttttgatttccaaaaacgaagtgggtatcttcacaactcctaactttgacgagacatccagcgcaaccactatttccacctcagaagatggttcttatggaaccgatgtgacccggtgcatttgtggatttactcacgatgatgggtacatgatctgctgcgacaagtgcagcgtctggcaacacatagactgcatggggatcgacaggcagcacatccccgacacatatttgtgtgaacgatgccaaccccgtaacctggataaagaaagagccgtactgctccaaaggagaaagcgggagaatatgagcgacggtgacacctctgcgactgaatctggagacgaggtccctgtggagttgtacaccgcttttcagcatacccccactagcataactttgacagctagcagagtgtccaaggttaatgacaagcggaggaaaaaaagtggcgagaaggagcagcatatttccaagtgcaaaaaggcgttccgggaggggtctcgaaaatctagccgcgtgaaagggtccgccccagaaatagacccgagctcggacggatccaacttcgggtgggagacaaaaattaaagcctggatggataggtatgaggaagctaacaacaaccaatattccgaaggagtacaaagagaggctcagaggatcgcgctgagactcggcaacggtaacgataagaaggaaatgaataagtctgatctgaatactaacaatctgctgttcaaaccaccagttgagtcccacattcaaaaaaataagaaaatcctcaaatctgcgaaagacctgccacctgacgccctaataatcgagtataggggtaaattcatgcttcgtgagcagttcgaagctaacggttacttcttcaagcgaccctacccattcgtgctgttttacagtaagtttcacggcctcgagatgtgcgtagatgctagaacatttggaaatgaggcgcgatttattagacgcagctgtacacctaatgccgaggtgaggcatgaaatccaagatgggaccattcatctctacatctactccatccacagtattcccaagggcaccgagatcacaatagcttttgattttgactatgggaactgcaagtacaaggtagactgcgcctgtctgaaggagaatccagagtgcccagtgctgaagcgcagtagcgagagcatggaaaatatcaactccggctatgaaactagaaggaagaagggtaaaaaagacaaggacatcagcaaggagaaggacactcaaaaccagaatatcactctagattgcgaagggaccactaataagatgaagtcgcccgagacaaagcagaggaagctgagtcccctgagattatcagtgagtaacaaccaggaacctgatttcatcgacgatatagaagagaagacccccattagcaatgaggttgaaatggagagcgaggagcagattgcagagcggaaacggaagatggtaagctgggaagcttcaagtcttggactggtcacagcagccctgcatatggtgatcgttgccgctttcacctgggcttttacactcttcttcgaggtttctgaatag

SEQ ID NO: 231462 - DNA, 693 bp, synthetic construct
  misc_feature 1..693: note = Description of Artificial Sequence: Synthetic coding sequence
  source 1..693: mol_type = other DNA
atgagtattgtgatcccattgggggttgacaccgccgagacatcttatctggaaatggccgcagggtctgaacccgagtctgtggaagcctccccggtggtggtggagaagtctaatagttacccacaccagctctacacttccagcagtcaccattctcattcctatatcggactgccctatgctgaccacaactatggcgcacgcccacccccaacccctccagcctctcctccgccaagtgttttgatctcaaagaatgaagttggcattttcactactcctaacttcgacgagacctccagtgctaccactatttccacctccgaagacgggtcttatggaactgatgttacccgctgtatctgcggcttcacacacgacgatgggtacatgatctgctgtgacaaatgctctgtgtggcagcacattgattgcatgggcatcgataggcagcacatccctgatacctatctatgtgaacggtgccagcctcggaatctggataaggagcgggctgttctgctgcagcgcagaaaaagggaaaacatgtctgacggcgacacttctgccacagagtctggggatgaggtccccgtggagctgtacacggcttttcagcatactcctaccagtatcaccttgaccgcctcccgagtgtcaaaagtaaacgacaaacgtaggaaaaagtag

SEQ ID NO: 231463 - DNA, 1362 bp, synthetic construct
  misc_feature 1..1362: note = Description of Artificial Sequence: Synthetic coding sequence
  source 1..1362: mol_type = other DNA
atggtcctggtattatccgatacctccgcttcacctcctccatcagtgctgattagcaaaaacgaggtggggattttcactactccaaatttcgatgaaactagtagcgcaaccactatttcgactagcgaggacggctcgtatggtaccgacgtaaccaggtgtatttgcggctttactcatgatgacggttatatgatatgctgcgataaatgttctgtctggcaacacattgattgcatgggcattgatcgccaacacatacccgatacctatttgtgtgaacgttgccaaccccgtaacctggataaagagcgggctgtactactgcagagacggaaacgggaaaatatgtcagatggtgacacatccgctacagaaagcggcgacgaagtgcctgtggaactgtacaccgcatttcaacatacccccaccagtatcacactcactgcctccagggtgtctaaagttaacgataagcgacgcaagaagagcggcgagaaagagcagcacatatcaaaatgtaaaaaggccttcagggagggttcacgcaaatcttccagagtcaaaggatcggcacctgagatcgatccatcaagcgacggctctaattttggttgggagaccaaaataaaagcctggatggatagatatgaagaggcgaacaataaccagtactcagagggggtccagcgggaagcccagaggatagccctgcgtttgggcaacggcaatgacaagaaggaaatgaataaaagcgacctgaatacaaataacttactgtttaaaccacctgtggagtcccatatccagaaaaacaagaagatcttgaagagcgccaaggatctaccccctgacgcccttatcattgagtatagaggcaaattcatgctaagggagcagtttgaagcaaatggatatttttttaaacgtccctatccctttgttctgttttacagtaaattccatggactggagatgtgcgtggatgcccgaacattcgggaacgaggcacgctttatccgccgaagttgcacccctaatgccgaagtgaggcacgagattcaggacggaactatccacctctatatctacagcatccactctatcccgaaggggactgagattactattgctttcgacttcgattacggaaattgtaagtacaaagttgactgtgcctgtctcaaggagaacccggaatgtcctgtacttaagcggagtagcgaaagcatggagaacataaattccggctatgaaacccgacgcaaaaagggtaagaagacaaaaatctttcagaagaagaaaattcacaaaataagaatacttttatggatcgtgaaggagagacctactaaatag

SEQ ID NO: 231464 - DNA, 969 bp, synthetic construct
  misc_feature 1..969: note = Description of Artificial Sequence: Synthetic coding sequence
  source 1..969: mol_type = other DNA
atgccagtcactgtgacgagaaccaccattactacaacaacaacttcttcttccgggcttggctcaccaatgatcgtcggctctccacgcgctctgacacagcctctgggcctcttacgacttctgcagctggtgtccacatgtgtggccttctccttagtcgcttccgtgggcgcttggaccggcagtatggggaactggagtatgttcacttggtgcttctgtttcagcgtgaccctgattattctgatcgtggaactgtgtggactgcaggctcggtttcccttgtcctggcgtaattttccaattacatttgcatgttacgccgctctcttttgcctctcggcgagtataatttatcctaccacctatgtgcagttcctgtctcacggccgatcgcgggatcatgcaatcgcagccacctttttctcttgcatagcctgtgtggcatacgctaccgaagtagcttggactagagctcggccaggcgagatcactgggtatatggctaccgtgcctggactcttgaaggtgctagaaactttcgtcgcctgcataattttcgccttcatatccgacccaaacctttatcagcaccaacccgcactggagtggtgtgtggcagtgtacgctatttgctttattctcgcagccatcgccatccttcttaatcttggggagtgtaccaacgtgctccccatccctttcccatctttcctaagtggactcgccctactctccgtccttctgtatgccacagctctggtgctatggccgttgtatcaattcgatgaaaaatacggcggtcagccacgacggtcaagagatgtcagttgttctcggtcccatgcttattacgtgtgtgcatgggacaggcgcttagctgtggctatcctgacagcaatcaatctcctggcctacgtagccgatctcgtgcactcagcacatcttgtttttgtgaaggtgtag

SEQ ID NO: 231465 - DNA, 969 bp, synthetic construct
  misc_feature 1..969: note = Description of Artificial Sequence: Synthetic coding sequence
  source 1..969: mol_type = other DNA
atgcctgtgactgtgactcgaactactatcaccactactaccacaagttccagcggcttaggctctccaatgatagtaggcagccccagggcccttactcagcctttgggattgctaaggctactacaactggtttctacatgcgtggcattcagcctggtcgctagcgtgggcgcttggactggaagcatggggaattggtccatgtttacttggtgtttttgtttctccgtcactcttatcattctgatagtggaactgtgtggcctgcaggctcgttttcctttgagttggcgcaacttcccaatcaccttcgcctgctatgccgcactcttctgcctctctgcgtctatcatttaccccaccacttacgtccagttcctgtctcacgggcgatcaagggaccacgccattgctgcgactttcttctcttgtatcgcgtgcgtggcgtacgctactgaggtggcatggacacgagcacggccaggcgaaatcaccggctacatggcaacagtgccaggactcttgaaagtgctcgaaacattcgtggcttgcattatttttgccttcatcagcgatcccaacctgtatcagcaccaaccggctttagaatggtgcgtggccgtgtacgccatttgtttcatcctggccgctatcgccatactgctaaacctaggagagtgcactaatgtcctcccgatcccgtttccgagtttccttagtggtttggcgttgctatctgtgctgttgtatgcaacggccctggtcttgtggccactataccaatttgacgagaagtatgggggacaaccccgtcggagccgagatgtttcatgttcccgttctcatgcatattacgtgtgtgcctgggaccggagattagcggtggctattttgaccgccatcaatctgctcgcgtacgtggccgatctggtccacagtgcgcacctggtcttcgttaaggtgtag

SEQ ID NO: 231466 - DNA, 969 bp, synthetic construct
  misc_feature 1..969: note = Description of Artificial Sequence: Synthetic coding sequence
  source 1..969: mol_type = other DNA
atgccagtcaccgtaacccgtaccaccatcaccactacaaccacttccagctcaggactaggctcccccatgattgtggggtcaccgagagcattaacccagcctcttggactgttacgcttgcttcagctggttagcacgtgcgtagcatttagcctagtcgcttctgttggcgcatggacaggctcaatgggcaattggagcatgttcacatggtgtttctgcttcagtgtgacgttgatcatcctgattgtcgaactctgcggcctacaggctcgatttcctctgagctggcgcaatttccctatcacattcgcctgttatgccgcacttttctgcctcagcgcaagcatcatctatccaactacttacgtccagtttttgtcccatggacggagccgagatcacgctatagccgctaccttttttagctgcatcgcgtgtgtggcctatgccacggaagtggcatggacacgggctagacccggagaaattactggttacatggcaaccgtaccaggtttgctgaaagtgctcgaaacgttcgtcgcttgtatcatatttgcctttatttctgaccccaatctctatcagcaccagcctgcgttagaatggtgtgtggcagtttatgccatctgcttcatcctggctgccatcgccatcctgttaaatctgggcgaatgtactaatgtgctaccaatcccctttccgtcatttctatcaggactcgctcttctatccgtccttctgtacgccactgccctagtgctgtggcccctgtaccagtttgacgagaagtacggcggacagcccaggaggtcgagagatgtgtcctgtagcaggtcccatgcctattatgtttgtgcctgggaccgcaggctcgcagtggcaattctcaccgccatcaacttgctcgcatatgtcgctgatctggtccacagtgcccaccttgtgttcgtgaaggtttag

SEQ ID NO: 231467 - DNA, 969 bp, synthetic construct
  misc_feature 1..969: note = Description of Artificial Sequence: Synthetic coding sequence
  source 1..969: mol_type = other DNA
atgcccgtgaccgtgacacgaactaccattacaactacaacgacatcatccagcgggctgggaagtccgatgatcgtcggcagcccacgggcattgacgcagcctttagggctgctgcgactgctgcagctggtgtctacatgcgttgcttttagtcttgtagcatctgttggagcctggactggaagcatgggtaactggtccatgttcacctggtgtttctgcttcagtgttaccctcattatactaatcgtggagctgtgcggccttcaggcccgattcccgctgagttggcgcaactttcccatcactttcgcttgttacgctgccctgttttgtttgtccgcttcaattatttaccccactacttatgtgcagtttctgagccacggaaggtcgcgcgatcacgccatcgccgctaccttcttcagctgcatcgcctgcgtggcctacgcgaccgaagttgcctggactcgagcaaggcccggtgagattacaggttatatggctacggttccaggtttgctcaaggtgctcgaaacctttgtggcatgcatcattttcgcctttatatccgaccccaacctttatcagcaccaacccgctttagagtggtgtgtagcggtgtacgccatttgttttatactggcggctatcgccattctactgaacttgggtgaatgcaccaatgtattgcccataccttttcccagcttcctctccggattggcgctcctgagcgtgttactgtatgcaaccgcgctggtactgtggcctctgtatcagttcgatgaaaaatacggcggacaaccgagacgctcaagagatgtctcttgctctcgctcccacgcctattatgtttgcgcgtgggatcgtagactggcagtggccatactgaccgccataaatttactcgcttatgtggcagatttggtgcactccgctcacctcgtatttgtcaaagtgtag

SEQ ID NO: 231468 - DNA, 969 bp, synthetic construct
  misc_feature 1..969: note = Description of Artificial Sequence: Synthetic coding sequence
  source 1..969: mol_type = other DNA
atgcctgtgacagtgacaagaactactatcacaacaaccaccacatcgagcagtgggctagggagccccatgattgtgggtagccccagagccctcactcagcccttggggctgctaaggctgttacagttggtatctacttgcgttgctttctctctcgtggctagcgtcggcgcatggaccggcagtatggggaactggtccatgtttacatggtgcttttgcttttccgtcactcttatcattctgattgtcgaactctgtgggcttcaggccaggttccccttgtcctggcgcaatttcccgataacatttgcttgctatgctgctcttttctgcctttcagcttctattatttatccaaccacgtacgttcagttcctgtcgcatggacggtcaagggatcatgcgattgccgcaaccttcttcagctgtatcgcttgcgtggcgtatgccacagaggtagcttggacccgcgctcggccaggcgaaatcactggatacatggcaaccgtcccgggtcttctcaaggtcctagagaccttcgtggcatgcattatctttgcctttattagcgatcctaatctttaccagcatcagcctgctttagaatggtgcgtggcagtctatgctatttgttttatcctggccgctatagcaatcctgttgaatttgggggagtgcacaaacgtcttaccgatacccttcccaagctttttgtccggcctggctctgctgtctgtgttattgtatgctacagcattagtgttatggcctttgtaccaattcgatgagaagtatggcggacaacctcggaggtccagggacgtctcatgctcccgaagccacgcttattatgtgtgcgcctgggaccgccgactcgccgtggccatactcacagcgattaatctgcttgcctacgtggccgatttggtgcactcagctcatctggtgtttgtgaaggtctag

SEQ ID NO: 231469 - DNA, 444 bp, synthetic construct
  misc_feature 1..444: note = Description of Artificial Sequence: Synthetic coding sequence
  source 1..444: mol_type = other DNA
atgcctgtgaccgttacgaggaccacaatcacaacaaccaccacctcaagctctgggctgggttctccaatgatcgtaggcagcccacgcgcacttacccagccactgggcttactccggctgctccaactggtcagtacctgcgtggccttctctctggtggctagcgttggcgcatggaccgggtcaatgggaaactggtcaatgttcacttggtgtttttgctttagtgtgactttgataatactcatcgtcgaactgtgtggactccaagccagattccctctgagctggagaaatttcccaattactttcgcatgctacgcagccttattttgcttgtcagcttcaatcatttacccaactacatatgtgcagttcctgtcccatggaagatcccgcgatcacgctatcgctgcgacatttttttcatgcattgcctag

SEQ ID NO: 231470 - DNA, 858 bp, synthetic construct
  misc_feature 1..858: note = Description of Artificial Sequence: Synthetic coding sequence
  source 1..858: mol_type = other DNA
atgcctgtgactgtcacaagaactacaatcaccacgaccacaacttcgtcgagcggattgggtagtcccatgatagtgggttcaccacgggctctgactcagcctctgggattgctcaggctgttgcagttggtctccacctgcgtggcttttagccttgtagcgagcgtcggggcttggacaggaagcatggggaactggtctatgttcacctggtgtttctgcttctcggtcaccctgatcatactcatcgtggagctgtgcggattgcaggccagattccctttgtcctggagaaatttccctattacattcttctcttgcatcgcctgtgtcgcctacgccaccgaagtggcctggactagggcacgacccggagagattaccggttatatggcaaccgtgcctggcctgctgaaggtgctggagacattcgtcgcctgcatcatttttgccttcattagcgatccaaacctgtaccagcaccagcccgctcttgagtggtgcgtggctgtttatgcaatctgtttcattctcgcagcaatcgccatactgctcaatctgggcgaatgtacgaacgtgctgcctatcccatttcctagctttctgtcgggattggccctgttaagcgttctcctgtatgcaaccgctctagtcctatggccactgtaccagttcgatgaaaaatacggaggccagcccaggagatccagggacgtgtcctgcagtcgctctcatgcttattacgtgtgcgcctgggaccgcagactcgcagtcgccatcctcaccgctatcaatcttctggcctatgtggctgacctggtgcattcggcccatctggtatttgtgaaagtttag

SEQ ID NO: 231471 - DNA, 729 bp, synthetic construct
  misc_feature 1..729: note = Description of Artificial Sequence: Synthetic coding sequence
  source 1..729: mol_type = other DNA
atgcccgtgaccgtgacacgcactacaatcaccacgaccactacgagctcgagtggattaggatccccgatgatcgtagggagcccaagggcacttacccagcctctggggctcctgagactgctgcaactcgtgtcaacctgtgtcgcattttctctggtggcatcagtaggggcatggaccgggagtatgggtaattggagcatgtttacctggtgtttttgctttagtgtgactttgattattctgattgttgaactgtgcggactacaggccagattccctctgtcgtggcgcaactttcctattacattcgcctgctacgctgctctgttctgtctgagcgcctcaataatataccctactacttacgtgcagtttctgtctcatggacggtctagggatcacgccatcgccgctacctttttttcttgtattgcctgcgtggcatatgccaccgaagtggcctggacaagagctcgcccaggggaaatcaccggctacatggctacggtgcccggattactcaaggttttagagactttcgtagcctgcattatctttgcctttatcagtgaccctaatctatatcagcaccaacccgctctggagtggtgtgtggcggtgtatgcgatctgctttattctggcggctatcgcgatactgctgaatctgggagagtgcacaaacgtgctccccatcccgtttccaagcttcctgtcaggttag

SEQ ID NO: 231472 - DNA, 780 bp, synthetic construct
  misc_feature 1..780: note = Description of Artificial Sequence: Synthetic coding sequence
  source 1..780: mol_type = other DNA
atgcccgtgacagtcactcggaccaccatcacaactaccacaacctcctcttctggtctgggtagcccgatgattgtcggctcccccagagccttgactcaacctctcggactgctgcggctgctgcagctggtctccacatgtgttgcctttagccttgtggcctctgtgggagcctggaccggctcaatggggaattggtccatgtttacctggtgtttctgtttctccgtgactctcatcattctgattgtcgagctgtgcggactccaagccagattccccctttcttggcgaaattttcccatcaccttcgcctgttacgccgcattgttctgcctatccgcatctatcatatatcctactacttacgtccaattcctttcccacggcaggtctagggatcatgcgatagcagctaccttcttttcctgcattgcatgtgtggcatatgcaactgaggtcgcttggacccgagctaggcctggcgaaataacaggctatatggccactgtgcctgggctgttaaaggtgcttgagacatttgtcgcctgcattatctttgcttttatttccgaccctaacctgtaccagcatcaacctgcactggaatggtgtgtcgccgtgtacgctatctgcttcattctggccgctatcgcgattctgctaaatctcggtgagtgtaccaacgttttgcctatcccattcccgtcgtttctttccggactcgccttgctgtctgtgttgctctatgcaactgctctcgttctgtggccttag

SEQ ID NO: 231473 - DNA, 567 bp, synthetic construct
  misc_feature 1..567: note = Description of Artificial Sequence: Synthetic coding sequence
  source 1..567: mol_type = other DNA
atgcctgttacagtaacgcggaccacaatcactaccaccaccacgtctagcagcggcctgggtagcccaatgatagtgggcagccccagggctttgactcagccactggggctgctgaggctcctgcagctcgtgtccacatgtgtggcattctctctagtggcgtctgttggagcatggaccggtagcatgggcaactggtcaatgtttacctggtgtttttgcttctctgtcacactaatcattctgattgtcgaattgtgcggacttcaggcccgatttcctctctcctggcgcaacttccctataacctttgcatgttatgctgccctattttgtctcagtgcgagcatcatttaccccactacctacgtccaattcctttcgcacggaaggtcaagagaccacgcaatagctgctactttcttttcttgcatagcctgtgtcgcctacgctacagaggttgcatggacccgggctcgaccaggcgagataaccgggtacatggctacagtccccggtttgttaaaagtactcgagacgttcgtagcctgtatcattttctag

SEQ ID NO: 231474 - DNA, 942 bp, synthetic construct
  misc_feature 1..942: note = Description of Artificial Sequence: Synthetic coding sequence
  source 1..942: mol_type = other DNA
atggccctgaggatttgtgtgacgtatacccctgcactgcccatcggtctctgtacaaggtgctgtttgtgtctggagcaatcaccgtcctggtgccactgcttgcggggtgtgagctttctcacctttcacctccatcagagcgtccccctgggcgacagagactctctgctgatgttcaccaggcaagcgggtcacttcgtagagggatcgaaagctgggaggtcacggggacgtctgtgcctgtctcaagcattacgcgtggcagtcagaggagcattcgttagcctgtggtttgcggcaggtgccggagaccgtgagcggaataagggggataagggagcacagactggggctggactgtcccaggaggcagaagatgtcgatgtatcgagagccagacgagtgacagacgctccccagggcacactttgcggaacgggtaataggaacagcggcagtcaatctgctcgtgtggtcggtgtggctcaccttggggaagccttccgtgtaggagtggagcaggcaatctccagctgcccagaggaagttcatgggcgtcatggtttatccatggaaattatgtgggcccgaatggacgtagcgttgcggtctcctggacgtggcctactggcaggagctggcgctctctgtatgacgctcgccgagagtagctgcccggactatgagcgaggaagacgcgcatgccttacactgcacaggcacccgacgccacactgttcaacatggggactgccgctgcgcgtggcgggtagctggctgactgttgtcactgtagaggctctcgggggttggcggatgggcgtccgcaggactggtcaggtcgggcctaccatgcaccccccacccgtgtctggagcttccccactcctgctacatcacctgctactactgctgttgattattatccttacctgttag

SEQ ID NO: 231475 - DNA, 942 bp, synthetic construct
  misc_feature 1..942: note = Description of Artificial Sequence: Synthetic coding sequence
  source 1..942: mol_type = other DNA
atggctctgagaatctgtgtcacctatactcccgcattacccatcggcctgtgcactaggtgttgcctatgtttggaacagtctccgagctggtgccactgcttgcgtggggtttcattccttacatttcacctgcaccagtctgtacccctgggtgatagagactcactgctgatgttcaccagacaggcgggtcactttgtggagggaagcaaggcagggaggtccagaggccgtctctgtttgagtcaagcacttcgagttgccgtcagaggggcattcgtgtcgttgtggtttgccgctggcgctggggatcgcgaaaggaacaaaggcgacaagggcgcacagaccggggcaggcctgagccaggaggctgaagacgtggatgtgtctagagctaggcgcgtcactgacgcgcctcaaggcaccctgtgtggtaccggtaatcgcaacagtggatcccaatctgccagagtggtcggtgtcgcccaccttggcgaggcttttcgagtcggggttgagcaagccatcagctcctgccctgaagaggttcacgggaggcacgggctgtccatggaaatcatgtgggctaggatggatgtggcccttcgtagtcctggacgcggattgctcgctggggcaggcgcattatgcatgaccctggccgagtcgtcttgcccagactatgaacgaggtaggagggcatgcctgacactacaccgccatccaacaccccattgttctacttgggggttgcctttgcgggttgcaggtagctggctcacggtagtgacagttgaagccttggggggatggcgcatgggggtccgcaggactggacaggtgggacccaccatgcatcctccacccgtgtctggggcatcaccactattgctccatcacctgctgcttttgttacttatcataattctgacatgttag

SEQ ID NO: 231476 - DNA, 279 bp, synthetic construct
  misc_feature 1..279: note = Description of Artificial Sequence: Synthetic coding sequence
  source 1..279: mol_type = other DNA
atgcaggtaagcacagccgcattggccgttttgttgtgcacaatggccttatgcaaccagttcagtgcgagcctggctgcggatacgcccaccgcctgctgtttttcctacacaagtcgccaaatcccacagaatttcatcgccgactactttgagacttcatctcagtgcagcaagcccggtgttatttttttaacaaagaggagtcggcaagtgtgcgccgacccctccgaggaatgggtgcagaagtacgtgtccgacctcgaactgagtgcttag

SEQ ID NO: 231477 - DNA, 2334 bp, synthetic construct
  misc_feature 1..2334: note = Description of Artificial Sequence: Synthetic coding sequence
  source 1..2334: mol_type = other DNA
atgggcgttccctttttttctagcttgcgatgcatggtggatctcgggccatgttgggccggaggcttaaccgctgaaatgaagctcctgctagcactggctggcctgcttgcaatcttagcaacaccacagccaagcgagggagcggcacccgctgtgcttggcgaggtggacacaagtttagtcctcagttccatggaggaagcgaagcagcttgtagataaggcctacaaagagaggcgggagtccattaagcagcgcttgagaagcggcagcgcgtcccctatggagctgttaagctattttaagcaacctgtcgctgcgactcggaccgccgttcgggcagccgattatctgcatgtggcccttgacctcctggaaaggaaactccggtcgttgtggcggcgaccctttaacgtgactgacgtcctgacacctgcacagcttaatgtactgagtaagtcttctggatgcgcttatcaggatgtcggggttacctgcccagaacaggataaatataggacgatcacaggcatgtgtaataatcgatgcggatggctgggagttgccgcaggcactgggttacgggaggcctctcggacacctcaagcatcgaggtgccaacgcccagtgctcccatgtcgcaggagtcccaccttgggcgcttccaaccgagccttcgtgcggtggctcccagccgagtatgaagacggcttctctcttccatacggatggacacccggagttaagagaaacggctttcctgtagccctggcaagggccgtgagtaatgaaattgtacgcttcccaaccgaccagctgactcctgatcaggagcgtagtttaatgtttatgcaatgggggcaactgctggaccacgatctggacttcacccccgaacccgcagctagggctagtttcgtgacaggggtcaattgcgagaccagctgcgttcagcagcctccttgtttccccctgaaaatacctccaaacgatcccaggatcaaaaaccaggccgactgcatccccttctttaggagttgtcctgcctgtcccggatccaacattacgatacgaaatcagatcaatgctctgacatccttcgtcgacgcctcaatggtttatggaagtgaggaaccattagcacgtaacctgcggaatatgtcaaaccaactcggtcttctggccgtgaatcagcgattccaagacaacggacgcgctctactgcccttcgacaacctgcacgacgatccatgcctcctcacgaatcgctctgctaggataccttgtttcctggcgggagatacaaggtcctccgagatgcctgagctcacaagtatgcatactctccttctgagggaacataatcgactggcaaccgagctgaagagcctgaaccccaggtgggacggcgaacggttgtatcaggaggctcggaaaatagtgggagccatggtgcagattattacctaccgcgactacttgcctctcgtgctaggccctaccgcaatgcgtaagtatctgcctacctaccgttcctacaacgacagtgtggaccctaggattgcgaatgtgttcacaaatgcgttccgatatgggcacacccttattcaaccattcatgtttcgactagataaccgatatcagcccatggagccaaaccccagggtgccattgagccgggtgtttttcgcttcctggcgcgtggtgctggaggggggaatagatccaatcctacggggactgatggctactccagctaaactcaatagacagaatcagatcgccgtcgacgagattcgggaacggctattcgaacaggtgatgagaatagggctcgacttgccggcacttaacatgcagcgtagccgcgaccacggtctccctggttacaatgcgtggcggagattctgtggacttcctcagccagaaaccgtggggcaattaggaacagtcctgagaaatctcaagctggctcgcaagttaatggagcagtatggaacccctaataatatcgacatctggatggggggagtctctgaacccctgaagcggaaggggagagtcgggcctttactcgcttgtatcatcgggacacagtttcgcaaactgagagacggggacaggttctggtgggagaacgagggcgtgttcagtatgcagcagcggcaggccctggctcagatatctctcccccgaatcatttgtgacaacacaggcattacgacagtgagcaagaataatatattcatgtctaattcttacccgagagactttgtgaactgcagtacccttcccgcactcaacttggcctcttggcgggaggcttcgtag

SEQ ID NO: 231478 - DNA, 1542 bp, synthetic construct
  misc_feature 1..1542: note = Description of Artificial Sequence: Synthetic coding sequence
  source 1..1542: mol_type = other DNA
atgccatcctgggctttgttcatggtgacttcctgcttgctgctggctccccagaacctggcccaggtaagtagtcaggacgtcagcctgctggcctccgatagtgaacctttaaagtgtttcagccgcaccttcgaggacttaacctgcttttgggatgaagaagaggctgctccctctggaacataccagttgctttatgcatatcctcgtgagaagcccagggcctgcccgctttctagtcaaagcatgccccactttggcaccaggtacgtctgtcagttccctgatcaagaggaggtgcgtttgttttttcccctgcacttatgggtcaaaaacgtcttccttaatcagacacggactcagcgcgtactcttcgttgacagcgtgggactccctgcccctcctagtatcattaaagcaatgggcggttcccaaccgggagaactacagatatcttgggaggagcccgcaccagagattagcgacttcctgagatacgagctaaggtacggaccgagagatccaaaaaattcgaccggtccgacagtgatccagctgatcgccactgaaacgtgctgtcccgctctccagagaccgcatagtgcatccgcgttagaccaaagcccttgcgcccaacctaccatgccctggcaggatggaccaaagcagacatctccttcccgtgaggctagcgcactcactgctgaagggggatcctgcctcatcagtggcctgcaacctggcaacagctattggctgcagcttcgctctgaaccggacgggatttctctggggggaagctggggcagctggtctctaccggtgacggtggacttacctggcgatgccgtcgcattggggctgcaatgttttaccctggacctgaagaatgtgacctgtcagtggcagcagcaagaccatgcctctagtcaggggttcttctaccactcacgggcaagatgttgtccaagagacaggtaccccatatgggagaattgcgaagaagaggaaaaaacaaaccccggactccagacccctcagttctcacggtgtcactttaaaagcaggaacgatagcatcatccacatcctagtcgaggtcaccaccgcccctggcacggtacattcttacttaggatccccgttttggatccaccaggccgtacggctcccgacacccaacttgcactggagagaaatctcgagtggccacctggagctcgaatggcagcatcctagttcgtgggctgcacaggaaacctgctaccagcttcggtacaccggcgagggacaccaggattggaaggtgcttgagccgcctctgggtgctcgtggcggtaccttggagctgaggcccagatcccggtatcgcctgcagctcagagccagactgaacggcccaacttaccaggggccatggtcttcctggagcgacccgacaagggtagaaaccgctacagagacggcttggatttccttagtgactgcccttcacctggttctcggcttatccgccgtgctgggcctgctcctcctctag

SEQ ID NO: 231479 - DNA, 1908 bp, synthetic construct
  misc_feature 1..1908: note = Description of Artificial Sequence: Synthetic coding sequence
  source 1..1908: mol_type = other DNA
atgcctagctgggcactgttcatggttacatcttgcctactgctggctccacaaaatttagctcaggtatcatcccaggacgtttccctcctcgcctcagattcagagcccttgaaatgcttcagtcgtactttcgaagacctgacttgcttctgggacgaggaagaggccgctcccagtgggacttatcaactactatacgcttatccacgcgagaaacctagggcctgtcctttgagttcacagtccatgccacatttcggcacacgatacgtatgtcagttcccagatcaggaagaggttcgactcttctttccgctccatctgtgggtgaagaacgtctttctgaatcagacgcgcacccagcgtgtccttttcgtcgactccgtaggattgccagccccaccaagcattatcaaagccatgggtgggagccagcctggggagttgcaaatcagttgggaggaacccgcaccggaaatcagtgattttctgcggtacgaattgcgctatggacccagagaccccaaaaactcaacagggccaaccgtgattcagcttattgccacagaaacttgctgtcccgcactgcagcgacctcatagtgcttccgccctggaccagtcaccctgcgcccagccgacaatgccttggcaggacggacccaagcagacttccccatcgcgcgaggcaagtgccttgaccgcagagggcggatcttgcctcatcagtggccttcagcccggtaattcctattggctccaattgagaagtgaaccggacggaatcagtcttggaggttcatgggggtcctggtctctgcctgtgaccgtggatttaccgggagatgctgtcgcgttaggcttacagtgctttacgctggatttgaaaaacgtcacctgccagtggcagcaacaggaccatgcctcctcacagggttttttttatcactccagggccaggtgttgtcccagggaccgttaccccatttgggaaaactgtgaagaggaagaaaagactaatccaggacttcagactccacagttttcaaggtgccactttaagtcacgcaacgacagcataatccacattttagtggaagtgacgactgctcccggaactgtgcattcctatctcggaagcccattctggattcaccaagcagtgcgcctgcccactccgaacctccactggcgcgaaatttccagcgggcatttagaattggagtggcagcacccctcatcctgggcagcacaggagacatgctaccaacttcgctacacaggggaggggcatcaggattggaaagtgttagagcccccactgggagcacgcggaggaaccctggagctccggcctcgctccagatatcggttacaattgagagcccgactgaatggcccaacatatcagggaccctggtctagttggagcgatcccacacgggtggagacagcaaccgagaccgcgtggatttcgctagtgacggccctccatctggtgctgggcctgagtgctgttctgggcctccttctgcttcggtggcagtttcccgcacactacagacgattgcgccacgctctgtggccaagtctgcccgacctgcaccgcgtcttgggacagtacctgagagatacagcagccctttcaccacccaaagctaccgtcagtgacacctgtgaggaggtggaacccagcctgttagagatcctgccgaagtcctctgaacgcaccccccttcctctgtgctcttcccaggcccaaatggactaccggcgactccagccatcctgtctgggcaccatgcccctgtcagtgtgtccgccaatggcagagagcggctcgtgctgcacaacgcatattgccaaccattcgtacttaccattatcttactggcaacagccatag

SEQ ID NO: 231480 - DNA, 1650 bp, synthetic construct
  misc_feature 1..1650: note = Description of Artificial Sequence: Synthetic coding sequence
  source 1..1650: mol_type = other DNA
atgcctagctgggcgctgtttatggttacatcttgcctgctgctggcaccacagaacctggcccaagtgtcaagccaggacgtgtctctgctagctagcgattctgagcccttgaagtgcttctcccgcactttcgaggatctgacatgcttctgggacgaggaggaagccgcaccctcgggtacataccagttgctgtatgcatatccgcgagagaagcccagagcctgcccgctgtcgagccagtctatgcctcactttggaacacggtatgtttgccagttccctgaccaggaggaggtgaggctgtttttccccttgcatctgtgggtcaagaatgtcttcctgaaccagacccggactcagcgggttctcttcgtggactcagtgggtctacccgcacccccatcaatcatcaaggccatgggtgggtctcagccaggcgagctgcagatttcctgggaggaacctgctcccgaaatcagtgattttctgagatacgagttgcgttacggccctcgggaccctaagaactcaaccggtccgaccgtaatccagctgattgccacggaaacatgctgtcccgctttgcagagacctcactcggcttccgccctggatcagagcccctgtgcccagcccaccatgccatggcaggacggcccaaaacagacttcaccgagccgagaggcttcagcactgactgcagagggcggaagttgcttgatttccgggcttcaaccaggtaattcctactggctgcaactgcggtccgaaccagatggcatcagcctgggagggagttgggggtcttggtcccttcccgtcactgtcgacctcccgggagacgccgtcgccctcggcttacagtgcttcacgctagacctcaaaaacgtcacctgtcaatggcagcaacaggaccacgccagttcccaagggttcttttatcatagccgggcacgctgttgtcctagagacagataccccatctgggagaactgtgaggaagaggagaagacaaacccagggctccagactcctcagttctcccgctgtcacttcaaatcccgaaatgatagcattattcatattctcgtggaggtgactactgccccagggacagtacactcatatttgggatcccctttctggattcaccaagcagtgaggctgccaacacctaacctgcactggagggagatttcgtctgggcacctagagctggagtggcagcatccaagttcctgggccgctcaggagacctgctatcagcttcggtataccggagagggccatcaggactggaaagtactggaacccccactcggcgcaaggggcggaacactcgagctgcgccctaggagtcgttataggctgcagctccgagcacgcctgaacggtcccacctaccaggggccttggagttcttggtctgatcctacgagagttgaaacggcaacggagaccgcctggatcagcttagtgaccgccctgcacctggtgttgggtctgtccgccgtgttaggtctgcttctgcttagatggcagttccctgctcactacagatacaggcccagacaggccggagactggagatggacaaggtggagccgcaggcccgtcaatcgacacagttggttcgccctctag

SEQ ID NO: 231481 - DNA, 2817 bp, synthetic construct
  misc_feature 1..2817: note = Description of Artificial Sequence: Synthetic coding sequence
  source 1..2817: mol_type = other DNA
atgacattactgggctccgagcattccctgttgatccgttcaaagtttcggtccgtgttgcagctcaggcttcaacagagaagaactcaagaacagttggcaaaccaggggattatccccccactgaaacgccctgccgagtttcacgagcaacgcaaacacctggatagtgataaggctaagaattcgctgaaaagaaaggccaggaatagatgtaacagtgccgacttggtcaacatgcatatactacaggcttcaaccgcggaaaggagcataccaactgcacagatgaagctgaaacgggctcgcttggctgacgatctaaacgagaagattgccctgaggccaggacctctggagctggtggagaagaatatactgccggttgacagcgcagtaaaggaggctatcaaaggaaatcaagtgtccttctccaaatccacagacgccttcgctttcgaggaggactcatctagcgatggcttgtcccccgaccagacccgatcggaggatcctcagaatagcgccggtagcccaccagacgcaaaagcatccgacacgccttcaaccggctccttagggacaaatcaggacctggcaagcgggagtgaaaacgacaggaacgactctgcttcacaaccctcccaccagagcgacgccggtaagcaaggtctcgggcctccttctactcccattgccgtccacgccgctgtaaagagtaagtctctgggcgattcgaaaaaccggcacaagaaacctaaagatccaaaaccaaaggttaagaaattaaaatatcatcagtatatccccccagaccaaaaagctgagaaatcacctccacccatggattctgcttatgccaggctgctgcaacagcagcagctcttcttgcaacttcaaattcttagccagcagcagcaacagcagcagcatagattttcctacctggggatgcatcaggcacagctgaaggagccaaacgagcagatggtgcgcaatcccaattctagtagtacacctcttagcaataccccactgagcccagtcaagaatagcttttcagggcagacaggtgtgtcaagctttaaaccagggccactgcctccaaatctggatgatctgaaggtgagtgaacttcggcagcaactcagaatccggggactgcctgtttctggaacaaagaccgcactgatggacagactgaggccgtttcaggattgcagtgggaatcctgtgccgaacttcggcgatatcacaaccgtgactttccccgttacgccaaacacgctcccgaattatcagtccagcagttccacaagcgcgctatccaatgggttttaccacttcggctccaccagttccagcccccctatcagccctgcaagcagcgacttatctgtcgcaggctccttacctgacactttcaatgatgcgagtccgtcatttggcttgcatccttcgccagtccacgtgtgtacagaagagagcctgatgagtagcctgaacggcggaagcgtgcctagtgaactggacggcttggatagcgaaaaggataagatgctggtggaaaagcagaaggtcattaatgaattaacatggaagttacagcaggagcagagacaggtcgaggagctgcgtatgcaattgcagaagcaaaagaggaataattgctccgaaaagaagcctttgccatttctcgccgcatctatcaaacaggaggaagccgtgtcctcttgccctttcgcctcacaagtgccagtgaaacgtcagtcgtccagctctgaatgccacccccctgcttgtgaagctgctcaactccagcccctaggtaatgctcattgtgtggagtcatccgatcagaccaacgtactttcatcaacgttcctgagcccacaatgcagccctcaacattctcctcttggagccgtgaaatccccacaacacatctccttaccccctagcccgaacaacccgcacttcttaccaagtagctccggggctcagggtgaaggccacagagtttcctcccccatcagtagtcaagtgtgtacggcccagatggcaggtttacacagcagcgataaagtggggcctaaattctcaatccctagcccaactttcagtaaaagttcctcagccatttccgaggtgacccagccaccttcttacgaagacgctgtcaaacaacagatgaccagaagtcagcagatggatgagctgctcgatgtcctgattgagtcaggcgagatgcccgcagacgcccgagaggaccattcatgccttcaaaaagtgcctaaaataccgaggtcatcaagaagtccaaccgccgtactgaccaaaccatctgcctccttcgaacaagcatcctctgggagccagattccgttcgacccatatgctacagatagcgacgaacacctagaggtcctgctgaacagtcaaagccccctaggcaagatgtctgatgtcaccctactgaagatcggcagcgaagagccccattttgacggtatcatggacggattcagcggtaaggccgctgaagacttgtttaacgcgcacgaaatattacctggcccactgtcaccaatgcagactcagttctccccaagctccgtagatagcaatggtctccaactttccttcacagaatctccatgggagacaatggaatggctggatttgacccctccaaatagcacgcccggattttcggcactgacaacctccagtccgtcaatattcaatattgactttctagacgtcactgatttgaacctgaactcaagcatggacttgcatctgcagcagtggtag

SEQ ID NO: 231482 - DNA, 1989 bp, synthetic construct
  misc_feature 1..1989: note = Description of Artificial Sequence: Synthetic coding sequence
  source 1..1989: mol_type = other DNA
atggatagtgcctatgcgaggctgctgcaacagcagcagcttttcctacagctccaaatcttgagtcagcaacaacaacaacagcagcaccggttctcttacctcgggatgcatcaggcacagttaaaagaacctaacgagcagatggtcaggaacccaaatagttctagtactcccctctcaaacacacctctaagtcctgtgaagaacagtttcagcggccagactggtgtctcatccttcaaaccaggaccactgccccctaacctcgatgatcttaaggtgtcggaactgcgccagcagttgcggattcgtgggctacctgtcagcggcacaaaaacagccttgatggatcgactacgcccatttcaggattgctccggtaacccagtgccaaacttcggggacatcactacagtcacctttccggtgactcctaacacgctgccaaattatcagtcttcatctagtacatccgcactcagcaacggattttatcactttggctccacgagcagctcccccccaatttctccggcatcttctgatctgtcagtcgccggatctctgcctgacacattcaacgatgcctcacccagtttcgggctgcatccaagtcccgtgcatgtttgtacggaagagagccttatgtcctctctgaacggcggttccgtgccttctgagctcgatggcctcgactctgagaaggataagatgctagtggaaaagcagaaggtgattaacgaactcacatggaagctccaacaggagcagcgccaagttgaggaactacgcatgcagctgcagaagcagaagaggaataactgcagcgaaaagaagcctctcccgtttctcgccgcatctattaagcaggaagaagctgtttcctcctgcccttttgcttcccaggtcccggtgaaacgccaaagttcatccagtgaatgtcaccctccagcatgtgaagcagctcagctgcagcctctcggcaacgctcattgcgtggagtctagcgatcagacgaatgtactgagctccacctttttgtccccacagtgttcccctcaacacagcccattgggagcagtcaagtccccacagcatatctcactcccaccttcgcctaataaccctcacttcctcccaagctcttccggggctcagggcgaaggccatcgtgtctcatctcctatctcctctcaagtgtgcaccgcccaaaacagtggagctcacgacggacacccgcctagtttttcaccccactctagctcactgcatccaccattcagcggcgctcaggccgattcctcgcacggtgccggtggcaatccttgcccaaagtctccctgcgtgcagcaaaagcagatgactaggagtcagcagatggacgaacttctggacgtgctcatagagagtggagagatgcccgcagatgctagagaagatcattcatgtctgcagaaagtgcccaagatcccacgttcgtctcggtcaccgaccgccgttctgacgaagcccagcgcttcctttgagcaggcctctagtggcagtcagatcccatttgatccctatgctaccgattctgacgagcatcttgaagtgttactgaactcccagtctccactagggaagatgtcggatgtaactctattgaagattggcagtgaggagccgcacttcgacggaattatggatggtttctctgggaaagctgcagaggacctgttcaacgcccacgaaatcctgcccggacccctctctcctatgcagactcagttttcacctagtagcgtagacagtaacggtctccaattatcctttacagaatccccttgggagaccatggaatggctggatttgaccccacctaacagcaccccgggattctccgcactgactaccagtagcccatccatctttaacatagacttcctcgatgtcacagatctcaatctgaacagttctatggacctacacctccagcagtggtag

SEQ ID NO: 231483 - DNA, 2055 bp, synthetic construct
  misc_feature 1..2055: note = Description of Artificial Sequence: Synthetic coding sequence
  source 1..2055: mol_type = other DNA
atgaaactgaaaagggccaggctggccgatgacctgaatgaaaagatcgcgttaaggcctggcccactggagttggtcgaaaagaacattttacccgtggattctgccgtcaaagaagccattaagggtaaccaagtgagcttcagtaagtccacagacgcctttgccttcgaggaagactcatcaagcgacgggttgtcgcccgaccagacccggtcggaggaccctcagaattcagccggatcacccccagatgcgaaggcctctgacacaccaagcaccggatccctgggcactaatcaggacttggcttcaggtagtgaaaacgaccgaaatgacagcgcgagtcagcccagccaccagtctgacgccggaaagcaaggactggggccaccatccaccccgatagcagtccacgccgcagttaagagtaaaagtttaggagacagtaaaaatcggcataagaagcctaaagaccccaaacctaaggtcaagaagcttaagtaccaccagtacatccccccagatcaaaaggctgagaaatctccacccccaatggattcagcttatgccaggctgctgcagcagcagcagctatttcttcagctgcagatcctgtcccagcagcaacagcagcaacaacacagattcagctatctcgggatgcaccaggcccagctgaaagagcccaacgagcagatggttcgcaatcctaacagcagtagtacccctctgtccaacactcccctgagcccagtgaaaaactccttcagcggccagactggcgtgagcagcttcaaacccggacccctgccaccaaacttggacgatctgaaagtttcggaactgaggcagcagcttcgaatcaggggtctgccagtgtctggtactaaaaccgcgctgatggacagactgaggccttttcaagactgttcgggcaacccggtacccaattttggcgatattacaaccgtgacttttcctgtaactcccaacacgttacctaattaccagtcatcaagttcaacatctgccttgtcaaatggcttttaccactttggaagtacctcttcttccccaccaatcagccctgctagttcagacctgtctgtggcaggaagcctgccagatactttcaacgacgcatcaccttcgttcggattgcacccttcaccggtgcatgtctgcacggaagagagtctgatgagtagcttgaatggtggtagtgtgccatctgagcttgatggattggattcagagaaagataaaatgctggtggagaaacagaaagtgattaatgaacttacctggaagctgcagcaagagcaacgccaagtcgaagaactgagaatgcagctgcaaaagcagaaacgtaacaactgcagcgagaagaagcctttgccttttctcgcggcaagcatcaaacaagaggaggccgtgagcagttgtccctttgcctcccaagtcccagtaaagagacaaagctcatccagcgaatgtcacccccctgcttgtgaggctgcccaacttcaacccctgggaaacgcccattgcgttgagtccagcgaccagacaaacgttctgagttccacgtttctttcaccgcagtgctcacctcagcatagcccgctcggtgcagtgaaatcacctcaacatatctcgctaccacccagtcccaacaatccacacttcctgccttcctccagtggcgcacagggggaggggcaccgcgtgagctcccctattagctctcaggtctgcactgcccaaaacagcggcgctcatgacggccatcccccttctttcagcccacactctagtagcttgcaccctccattctcaggagcacaggccgacagttctcacggcgctggagggaatccctgtcctaagtcgccgtgcgtgcagcagaagatggccggactgcacagcagcgataaggttggacctaagttctcaatccccagccctactttcagcaaatcctcctctgcaatatcggaggtgacccagccaccctcttacgaggacgcagttaagcaagtcaccatgtag

SEQ ID NO: 231484 - DNA, 2961 bp, synthetic construct
  misc_feature 1..2961: note = Description of Artificial Sequence: Synthetic coding sequence
  source 1..2961: mol_type = other DNA
atgacattgctggggagcgaacactcattactgatcagatcaaagtttcggtccgtgcttcagctgcgtctacaacagaggcgcacgcaagaacagctggccaaccagggcattattcccccactgaagagaccagctgagttccatgagcaacgaaagcatctggattcagataaggccaagaactcattgaagcgcaaggcaagaaaccgatgcaacagcgcagatctggtaaatatgcacatattgcaggcaagcacagcggagcggtccatacccaccgctcaaatgaagctgaagcgcgctagacttgctgacgatcttaatgaaaagatcgctctgcgcccaggtccactggagctagttgagaaaaatattctgcccgtggatagcgctgttaaagaggctatcaagggaaaccaggtgagcttctctaagtcaacagatgcgttcgcctttgaagaggattcttcaagtgacgggctctcaccagaccagaccaggtctgaagatcctcaaaactccgctggctcaccccctgatgcaaaagccagtgacactccctcaacgggaagcttaggcacaaatcaggatctcgccagcggaagtgagaatgatagaaatgactctgcaagccagccttctcatcaatctgacgccggaaaacaaggcttgggccctcctagcaccccaattgcggttcacgcagctgtaaaaagcaagtctctgggagacagcaaaaacaggcataagaagccaaaagatcctaagcccaaggtcaagaagcttaagtatcaccaatatattccgcctgaccagaaggctgagaaaagtccgccacctatggattccgcctacgcaaggctcctgcagcagcagcaactatttctccagctccagatcttgtctcagcaacagcaacagcagcagcaccgatttagttatctggggatgcaccaggctcaattgaaggagccaaacgaacagatggtgaggaatcccaatagctccagtactcctttgtctaatacacctctgtcccccgtgaaaaattccttcagtggtcagacgggcgtgtctagctttaagcccggtccactgcccccaaacctcgacgatttaaaggtatcagaactacgacagcaattaaggataagaggactgcctgtgtccgggacaaagacggcattaatggatcggctgcgtcccttccaggattgtagcggaaatccagttcccaatttcggagacataaccacagtcaccttccctgtcacccccaatacactgcccaattaccaatcaagctcgtctaccagtgctctcagcaatggattttatcatttcggatcaaccagctcttctccccctatctctccagcgtcaagcgatctgagcgtcgctggttctctgcctgatacatttaacgacgccagtccatcatttggtctgcatccctcacctgtgcacgtgtgcacagaggagagccttatgtcatccttgaatggcggtagcgtgccttccgagctggatgggctcgattcagagaaggacaagatgctggtggaaaagcagaaggtcatcaacgagctgacatggaaattacagcaggaacagagacaggtggaggagcttagaatgcaactgcaaaaacaaaaaaggaacaattgcagtgagaagaagcccctgcctttcctcgctgcaagtatcaagcaggaggaggcggtttctagctgtccgtttgcaagccaggtaccagttaagagacagtcatcctctagcgagtgtcatcctcccgcttgtgaagcagctcagcttcagccactcgggaacgctcactgtgtcgagagctccgaccaaaccaatgttctgtcctctacttttctctcacctcagtgctccccgcagcattccccactgggggctgtgaagagcccacagcacatctccttgccaccatccccgaacaacccacacttcttaccgtcttcctcaggggctcagggcgagggacatagggtgagttcccctatctcatctcaggtgtgcactgcacaaaattcaggcgctcacgatggacatccgccttccttctcaccccactcctcttcactacatccacccttttctggagcccaggctgattcaagtcacggcgctgggggtaatccatgccctaagagcccctgtgttcaacagaaaatggccggtctccactcaagcgataaagttggcccaaagttctccataccgtcgcccacattttctaaaagttctagcgcaatttctgaggttactcagcccccaagctacgaagatgcagtgaagcagcagatgaccaggtctcagcaaatggacgagctgctggatgtgcttatagagtccggcgagatgcctgcggatgcgcgagaggaccacagttgcctccagaaagtgcctaaaattcccagaagcagccgttcccccactgcggtgctgactaaaccctctgcttctttcgaacaggcctcgtcaggcagtcagattccctttgacccctacgccacggactcagatgaacatcttgaagttttactgaattcacagtcaccactgggaaagatgtcggacgtgaccctgttgaagattgggagcgaggaacctcactttgacggaattatggacggattctccggtaaagctgcagaagatctgttcaatgctcacgaaatccttccagggcctcttagtcccatgcagacccagttcagccccagcagtgtggattctaacggcctgcaactgtcgttcaccgagtccccttgggagaccatggaatggcttgatctgaccccgcctaattcgacccccggattcagcgctctgacaacctcaagcccaagcattttcaacattgacttcctggacgtcactgacctgaatctcaactcctctatggacctccacttgcagcagtggtag

SEQ ID NO: 231485 - DNA, 1947 bp, synthetic construct
  misc_feature 1..1947: note = Description of Artificial Sequence: Synthetic coding sequence
  source 1..1947: mol_type = other DNA
ttcctgcagctccagattctgagccagcaacagcagcaacagcagcacagattctcttacctgggcatgcatcaggcacaattaaaggagcccaatgagcagatggtgaggaaccccaattcatcatctacaccgctatccaacacaccattatcaccagtaaaaaattcgttctccggccaaacaggggtctcatcctttaaaccaggaccactccctccgaacctcgatgatctgaaagtaagcgagctgcgacagcagctgcggattagaggcttacccgtctcgggtacaaagacagctctcatggacagacttaggccctttcaggattgtagtgggaaccccgtgcctaactttggtgacatcacaaccgtgacctttccagttactccgaacacgttaccaaattatcagtccagtagctctacctcagccttgtcaaacggcttttaccatttcggttccaccagttcttcccccccaatctctcccgctagctccgacctgagcgtggcgggttccctccccgataccttcaacgatgcatccccatccttcggccttcacccatcccctgtccacgtttgtactgaggaatccctgatgtcaagcttaaacggcggatccgtcccttcagagctcgacgggctagacagtgaaaaagataaaatgctggtggagaagcagaaagttataaatgagttgacctggaaactgcaacaggagcagaggcaagtggaagagctgcggatgcagctgcaaaagcaaaagagaaacaactgtagtgaaaaaaagcctttgcccttcttggctgcttccattaaacaggaggaggccgtttcttcctgtcccttcgcttcccaagtgcccgtgaagcgccagagtagtagctcagaatgtcacccccctgcctgcgaagctgcccaattgcagccgctcggtaatgcacactgcgtcgagtcctcagatcagacaaacgtcctctctagcacatttctctctccacagtgcagcccccagcactccccactcggcgcagtgaagtccccacagcacatcagcttgcctcctagccccaacaatccccacttcctgccatcctcctccggagcccagggcgagggccacagggtctccagccccatctcttcacaggtttgcacagcccagaatagcggggctcacgatggacatcccccaagcttttccccccatagtagctctctgcaccctccttttagcggcgcacaggcagacagttctcatggggcaggcggaaacccatgcccaaagagcccttgcgttcagcaaaagcagatgacaaggagtcagcagatggacgagctgcttgacgtcctgatagagagtggcgagatgcctgccgatgctcgggaagatcattcctgtctgcagaaagttccgaaaatcccacgctccagcagaagccctacagcagttctcaccaaaccaagcgcctccttcgagcaggcttcaagcggttcccaaatcccattcgatccatacgccacagactccgatgaacacctggaggtgttgctgaatagtcagtcaccactcggcaagatgagtgatgtgaccctcctcaagattggtagcgaagagcctcactttgatggtataatggacgggttctccggtaaggccgctgaggacctatttaatgcccacgagattctgccagggcctctgtcccctatgcagactcaattttcgcctagcagcgtggattccaatggactgcagctgagctttaccgagtccccctgggaaaccatggaatggctcgacctaacccctcctaattctacccccggatttagtgcattaactacttcctcccccagcatttttaatatcgatttcttggatgtgacagatttgaatcttaacagctccatggatctgcacctgcagcaatggtag

SEQ ID NO: 231486 - DNA, 1515 bp, synthetic construct
  misc_feature 1..1515: note = Description of Artificial Sequence: Synthetic coding sequence
  source 1..1515: mol_type = other DNA
atgaggttcttctgcgctcggtgttgtagcttcggacccgagatgccagccgtgcagctgctcttactggcatgtctggtctgggatgtaggtgcgaggacggcacaacttcggaaagcaaatgaccagagcggacgttgtcagtacacctttagtgtggcctcccccaacgagagcagctgcccggagcaaagccaagccatgtcggtaatccacaacctccagcgggactcttcgacccaaagactggatctagaagccacgaaagctaggctgagctcactggagtcccttttacaccaactaacactggaccaggccgctcggccacaggaaacacaggaagggcttcaaagagagctcgggacattgcgcagagagagagaccaactcgaaactcagacccgagagctggaaaccgcctactctaatctgctcagggacaaatccgttctcgaggaggagaagaaaaggctcaggcaggaaaacgagaacctggctcggagacttgagagtagttctcaggaggttgcgcgactgcgtagagggcaatgtcctcagactcgtgacaccgctcgcgcagttcctcccggttccagggaggtgtccacctggaacctcgacacgctcgccttccaggaactgaaatccgagcttactgaggtccccgcatcacggattctcaaagagagtccctctggctacctgagaagtggggagggtgataccggatgtggtgagctggtctgggtcggagagcctctcaccctgaggactgccgaaactattaccggcaaatacggggtttggatgcgcgaccccaagccaacgtatccttacacccaggagacaacttggcggatcgatacggtaggcacagacgtccggcaggtgtttgagtacgatcttattagtcagttcatgcaggggtacccatcaaaggtgcacatccttccaaggcctctcgaaagcactggcgctgtagtctactccggctctctttattttcaaggtgccgagagccgcacagtgatcagatacgaactgaataccgagaccgtcaaagccgagaaggaaattcctggggctggctaccacggtcagttcccatattcctggggaggctatacagacatcgacttggctgtcgatgaggcaggactttgggtgatttattctacagacgaagccaaaggcgctatcgtactcagcaaactgaatcctgaaaatcttgagctggaacaaacgtgggaaaccaacatccggaagcagagtgtcgccaatgcgtttataatttgcggaaccctgtataccgtttcttcttacacgagtgccgatgcaacagttaactttgcatatgatactggcacggggatttccaagaccttgacgatcccattcaagaatcgctacaaatatagttccatgatcgactacaatccattggagaaaaagctttttgcatgggacaatctgaatatggtcacttatgacataaaactctccaagatgtag

SEQ ID NO: 231487 - DNA, 1374 bp, synthetic construct
  misc_feature 1..1374: note = Description of Artificial Sequence: Synthetic coding sequence
  source 1..1374: mol_type = other DNA
atgagattcttctgtgcaagatgctgcagctttggtccagagatgcccgctgtacagctgctgttgctggcctgcttagtatgggatgtcggcgcacggacagctcagctgcgcaaagccaacgatcagagcggaagatgtcagtacactttcagtgtggcgtccccgaacgaatcatcttgccctgaacagagtcaggctatgtcagtcattcataaccttcagagagactcctcaacacagcgcctcgacctggaagccactaaagcacgcctttccagcctcgagagtctgctaagagacaaatctgtgcttgaggaagagaagaagcggctacggcaagaaaatgaaaatcttgcccgacggctcgaaagcagttcccaagaggtggcccgtctcaggagaggtcagtgcccccagactagggacaccgcaagagcggtcccaccagggtccagggaggtctccacgtggaatctcgacaccttggcctttcaggagttgaagagcgaactgacagaggtccccgcaagccgcattttgaaagaatccccttccggctatttaaggagtggcgaaggcgatacaggctgtggcgagcttgtgtgggtgggcgagcccctaactcttaggacggctgagactataactggtaaatacggggtttggatgagagacccaaagcctacctatccatacacgcaggaaacaacgtggcgaatcgataccgtcgggacggacgtaagacaagtgtttgaatacgacctgatctcgcagttcatgcaggggtacccgtctaaggtgcacattcttcccagaccactcgaatcgaccggtgccgtggtgtatagcggttccttatacttccagggggctgaaagtcgaacagtgattcgctatgagctaaacactgagaccgtaaaggcagaaaaggagattcctggggctggctaccatggccagtttccgtatagttggggcggatatacagatatcgacctggctgttgacgaagctggtttgtgggtaatctatagcacagacgaggccaagggcgctatcgtccttagcaaactgaatcctgagaatcttgagctggaacagacctgggaaaccaacatccgcaagcagtcagtcgccaacgctttcattatttgtggaaccctgtatactgtctcaagctacacttctgctgatgccactgtcaattttgcttatgacaccggcaccggcatctccaagacattgaccatcccctttaagaatcgctataagtattcgtctatgatcgattacaatcctcttgaaaagaaactgttcgcctgggataacctaaatatggtgacttacgacatcaaattaagcaagatgtag

SEQ ID NO: 231488 - DNA, 1314 bp, synthetic construct
  misc_feature 1..1314: note = Description of Artificial Sequence: Synthetic coding sequence
  source 1..1314: mol_type = other DNA
atgtccgttatccacaaccttcagcgcgatagcagtactcaacgcctcgacctcgaagcgaccaaggcaaggctcagctctctggagagtctgctccatcaattgacattagatcaagctgccaggccacaggaaacccaggaaggcctgcagagggaactgggcacattgcgccgtgagcgtgatcagttagagactcagactagagagttagagaccgcctactccaatctgctgcgcgacaaaagcgtactggaggaggagaaaaagagactgaggcaggaaaatgaaaacctggccagacgactggagtcctcctcacaggaggtggcgagactgcggcgagggcagtgtccacagacaagagatactgctcgggctgtccctcctggcagccgtgaggtgtccacctggaatttggataccttagcgttccaggagttgaaatcagagctcacagaggtccccgcttctaggatccttaaagagagtcctagtggatacttacgatccggtgaaggggacactggctgtggcgagctggtgtgggtcggcgagccactgactctgcgcacggccgagacaatcacaggcaaatatggggtctggatgcgggatcctaaacctacctatccctatactcaggagaccacttggcgcattgataccgtggggacagacgtgagacaagtatttgagtacgaccttatctcacagttcatgcaggggtacccatcaaaggtacacatcctaccccgaccgttagaaagtactggagcagtggtttactcggggtctctttatttccagggggcagagtcccgcacggtcattagatacgaactgaatacagaaacagtgaaggcggagaaagagattcctggagcaggttaccacggacagttcccttattcctggggaggttacaccgacattgacctggccgtcgatgaggctggtctttgggtcatctacagcacggacgaagctaagggcgctatcgtgctgagcaaactgaaccccgagaatttagagctggaacagacttgggaaactaatatccggaagcagtcggtggccaacgcgttcatcatctgcggaactctctacactgtaagctcgtacacatccgcagacgctacggtgaatttcgcttacgacacagggaccgggatcagcaaaacactaaccatcccattcaagaatcggtataagtactctagtatgatagattacaaccccttagaaaagaagctattcgcctgggacaaccttaatatggttacctatgacattaagcttagcaagatgtag

SEQ ID NO: 231489 - DNA, 1035 bp, synthetic construct
  misc_feature 1..1035: note = Description of Artificial Sequence: Synthetic coding sequence
  source 1..1035: mol_type = other DNA
atgcggtttttctgtgctcgctgttgcagcttcgggccagaaatgcctgctgtgcagctgctgctgctggcttgcctggtgtgggacgtgggggctcgcactgcccagctgcgaaaagccaacgatcagtcggggcgttgccagtatacctttagtgtggcatcccccaatgagagcagctgtcctgaacagtcacaggctatgagcgttatccacaatttgcaaagagactctagtacccagagactggatctagaggcaacaaaggcacggctgagtagtcttgaatcactgttgcatcagctgaccctggatcaagccgctaggcctcaagagacacaggaaggacttcagagggagctggggaccttgcgacgcgagagggaccagctggagacccaaaccagggagcttgagaccgcatacagcaacctcctccgcgataagtcagtcttggaggaggaaaagaagcgcctgcgacaggagaatgagaatctcgctcgtcggctggagtcaagctcgcaggaagtggcgcgactcagacggggacagtgccctcaaactagggatactgctcgcgctgtcccgccaggctcccgagaggtgagtacatggaacctggatactctggcgtttcaagagctgaagagtgagctgaccgaggttccagcgagccgaattctcaaggagtccccatccggctacttgagatcaggcgagggcgataccggctgcggggaacttgtctgggtgggagagcctctgaccttaaggaccgccgagacaatcaccgggaaatacggcgtgtggatgagggaccctaagccgacgtatccctatacccaggagacgacctggcgcatcgatactgtgggaacagacgtacgccaggtcttcgagtacgacctgatttcgcagttcatgcagggctacccaagcaaagtgcacatcttaccaagacccctagagtccaccggcgctgtggtctacagcggatctctgtattttcgagcgttgtctccagaactgtcctag

SEQ ID NO: 231490 - DNA, 1521 bp, synthetic construct
  misc_feature 1..1521: note = Description of Artificial Sequence: Synthetic coding sequence
  source 1..1521: mol_type = other DNA
atgggcaggaaaaagatacagataacccgcattatggatgaaaggaatagacaggttaccttcaccaaacgcaaatttgggctgatgaagaaggcctatgaacttagtgtcctgtgtgattgtgagatcgcattaattatcttcaacagctccaacaagctctttcagtacgcgtccacagatatggacaaggtcctgctgaaatacacagaatataacgaacctcacgagtcacggactaattccgacatcgtggagaccctgcgaaagaagggactaaatggatgtgagagtccagatgccgatgattacttcgagcacagccctctaagtgaggatcgcttctccaagctgaatgaggacagtgacttcattttcaagaggggacctcccggtctgccccctcagaatttcagcatgagcgtcactgtcccagttacatcccccaacgccctttcctacactaacccaggctccagcctggtgagccctagtctggcagcatcttcaaccctgactgacagttccatgttaagtccccctcagaccacactgcacaggaacgtgagcccaggggctccgcagcgaccaccatccacaggaaacgccggaggaatgttgagtaccactgacctcacggtaccaaacggggctggcagctccccagtgggaaacgggttcgttaactcgagagcgtccccgaacctcattggcgctacaggtgctaatagtctgggtaaggtgatgccgaccaaatcaccaccaccgcctggcggaggaaacttaggaatgaactctcgcaagcctgacctcagagtggtcattcctccttcttccaagggcatgatgccgccattatatttgaagcggcaactgaacactaacaatactcagcggatctctagctcccaggctacccagcccctcgccactccggtggtaagtgtgacaacaccttcccttcctccccagggtcttgtatactcggcgatgcccacagcctacaataccgattattctctgaccagcgcagacctttccgccctccagggatttaattctccgggaatgttgagcctgggccaggtttccgcatggcagcagcatcaccttggacaggccgcactgtcatccttggtggccggaggtcagctgtctcaagggagcaatctaagtataaacacgaatcaaaatatttccattaaaagcgaacctatctccccccctagagacagaatgacaccaagtggctttcagcaacagcagcagcagcagcagcaacagcagcctccccctcccccacagccccaacctcaaccaccccagccacagcccaggcaggaaatggggagatctcccgtcgattcccttagtagcagcagtagtagttacgatggttctgaccgtgaagatccgcgtggagatttccacagccccatcgtccttggtcggccacctaatacagaggatcgtgagtctcctagtgtcaaacgtatgagaatggacgcctgggtgacctag

SEQ ID NO: 231491 - DNA, 1500 bp, synthetic construct
  misc_feature 1..1500: note = Description of Artificial Sequence: Synthetic coding sequence
  source 1..1500: mol_type = other DNA
atggggaggaagaaaattcagatcacccggattatggatgagcgcaatcggcaagtaacttttaccaagcggaaatttggcctgatgaaaaaggcgtatgaactcagcgtgttgtgtgactgcgaaatcgcccttatcatatttaactcatcaaacaaactctttcagtatgcatctaccgatatggataaggtgcttctgaagtacaccgaatacaacgaacctcacgagtctagaactaattccgacatcgtggaagctctcaacaagaaggaacaccgcggatgcgattctcctgatcccgacacatcctacgtgcttacaccccacaccgaagagaagtataaaaaaatcaacgaggagtttgataacatgatgagaaaccataaaatcgcacccggtttgcccccacagaacttctcaatgagtgtgactgtgccagttacttcaccgaacgccctcagttataccaacccaggtagctccctcgtgagcccaagcctcgctgcaagtagcactctgacagactccagtatgctgtcaccaccccagactaccctgcaccgcaatgtgagtcctggtgctcctcagcgccctccatccaccggaaatgccggtggtatgttatctaccaccgatttgacagtccctaacggagccggttcttccccagtcggaaatggattcgtaaactcaagggcctcccccaacctgatcggcgctaccggcgcaaatagtctcgggaaggtgatgccaacaaagtcaccaccaccccctgggggtgggaacttgggtatgaacagtcgcaaacccgatctgcgagtcgtgataccccctagctctaaaggcatgatgccgcctcttaacactcagaggataagttcatcacaggccacacagcccttagcaacacctgtggtgagtgtgacaaccccttctctgcccccacaagggctggtctacagcgctatgccgacggcgtataacaccgattacagcttgacctccgccgatttgtctgccctgcagggattcaacagtccaggaatgttaagtctcggccaggtgtcagcctggcagcagcatcacctggggcaagcagctctgtcctcactagtcgccggaggacagctgtcccagggaagcaacctgagcatcaatacaaatcagaacatctcaattaaatccgagcccatttcacccccacgggatcggatgaccccatcaggattccagcaacagcaacagcagcagcagcagcagcagcctcctccaccccctcagccacagccccagccaccccagccgcagcctaggcaagagatgggcagatccccagtcgactcattaagttcaagctcatcatcatacgacgggagcgacagggaggaccccaggggggacttccactccccaattgttctgggcaggccccctaacactgaggatcgtgagagcccttctgttaagaggatgagaatggatgcttgggttacctag

SEQ ID NO: 231492 - DNA, 1290 bp, synthetic construct
  misc_feature 1..1290: note = Description of Artificial Sequence: Synthetic coding sequence
  source 1..1290: mol_type = other DNA
atggggagaaagaagatccagattacacgtattatggacgagcgaaatcgccagactctccgcaaaaagggtctcaatggttgcgagtcacctgacgctgacgattacttcgagcacagtccgctgtctgaggatcgcttcagtaaactgaacgaagattccgacttcatcttcaaaagaggaccccctggcctgcctcctcaaaatttctcgatgagtgttaccgtcccggtcacttcccctaacgccctttcctacaccaacccgggttcttctttggtgtcccctagtttagccgctagctccacactcaccgatagctctatgttgagccccccacaaacaacactccatagaaatgtctcacccggagctccacagaggccgccaagtaccggaaacgctggagggatgttatcaaccaccgacctcacagtgccaaatggggctgggtcctcccccgtcggaaacggcttcgtcaatagtagggcctctcctaacctgattggtgctaccggagccaactccctgggtaaggtgatgcctacgaaaagccctccaccacccggtggcggtaatctcgggatgaatagtaggaaacctgacctcagagtcgtgataccacccagttcaaaaggcatgatgccacccttgaatactcagcggatttcatcatcccaggccacacagcccctcgctacccccgttgtttccgtaaccaccccctccctgccaccccagggattagtgtatagtgcaatgcctactgcatataacacggactacagtcttacatcagccgacttgtctgcgctccagggattcaattcccccggaatgttgagcctaggacaagtatccgcctggcaacaacaccacctgggccaggctgccctatcaagcctggttgcaggtggccaactttcccaggggagtaatctctctatcaatacaaaccagaatatctcgatcaaatcggaaccaattagcccgcctcgcgacagaatgactccctccggttttcagcagcagcaacagcaacagcaacaacagcagccacctccgccaccgcagccgcagccacagcctcctcaacctcagcccaggcaggaaatgggaaggagtcccgtcgatagtttaagtagttcttcatcaagctatgatgggagcgaccgggaggatcctaggggggacttccactcacccatcgtgttagggaggccacctaatactgaagatcgcgagtccccttccgtaaagcggatgagaatggacgcctgggtcacttag

SEQ ID NO: 231493 - DNA, 1494 bp, synthetic construct
  misc_feature 1..1494: note = Description of Artificial Sequence: Synthetic coding sequence
  source 1..1494: mol_type = other DNA
atgggcagaaaaaaaattcagatcactcggattatggacgagcgcaatcgccaggtgactttcacgaaaaggaaattcggactaatgaagaaggcctatgagctgtcagtactctgcgattgtgaaatcgcacttatcatatttaactcttcgaataaattattccagtatgctagcactgatatggacaaggttctcctgaagtataccgagtataatgagccgcacgagtctaggaccaattccgacattgtcgaaactctgaggaagaagggtttgaatggctgcgaatccccagatgccgatgattattttgaacactctccccttagcgaggacagatttagtaaactaaacgaagatagcgattttatttttaagcgaggccctccaggcctgccccctcaaaacttcagcatgtccgtcaccgtcccggtaacctctccaaacgcgctgagctacacgaatccaggatcttctctggtatcaccatctctggccgcatcatcaacccttactgactcatcaatgctgtctcccccacagacaacgctgcaccgtaacgtgtctcccggagcccctcagagacctccaagcaccggcaatgcgggaggcatgctctccaccacagatcttacagttcctaatggggcagggtccagcccagtggggaatggctttgtgaactcccgagctagccccaacctcattggtgcaacaggggctaattctctgggcaaggtgatgcccaccaaaagtccccctccgcctgggggtgggaacctcggcatgaactcacgcaagcccgaccttagggttgtaattccacctagtagcaaaggcatgatgcccccactaaatacgcaacgcatcagttcctcacaggccacccaacctctggcaacaccagtggttagtgttacgactccctcactgcctcctcagggcctggtctatagtgctatgcctacagcctacaacactgattatagcctgacaagcgccgatctgtctgccctccaaggcttcaactcccccggaatgctttctctgggacaggtgtccgcatggcagcagcaccacctgggacaggccgcactgtccagtctggtcgctggagggcaattgtcacaggggtcaaatctctcaatcaacacaaaccagaacatttcaatcaagtctgaaccaatctctccccctagagacaggatgactccgtctgggtttcagcaacagcaacagcagcagcagcagcagcagccccctccccctccacagccccagccacaacctccccaaccccaaccccgtcaagaaatggggagatcaccggttgactctttatcttcaagtagctccagctacgatggctctgacagggaagatcccagaggtgattttcacagcccaattgttttggggagacctccaaatacagaggatagagaatcaccgtcagtgaagagaatgaggatggacgcctgggtaacatag

SEQ ID NO: 231494 - DNA, 1494 bp, synthetic construct
  misc_feature 1..1494: note = Description of Artificial Sequence: Synthetic coding sequence
  source 1..1494: mol_type = other DNA
atgggtcggaaaaagattcagattactcgcattatggatgaaaggaaccgccaggtgacattcacaaaacgcaagttcggcctcatgaagaaggcctacgaactctccgtgctgtgcgattgcgaaattgcgctcatcatctttaactcatcgaataaactgttccagtacgcttcaacggacatggataaggtattactgaagtacacagaatataacgaaccccacgagagccgtactaactctgatattgttgagactctcaggaagaagggtctgaacggctgcgagtcccctgatgccgatgactactttgaacactcgcctctgtccgaggaccgtttcagcaagttgaatgaggatagcgactttatcttcaagcggggaccacctggattgcccccacaaaacttcagcatgagtgttactgttcccgtgacaagtccaaacgccctctcgtacaccaaccccggtagttcattggtgagcccaagcctcgccgcttcaagcaccctgacagactcctcaatgctctccccgccacagaccacactccatcgtaacgtctcccccggtgctccccagcgccctccctcaaccggtaatgctggaggcatgctcagtaccacagatctcacagtcccaaatggggctggctcctcaccagttggtaatggcttcgtcaattccagggcctccccaaatttaataggcgcaactggagcgaatagcctcgggaaggtcatgcctactaaatccccgcctcccccaggcggaggaaatctgggtatgaactcacggaaacctgacctgcgagtggtcatccccccatctagcaaaggcatgatgcccccattgaatacccagcgtatttcctcctcacaggctactcaacccttagctacacccgtagtgagcgtgacaaccccctccctgcccccacaggggttggtatattcagctatgcccactgcttataacacagattattctctgacttctgctgatctgagcgcccttcagggctttaactccccgggaatgctgtctctcgggcaggtgagtgcctggcaacagcaccacctcgggcaggccgctctgagttctctggttgccggtggccagctgtcccagggttcaaatctgtccattaacaccaaccagaacataagcatcaagagcgagccgatatccccaccacgcgacagaatgacaccttccgggttccaacagcagcagcagcagcaacagcagcaacagccgccacctccacctcagccccagccccagccaccgcagccacagccacgccaagagatggggaggtcgcccgtggattcactatcaagttcatcaagcagttacgatggctccgaccgcgaagaccctcgcggtgattttcattcccccatcgtgctagggcgaccccctaacactgaagacagggaatccccctccgtgaaacggatgaggatggacgcttgggtaacttag

SEQ ID NO: 231495 - DNA, 1518 bp, synthetic construct
  misc_feature 1..1518: note = Description of Artificial Sequence: Synthetic coding sequence
  source 1..1518: mol_type = other DNA
atgggcagaaaaaaaattcaaataacccggataatggacgagagaaaccgccaggtgacatttaccaaaaggaagttcggcttaatgaagaaggcttacgagctcagcgtgctttgcgactgcgagattgcactgattatcttcaactcaagcaataaactgttccagtatgccagcaccgacatggacaaagtactgttgaagtacaccgaatataatgagccgcatgaatcccgcaccaactctgatatcgtagaaacattacggaaaaaggggttaaatgggtgtgagtcgcccgatgccgacgactacttcgaacactccccattgagtgaggacagattctcaaagctcaatgaggacagcgacttcatctttaaaaggggaccacctggcctgccccctcagaatttcagtatgtccgtcactgtgcctgtgacatctccaaatgctctgtcttacacgaacccgggttcttcactggttagcccaagccttgctgcttcgagcaccttgaccgactctagcatgctgtctccccctcagactaccttgcatcggaatgtgtcacccggtgccccacagagaccaccgagcaccgggaacgccggagggatgttgtccacaacagacctgacagtgcctaacggtgcagggtcatctcctgtgggaaatgggtttgtgaattcaagagcatctccaaatctcatcggtgccacaggagcaaattcccttggaaaggtgatgccaaccaaatctccccctccacctggtggcggtaatctcggcatgaattcaagaaagcctgacctgcgagtggtcattcctccgagctctaaaggcatgatgcccccattatccgaggaagaggaactggaactaaacacacagagaatttcttcatcccaagcaactcaaccactggccactcctgtggtgtccgtcaccacacccagcctgccccctcagggcctggtgtattctgccatgcccacagcttataatactgactattccctaacgtcagctgatttgtccgctttacaggggttcaactctcccggtatgttgagtctcggacaggtcagcgcctggcagcagcaccacctgggccaggctgccttaagcagcctagttgctggcggacagctctcacaagggtctaatttgagcatcaacactaaccaaaatatcagcataaaaagtgaacccatcagccccccacgcgatcgcatgacaccgtcgggtttccagcaacaacagcaacagcaacaacagcagcagccccctccaccaccacagccccagccacagccccctcagcctcagcccaggcaggagatgggtagaagccccgtcgatagcttatcatcgtctagtagctcttatgacgggtctgatcgggaggaccctcgaggtgattttcattctcccatcgtgctaggcagaccacccaataccgaggaccgcgaaagcccttccgtaaagcggatgcggatggatgcctgggtgacttag

SEQ ID NO: 231496 - DNA, 117 bp, synthetic construct
  misc_feature 1..117: note = Description of Artificial Sequence: Synthetic coding sequence
  source 1..117: mol_type = other DNA
atgggaagaaagaaaattcagattacgcgcattatggatgagagaaaccggcaggtgacatttacaaaacgaaaatttggacttatgaaaaaagcatacgagctcagcgttctctag

SEQ ID NO: 231497 - DNA, 1314 bp, synthetic construct
  misc_feature 1..1314: note = Description of Artificial Sequence: Synthetic coding sequence
  source 1..1314: mol_type = other DNA
atgggacgcaaaaaaatccagattacgcgcattatggacgagcgaaatagacagacgttgcggaagaagggactgaacggctgtgaatcacccgacgctgatgactatttcgagcattcccctctgagcgaagatcggtttagcaagctcaatgaggattccgatttcatatttaaacgcggacccccaggcctaccccctcagaacttctccatgagcgtcacagtgccggttacttcacccaacgccctgagctatacaaatccaggtagctctctcgtgtcgccatctctcgctgcgtcatctacgcttacagacagttccatgttgagcccaccacagaccactctccacaggaatgtctccccaggggctccgcagcgcccaccgtctaccgggaatgccggtggaatgctgtcaaccacagatctgactgtgcccaatggcgctgggagcagcccggttggcaacggatttgtgaactcccgggcatcgcctaatttgatcggagctaccggggcaaacagcctgggcaaggtgatgccaaccaaatctccccctcccccaggcggaggaaatctgggaatgaacagcagaaagcctgacctccgagtcgttattcccccttcttctaaaggcatgatgcctcctctgagtgaagaggaggaacttgaacttaatacacagcgcatatcatcatcccaggctacacagcccttagccacccctgtggtgtcagtaaccactccctccctcccgccacaaggactcgtgtattccgccatgccaaccgcctataacacagattactcattgacttcagccgatctgtctgctctgcaggggttcaactcaccaggaatgctgtctctgggtcaggtgagcgcgtggcagcagcaccatcttggccaggctgcactaagttcccttgtcgctgggggacagttaagccagggctccaacctatccatcaatacaaaccagaacatcagcataaaatccgaaccaatctcacccccacgagacaggatgaccccatcgggttttcagcagcagcagcagcagcagcagcagcagcagccgcctcctccaccacagccacagccccagccaccacagccacaaccccgtcaggaaatgggacgctcgccagtcgacagcctctcatctagcagctccagctatgacggaagcgatagagaagaccccaggggcgacttccatagtcccatcgttctaggcaggcccccaaataccgaggaccgcgagtcgccctctgtgaaacgcatgcggatggacgcctgggtgacatag

SEQ ID NO: 231498 - DNA, 234 bp, synthetic construct
  misc_feature 1..234: note = Description of Artificial Sequence: Synthetic coding sequence
  source 1..234: mol_type = other DNA
atgggtcgaaaaaagattcagataacaagaattatggatgaacggaataggcaggtgacatttacgaaacggaaatttggtcttatgaaaaaagcctacgaactaagtgttttgtgcgattgcgagatcgcattaattattttcaattctagcaataagctgtttcagtatgcttcaactgacatggataaggttctgttaaaatacacggagtacaatgagccccacgaatag

SEQ ID NO: 231499 - DNA, 258 bp, synthetic construct
  misc_feature 1..258: note = Description of Artificial Sequence: Synthetic coding sequence
  source 1..258: mol_type = other DNA
atgggtagaaaaaagatacagattacccgcataatggatgaacgtaatcgacaggtaacctttactaagaggaagtttggcttgatgaagaaggcctacgaactatccgtgctctgcgattgcgagatcgccttaatcattttcaacagcagcaacaagctgttccagtacgcctcaacagacatggataaagtgctacttaagtacaccgaatacaatgaaccacacgaatcccgcaccaacagcgacatcgtatag

SEQ ID NO: 231500 - DNA, 1107 bp, synthetic construct
  misc_feature 1..1107: note = Description of Artificial Sequence: Synthetic coding sequence
  source 1..1107: mol_type = other DNA
atggggagaaaaaagattcaaatctctcgaatactggaccagcgcaatcgccaagtgactttcactaagagaaaattcgggctgatgaagaaggcttacgagttatcagtgctgtgtgactgcgagatcgccctgattatatttaactcagcaaacagactgtttcagtatgccagcactgatatggatcgcgtgttgctaaagtataccgagtacagcgagccccatgaatcccgaaccaatacagacattctcgaaacactgaaaagacggggtatcggccttgatgggcctgaactggaacctgatgagggcccagaggagccaggcgaaaaatttcgaagactcgctggcgagggaggcgacccagccctgcctaggccgaggctctatcctgcagctcccgctatgcctagtccagatgtggtctatggagcattaccccctcccggttgtgacccgtcagggctgggcgaagccctccctgcccaaagccggcctagtccattccgcccagctgcaccaaaggctggacctccgggtttggtgcacccactgttcagtccttcacacctcacctcaaagactccccctcccttatatctgccgactgaggggagacgctccgatttgcctgggggacttgcaggccctagggggggtctcaatacaagcaggtctttgtactcaggccttcaaaatccctgctccacagctaccccaggcccaccactcggcagctttccatttctgccaggaggtcccccagagtatggcctaggcgatcctccacctcccccagggctgctgcagcctccaacacttgctccttggcagccatccaggggagacggccctcctgccgtgtcctctcaaccgtctggcggtaggtccctcggagaagagggacctccaactagaggagcctccccgccaacccctccagttagcatcaaaagtgagcggctgtccccggctccagggggaccaggagattttccaaaaacatttccataccctcttctgctggcgcgatctttggccgaaccattgagacccggaccagcacttagacgcctgcccttagccgatggatggcctaggtag

SEQ ID NO: 231501 - DNA, 894 bp, synthetic construct
  misc_feature 1..894: note = Description of Artificial Sequence: Synthetic coding sequence
  source 1..894: mol_type = other DNA
atgggccgaaaaaagattcaaatttcccgtatcctggatcagagaaatcgccaggtaacatttaccaaaaggaagttcggtctgatgaaaaaggcgtatgaattgtccgtgctgtgtgattgcgaaattgctctgatcatctttaacagcgccaacaggctgttccagtacgcatcaacagacatggacagagttctgctcaaatacaccgagtactccgagccacacgagagtagaacgaatacagacattctcgaggtgcctcagaccctgaaaaggagagggatcggcctggatggtccagaattggaaccggacgaggggccagaggaacccggtgaaaagttcaggcgccttgcaggggagggcggagacccggctctgcctagaccacggctgtaccccgcagcgccagccatgccttccccggacgtggtttacggtgcactgcccccaccaggctgtgatccctcaggcctcggcgaggccctcccagcacagtcccggcctagtccatttcggccagcagctccaaaagccggaccacctggactcgtacacccactcttttctccctctcatttgacctcgaagacccctcctcccctctatctgcctacagaggggagacggagtgatctgcctggagggctagccggacctcgtggtggactcaatacttctcgttcattatatagcgggctccagaacccctgcagtacagctacaccgggacccccattagggtcattcccctttcttccagggggacccccagagtatggattgggcgaccccccacccccacccggattgcttcagcccccaacactggccccatggcagccttcacggggagatggccctcccgctgtgtcgagccagccacgatag

SEQ ID NO: 231502 - DNA, 1107 bp, synthetic construct
  misc_feature 1..1107: note = Description of Artificial Sequence: Synthetic coding sequence
  source 1..1107: mol_type = other DNA
atgggcaggaaaaagattcagatttctagaatcctggatcagcggaatcggcaggtcaccttcacaaagagaaaattcggcctgatgaaaaaggcctatgaactgtccgtgctgtgtgactgcgagatcgcactcatcatctttaattctgctaacagactctttcagtacgcttccacagatatggaccgggtgttgttgaaatacacagaatactccgagccgcatgaatccagaacaaatacagatattctggagacactaaaacgtcggggtatcgggctggacggacctgaactggagcccgacgagggacccgaagaaccgggagagaaatttcggaggttggctggggagggaggagatccagctcttcctagacccagactgtatccagccgctcccgctatgccatctccagatgttgtgtacggcgctctccccccaccgggttgcgacccctccggcctgggggaagctctccctgcacagagcagaccgagcccttttcgaccagcagcgccaaaggctggccctcctggactggtgcatcctctgttctcaccgtcccatctgacttccaagacaccacccccattgtacctgcccactgagggcagaagatcggacttgcccggaggtctggcagggccacggggaggtctaaacacatcccgctcactgtattccgggctgcagaacccctgttctaccgctacacctgggccaccgttgggctcttttccgttcttaccaggaggtccacctgagtatggactcggggacccaccgccaccccctgggttgttgcaaccccctaccctagctccttggcaacccagccgcggtgatggaccccctgccgtatcttctcaaccaagcggtgggaggtccttaggagaggagggacccccaacacggggagcctcccctccaacacctcccgtcagcatcaagtccgaacgcctcagccccgctccaggaggcccaggcgactttccgaaaacattcccttatcccctgctgttagctcggagcctcgccgagccactgcgacctgggcctgctctgcgacgtctgccgcttgccgatggttggccacgctag

SEQ ID NO: 231503 - DNA, 1098 bp, synthetic construct
  misc_feature 1..1098: note = Description of Artificial Sequence: Synthetic coding sequence
  source 1..1098: mol_type = other DNA
atggggagaaaaaaaatccagatatccagaattctcgaccagcggaatcgacaagtcacgtttaccaaacggaagtttgggctgatgaaaaaagcatacgagctcagtgtactttgcgactgcgaaattgcactgatcattttcaacagtgccaacaggttgttccagtatgcatccactgatatggatagggtgctgctgaagtataccgaatacagcgagccacacgagtcccgtacaaacactgatattttggaaactcttaagcggcgaggcatcggccttgatggcccagaacttgaacccgatgaaggccctgaggaacctggagagaagtttcgacggctggctggagaggggggagaccccgcactgcccagacctcggctgtaccctgcggctcctgctatgccttctcctgacgtagtgtacggtgcccttccccctcctggctgtgatccttccgggctaggggaggctcttcctgcccaaagccggccatctcccttccggccagctgcccctaaggccggtcccccaggactggtacaccccctcttcagcccatctcacctcacatccaagacaccccctcccctctacctccctactgagggtcgcagatctgaccttcccggaggtctcgctggccctcggggtgggctgaacacttcaagatctctttattcgggcctccagaacccatgctccaccgccacaccaggcccaccactcggctctttccccttcttaccgggagggccaccagtgggagcagaagcctgggcacgaagggtccctcaaccggctgcccctccacgcaggccaccacagagcgcctctagtctaagtgctagtctccgaccccctggagcgcctgcaacctttcttaggccatcccccataccctgcagctctccaggaccctggcagtccctttgtgggctcggtcctccttgcgccggatgcccttggccaactgctggtcctgggagaaggtccccaggaggcacctctcccgagcgctctccaggaaccgcgagggccaggggggaccctacctctcttcaggcttccagcgagaaaacccagcagtag

SEQ ID NO: 231504 - DNA, 1392 bp, synthetic construct
  misc_feature 1..1392: note = Description of Artificial Sequence: Synthetic coding sequence
  source 1..1392: mol_type = other DNA
atgggcagaaagaagattcagatcactaggattatggacgaacgaaatcggcaggtaacctttaccaaacggaaattcggccttatgaagaaggcctacgagctgagcgtattgtgtgactgcgagatcgcgctcattatatttaactcaaccaacaagctgttccagtatgctagtacggacatggacaaggtgctcctcaagtacacggagtacaacgagccccatgaaagtaggacgaactccgacatagtggaggccttgaataaaaaggagaataagggctgcgagagccccgatccagacagctcctatgccttaacccccaggactgaggaaaagtataagaagatcaacgaagaattcgacaatatgattaagtctcataaaatccccgctgtcccacccccaaactttgaaatgcccgtgtccatcccagtctcctcccataatagtctggtgtactccaatccggtctctagtctcggcaatcccaatttgctgccccttgcacatccctcgctgcagagaaactctatgtcgccgggtgtcacccatcgccctcctagcgccggaaataccggcggtttgatggggggtgacctcacctctggtgctggaaccagcgctggtaatgggtatggcaatcctcggaattcacctggactactcgtgtccccagggaacttgaacaagaatatgcaggcaaaaagccccccacctatgaacctcgggatgaacaataggaagcctgatcttcgagtccttattccacccggaagtaaaaataccatgcctagcgtgaatcaacgtatcaacaactctcaatctgcgcaaagcttggctacacccgtggtttccgtcgccactcccactcttccgggacaggggatgggaggatatccttccgcgataagcaccacctatggcaccgaatattctctgtcctccgctgacctcagcagtctgtcaggctttaatacagcctctgccttgcacctgggctctgtgacaggttggcaacaacagcatctgcacaatatgcccccatccgccctctctcaattgggtgcctgcactagcacccatctgtcccagagctcaaacctgagcctgccttctacccaatctctgaacataaaatcagaaccggtgtcacctccaagggaccgcacaacaaccccctctagatacccccagcatacccgccacgaagcaggaagatctcccgtggattctctttccagttgctcatcatcttacgatggtagcgatcgcgaggaccaccggaacgaatttcattctccaattggcctcaccaggccaagcccagatgaacgggaaagcccttctgttaaacgaatgcgactgagcgaggggtgggccacctag

SEQ ID NO: 231505 - DNA, 1422 bp, synthetic construct
  misc_feature 1..1422: note = Description of Artificial Sequence: Synthetic coding sequence
  source 1..1422: mol_type = other DNA
atggggaggaagaagatccagataacacggataatggatgaacggaaccgccaggtgacttttactaaacgtaagtttgggcttatgaagaaggcctacgagctgagcgtgctgtgtgattgcgaaatcgctctgatcatctttaattccaccaacaaactgtttcagtacgctagcacagacatggacaaggtactgttaaaatatacagaatataacgaaccacatgagtcccgtacaaattctgacatcgtagagaccttacgcaagaaagggctgaacgggtgcgattcccccgaccccgacgctgatgactccgtgggccactctcccgagtccgaagacaagtacagaaaaataaacgaagatatagatcttatgattagcagacaacgtttgtgcgccgtaccaccacccaatttcgagatgccagtgtccatcccggtatccagtcacaacagtctagtttactccaatccagtgagttctcttggaaatccaaacctgctgccattggctcatcccagcttacagcggaactcaatgtcgcccggagtaactcatcgacccccatccgccggaaacaccggcggtcttatgggaggagacctgacatcaggagcaggaactagcgctggcaacgggtatggcaatccgcgtaattccccaggattgctggtttcgcccggtaatctgaataagaatatgcaggctaagtcccctcccccaatgaatttgggaatgaataacaggaagccagatctccgggttttgattccgcctggctctaaaaatacaatgccgagcgtcagcgaggatgttgacttgctgctcaaccagaggatcaataatagccagagcgcacagagcctcgcaacgcctgtggtgagtgtggctacacccacccttccaggtcagggtatggggggatacccatcagcaatttccaccacgtatggcacagagtactctctttcctctgcggacctctcgtccctgtctggtttcaacaccgcttctgccctccatctgggttccgttactgggtggcagcagcagcacttgcacaatatgcccccatctgcactctcacagctcggagcctgtacgtccactcatctgtctcagagtagtaatctgagcctgccttctacacagtccttaaatattaaatccgaacccgtgtcaccccctcgggaccgcaccacaactccgtccaggtatccgcagcacaccaggcacgaagccggtcgctcccccgtagattcccttagcagctgttctagttcttatgacggcagcgatagggaggaccatcgtaacgaatttcactcccctatcggcttgacaaggccctcccccgatgaaagggaatctcctagtgtgaagaggatgagactgtcagagggctgggccacctag

SEQ ID NO: 231506 - DNA, 297 bp, synthetic construct
  misc_feature 1..297: note = Description of Artificial Sequence: Synthetic coding sequence
  source 1..297: mol_type = other DNA
atgggccgaaaaaaaattcaaattaccagaatcatggatgaacggaacagacaggtaactttcacaaaacgcaaattcggcttgatgaagaaggcctacgagctatcagtcctctgcgattgtgagattgcgctcattatcttcaattctacaaataagctgtttcaatatgcgagtactgatatggacaaggttcttctcaagtatactgaatacaatgaaccccacgagtctagaactaattccgatatcgtcgagacactgagaaagaagggattgaatggttgtgactcttag

SEQ ID NO: 231507 - DNA, 390 bp, synthetic construct
  misc_feature 1..390: note = Description of Artificial Sequence: Synthetic coding sequence
  source 1..390: mol_type = other DNA
atggggaggaagaagatccaaatcacaaggatcatggatgaaaggaatcgccaggtgaccttcactaaaaggaagtttgggctaatgaagaaggcctatgaactgtcagttctgtgtgattgcgagatcgctctgatcattttcaactctaccaataagttgtttcagtacgccagcacagacatggacaaagtcttgctcaagtacaccgaatacaacgaaccacacgagagtagaaccaatagcgatatagtggagacacttagaaaaaaagggctcaatgggtgtgattcccctgaccccgatgctgatgacagcgtgggacactctcccgagtcagaggacaagtacaggaagatcaacgaagacattgatcttatgatcagttag

SEQ ID NO: 231508 - DNA, 264 bp, synthetic construct
  misc_feature 1..264: note = Description of Artificial Sequence: Synthetic coding sequence
  source 1..264: mol_type = other DNA
atgggacgcaaaaagattcagatcactcgtattatggatgagaggaacagacaggtgacatttactaagcgaaaatttggcctcatgaaaaaggcctatgagttgtcagtgctgtgtgactgcgagatcgccttgattatttttaatagcacaaataaactgttccagtatgcaagcacagacatggacaaagtgttgttgaaatataccgaatacaatgaacctcatgaaagccgaacgaattctgatatagtggagacctag

SEQ ID NO: 231509 - DNA, 1422 bp, synthetic construct
  misc_feature 1..1422: note = Description of Artificial Sequence: Synthetic coding sequence
  source 1..1422: mol_type = other DNA
atgggaaggaaaaagattcagattacaagaataatggatgaaagaaacaggcaggtgactttcactaagaggaaatttggcctgatgaagaaagcttatgaactgagcgtgctctgtgactgcgagattgcactgattatctttaattccaccaataaactgttccagtatgcaagtacggacatggacaaggtacttctgaagtacacggagtacaacgagccacacgagtctcggaccaactccgacatcgtggaaacactccgcaagaagggactcaatggatgcgactcgccggatcctgatgccgatgactctgtgggtcactcccctgagtctgaggacaagtatcgaaaaatcaatgaggacattgatctgatgattagtaggcagcggctgtgtgcagttcctccccctaatttcgagatgcccgtttccatacccgtttctagccacaattctctcgtgtacagtaaccccgtgtccagcctgggcaatccaaaccttctgcccttggcccaccccagcctgcagcggaatagcatgtctcctggggttacccataggccacctagtgccggaaacacaggcggactcatgggcggtgacctcacctcaggagcaggaacatcggccggtaatggatatgggaatcctagaaacagccctggtctcttagtatcccccggaaacctaaataaaaacatgcaggccaagagccccccaccaatgaacctgggaatgaacaatcgaaagcccgacctgcgggtgctgatccctccagggagcaaaaacactatgccgtctgtggtcattcagaactatatcttaaagaatcaacggattaacaactcacagtcagctcagtctctcgccacgcctgtggtttctgtggcaactcctactttacccggacagggcatgggaggatatccttccgcaatctcaactacctacggcactgaatactctctgtcatccgccgatctgagctccctcagcggttttaatacagcctcggccctgcatcttgggtcggtgactgggtggcagcagcaacacctacacaacatgcccccaagcgcactgagccagctcggagcctgtacgagtactcatctgtcccagagctccaatttgagcttacctagcacccaaagcctcaacataaaatccgaaccagtatctccacccagagatcggaccacgactccctcccgttacccccagcatacccgtcacgaagcaggcagaagtcccgtggactcccttagctcctgtagcagttcttacgatgggtccgacagagaagaccacaggaacgaatttcattcccccattggactgaccaggcctagtcccgacgaacgggaatctccttcagtcaaaaggatgcgccttagcgaggggtgggccacatag

SEQ ID NO: 231510 - DNA, 684 bp, synthetic construct
  misc_feature 1..684: note = Description of Artificial Sequence: Synthetic coding sequence
  source 1..684: mol_type = other DNA
atgggacggaaaaagatccagataacccgtatcatggacgaacgaaacagacaggtgacattcaccaaaagaaagttcgggctgatgaaaaaggcttatgagctgagtgtgctatgcgactgcgagatcgctctgatcattttcaactctactaataagttattccagtatgcgtccacggatatggacaaagttctcctgaagtataccgaatataatgaaccacacgagtctcgtacaaatagcgatatcgtggaagctctcaataaaaaggaaaataaggggtgcgaaagccccgatccagattcaagttatgccttgacgccacggactgaggaaaaatataaaaaaataaatgaggagtttgataacatgatcaaatcacacaaaattccagccgtgcctccgcctaattttgagatgccggtcagcatccccgttagcagccacaattctctggtatactccaacccggtgtcctcactcggtaacccaaacctgctccccctggcacacccctccctgcagcgcaactccatgtccccaggggtcactcatcggccaccttctgcaggaaacaccggcggactaatggggggagacttgactagcggagcgggtactagcgctggtaatggatatgggaatcccaggaattcacccggactgctcgtttctccttag

SEQ ID NO: 231511 - DNA, 363 bp, synthetic construct
  misc_feature 1..363: note = Description of Artificial Sequence: Synthetic coding sequence
  source 1..363: mol_type = other DNA
atgggcaggaaaaagatccagatcacacgaattatggatgagagaaataggcaagtaacttttaccaagagaaaatttgggctcatgaaaaaggcttatgagctgtccgtgctgtgtgattgtgagatcgcccttatcatctttaattcgaccaataaattgttccaatatgctagcacagacatggataaggtgctgctgaaatataccgaatacaatgagccccatgaatccagaaccaactcggatattgtggaagccctgaataagaaagaaaataaaggatgtgagagcccggaccctgactcaagctatgccctcacccccagaaccgaggagaaatacaaaaagattaatgaatag

SEQ ID NO: 231512 - DNA, 381 bp, synthetic construct
  misc_feature 1..381: note = Description of Artificial Sequence: Synthetic coding sequence
  source 1..381: mol_type = other DNA
atgggtagaaagaaaattcaaattacaaggataatggacgagcgcaaccgccaagtcactttcactaaaaggaagtttgggttgatgaagaaggcgtacgagctgtccgttctgtgtgactgcgagatcgctctgattatcttcaactctacaaacaaattgttccagtacgcgtcaaccgacatggacaaggtactccttaagtacacagagtataacgaaccccacgagtcccggaccaattccgacattgtggagactttgaggaagaaaggtctcaatggctgtgattccccggacccagatgcagacgactctgtcggccactcccctgagagcgaggacaagtacagaaaaatcaatgaggatatagacttatag

SEQ ID NO: 231513 - DNA, 87 bp, synthetic construct
  misc_feature 1..87: note = Description of Artificial Sequence: Synthetic coding sequence
  source 1..87: mol_type = other DNA
atgggtcgcaaaaagattcagatcaccaggattatggacgagcgcaatagacaggtgacattcactaagagaaaatttggattgtag

SEQ ID NO: 231514 - DNA, 1398 bp, synthetic construct
  misc_feature 1..1398: note = Description of Artificial Sequence: Synthetic coding sequence
  source 1..1398: mol_type = other DNA
atggggcgaaagaaaatccagattactcgcattatggacgaacgaaaccggcaagtgacatttactaagcgcaaatttggtctgatgaagaaagcttacgagctgagcgttctgtgtgactgtgagatcgctttgatcatatttaacagcacaaataagctgttccagtacgctagcacggatatggataaagtgttgctgaaatacacggagtataacgagcctcacgaatctcgaaccaactctgacatcgtcgagacactgagaaagaaggggctgaacggctgcgatagccctgacccagacgccgacgattctgtcgggcacagccccgaatccgaagacaaataccgtaagattaacgaagacattgacctgatgatttcacgtcagagactgtgcgctgtgccacctcctaacttcgaaatgcccgtttctatcccagtctcaagccataattcgctcgtctactccaatccagtgtccagccttgggaaccctaatttactgcctcttgcgcacccatccttgcagaggaattctatgagtcctggggtaacacaccggccacctagcgctggaaacacggggggtctgatgggcggtgacctcacaagtggcgctggtacatccgcgggaaatgggtatggcaacccacgaaattcccctggactgctggtatccccgggaaacttgaacaagaatatgcaggcgaagtccccacctcccatgaatctcggcatgaacaatagaaaaccggatctgagagtcttgatcccccctgggtcaaaaaacactatgccctccgtcaatcagcggatcaataatagtcagtccgcacaatccctggccacaccagttgttagcgtggccacccccacattgcctggacagggcatgggtggataccctagtgctatttccaccacttatggtaccgagtatagtctaagctcagcagacctgagcagtctctccgggttcaacacagccagcgccctgcatctgggctccgttacgggctggcagcagcaacatctgcacaacatgccaccatcggcgctgagccaactgggcgcatgcacaagcacacatctgagccagtctagcaacctgtcccttccctctacacagtccctcaacatcaaatctgaacctgtgtccccacctcgtgaccggacaactacgccttcacgctacccccaacacacccggcatgaagcaggcagaagtccagtggatagtctcagtagctgttcttccagctatgatgggagcgatcgtgaagaccatagaaatgagtttcatagcccaatcgggctgactcgccctagccctgacgagcgcgagagcccctctgtcaaacggatgcgtttatcagaaggctgggcgacatag

SEQ ID NO: 231515 - DNA, 729 bp, synthetic construct
  misc_feature 1..729: note = Description of Artificial Sequence: Synthetic coding sequence
  source 1..729: mol_type = other DNA
atgggtaggaaaaaaatacagatcacaaggattatggatgagcgtaaccggcaggtgaccttcactaagaggaagttcggccttatgaagaaggcgtatgaacttagtgtgctgtgcgattgtgaaatcgcactgatcatattcaattcaacgaacaaactcttccagtatgcaagtacagacatggacaaggtactgctgaaatacaccgaatacaatgaacctcatgagtcaaggacaaacagtgacatcgtggaggctcttaataaaaaggaaaataaagggtgtgaaagtcctgatccagactcctcttatgcgctcacgcctcgcaccgaagaaaagtataagaaaatcaatgaggaattcgataacatgatcaagtcacacaagatccccgcagtaccaccccctaatttcgagatgcctgtctctatccccgtgtctagccacaacagcttagtgtactccaacccagtttctagcttaggtaaccccaatctgctcccgctcgcacacccaagcctccaacgcaatagcatgagcccaggcgtcacccataggccacctagcgctggtaacacaggaggactgatgggaggcgatttgacttcaggagctggtacaagcgcaggaaatggatatggcaacccacgcaactcacctggtctgcttgtgtctcctggaaatctcaacaaaaatatgcaggccaagagccctcccccaatgtag

SEQ ID NO: 231516 - DNA, 1326 bp, synthetic construct
  misc_feature 1..1326: note = Description of Artificial Sequence: Synthetic coding sequence
  source 1..1326: mol_type = other DNA
atggggaggaagaagattcaaataaccaggatcatggatgaacgcaacagacaagtgacttttaccaaacggaagtttggcctcatgaagaaagcatatgagctcagtgtcctgtgcgactgtgagatcgcgttgattattttcaatagcacaaataagctgttccagtacgccagtacagatatggataaggtgttattgaaatacactgaatataacgagcctcacgaaagcaggacaaatagtgatatcgtggaaacactgaggaaaaagggactgaacggatgcgatagccctgaccccgatgcggatgactctgtgggccattcaccagagagcgaggataagtaccgcaagatcaacgaggatatcgacctcatgattagccggcagaggctctgcgccgtgccgccacccaattttgaaatgccggtctctatacctgtgtcttcacacaactctctggtctattccaaccccgtaagcagtttggggaaccccaacttgctccctttggcccatccatctctgcagagaaattccatgagcccaggggtcacgcatcggcctccctcggcaggcaacacagggggtctcatggggggagacttaaccagtggagccggtacttcagctggcaatggttatggcaacccccgtaatagccccggtcttctggtgtctcccggtaatttgaataagaacatgcaggccaagtccccaccacccatgaatttagggatgaataacaggaaacccgatctgcgggttctgataccacctggaagcaagaacactatgcccagtgtgtctgaggatgtcgacctccttttaaatcaaaggataaataacagccaaagtgcgcaaagcctggcaacacccgttgtcagcgtcgcaaccccaaccctcccgggtcagggtatggggggatacccaagcgccatatcaacaacatatgggacagaatacagcctgtcttctgctgatttaagttcactgtcagggttcaatactgcctctgctctccacctcggatccgtaacaggctggcagcagcagcatctgcacaatatgcccccatctgctttgtctcaactgggtgaccggacaacaacaccttccaggtacccacagcacactcgccatgaggcaggcaggtcccccgtagacagtctgtcatcttgttcctcctcatatgacggctctgatcgagaggaccacaggaatgaatttcactcacccatcggtttgacgagaccctctccggacgaacgggaaagtcctagcgtgaaacgaatgcgactgtcagaggggtgggctacgtag

SEQ ID NO: 231517 - DNA, 1422 bp, synthetic construct
  misc_feature 1..1422: note = Description of Artificial Sequence: Synthetic coding sequence
  source 1..1422: mol_type = other DNA
atgggtaggaagaagattcaaattacacgaatcatggatgaacggaaccggcaggtgacatttaccaagcgtaagttcggcctgatgaagaaggcatacgaattgagcgttctgtgcgattgtgagatcgccctcatcatcttcaattccacaaataaacttttccagtatgcctcaaccgacatggataaagtccttttgaagtacacagaatataacgaaccacatgagagcagaacaaacagcgacattgtcgagactctcaggaagaaaggtctgaacggatgcgatagcccagatccagatgccgatgattctgtcggtcactcacccgagagtgaagataaatacagaaagatcaacgaagacattgacttaatgatctcccggcagcgactgtgtgcagtgccaccccctaattttgaaatgccagtgagcattcctgtgtctagccacaactccctggtgtatagcaatcccgtctctagtcttggcaaccccaacctcctcccccttgcccacccctcactacaaagaaactccatgagccccggagttactcaccgcccaccttcagccggaaacactgggggactaatggggggtgacctaaccagcggagcaggcacttccgcgggtaacgggtatgggaatcccagaaactccccaggtctgcttgtgagcccagggaatctgaataaaaatatgcaggctaagagcccccctccaatgaacttaggtatgaataaccgcaagcctgacctgcgtgtgctgatcccacccggatctaagaacacaatgccctctgtgtccgaagacgtggatctcctgttgaatcagcgcataaataatagtcagtcagcccaatccttggctacaccggtggtctctgttgcaacccctacactgcccggacaaggcatgggcggttaccccagcgctatctcaaccacctacggtactgaatacagtttaagctccgccgatctaagcagtctgagcggctttaatacagcctctgcgctccacttaggctctgtgacggggtggcagcaacagcacctccacaacatgcccccttctgccttatcccagctcggcgcatgcacgtcaactcatttaagtcaatcaagcaacctatcactaccctctactcagagcctaaatataaagtctgagcccgttagtcctcctcgggataggacaaccaccccatcccgctacccccaacataccaggcacgaggcgggtcgatccccggtggatagcttgtctagttgctcctcctcctatgatggctccgatagagaagaccacaggaatgaattccatagccccattggccttactagacccagccccgatgagcgagagtctcctagcgttaagaggatgagactttcagagggttgggcaacctag

SEQ ID NO: 231518 - DNA, 1254 bp, synthetic construct
  misc_feature 1..1254: note = Description of Artificial Sequence: Synthetic coding sequence
  source 1..1254: mol_type = other DNA
atgggccgaaaaaagattcagatcacacgtattatggacgagagaaaccgacaggtgaccttcactaaacggaaattcgggctcatgaagaaggcctatgaactgtcggttctgtgtgactgcgaaattgctctcataatctttaactccacaaacaaacttttccagtacgctagcaccgatatggacaaggttctgctgaagtacaccgaatacaacgagccccacgagagccgaacaaacagcgacatcgttgaagccgtcccccctcccaattttgaaatgcctgtctcaattccagtgtcatcccacaattctctagtgtactcaaatccggtctcatcactgggcaatcccaacctgctcccgctcgcccacccgtctttacagaggaattcaatgtcaccgggtgtgactcaccggccaccaagcgctggcaatactgggggtctgatgggtggggacctgacctccggtgccggaacgtcagcaggcaacggatacggaaatcccaggaactcacccggtcttctcgtgtcccccggtaatctgaataaaaacatgcaagctaagagtccacctccaatgaatctgggtatgaacaaccgcaaacctgatctacgggtcctaatcccacccggttcaaaaaatacaatgcccagcgttaatcagcgcatcaataatagccagtcggcacagtccctggctacgcccgtggtttctgtggcgacgcctacgctgccaggtcagggcatggggggttacccctccgccatttccaccacatatgggaccgagtattcactgagttccgccgacctgtcatccctgtctggctttaataccgcttctgcgttgcacttaggatcagtaaccggatggcagcaacagcacctccacaacatgcccccatctgctcttagccaattaggagcatgcacgtcaactcacctcagccaatccagcaatctcagcctgccttccacccagtctctcaatataaagtccgagccagtctcccccccacgggacagaacaacaaccccttctaggtatccccagcatacaaggcatgaagctggcaggagccctgtggactccttgtcctcttgcagctccagctatgacggaagcgaccgtgaagatcacaggaatgaattccatagcccaattggactgaccagaccttctcctgacgagcgtgaatcaccatccgttaaacgcatgcggctgtctgagggatgggcaacctag

SEQ ID NO: 231519 - DNA, 1452 bp, synthetic construct
  misc_feature 1..1452: note = Description of Artificial Sequence: Synthetic coding sequence
  source 1..1452: mol_type = other DNA
atgggaaggaagaagatccagatcactcgcatcatggatgagcggaatcggcaagtgacttttaccaagaggaaattcggtctgatgaaaaaggcatacgagctgtccgttctctgtgactgcgagatcgccctaattattttcaactcgacaaataaactcttccagtatgcatccaccgatatggacaaggtgcttctcaaatacacagagtacaacgagcctcacgaatccaggaccaactctgacatcgtggagactctcaggaaaaagggacttaacggctgcgatagtccggatcccgacgccgacgacagcgctctgaacaagaaggagaacaagggatgcgaaagtcccgacccagactcctcatacgctctgacacccagaaccgaggagaaatacaagaaaatcaatgaagaatttgataatatgatcaaatctcacaaaatccccgctgtgcccccaccaaacttcgagatgcctgtgtccatccctgtctcttctcacaacagcctggtctactcaaatcccgtatcttccctgggaaatcccaacttgttgcctctcgcacaccctagcctgcagcgcaattcaatgtcccctggcgtaactcaccgcccaccctctgcaggtaacaccgggggattgatggggggtgacctcacaagtggcgcaggcacatccgcaggaaatggctacgggaacccgagaaactcacccggactactggtatccccaggcaacctgaataagaatatgcaggccaagagtcccccaccaatgaacctggggatgaataacagaaagcctgacctacgggtgctgattcctcctgggtcaaagaatacaatgccgagtgttaatcaacggataaacaacagccaaagtgcccagagcttggccactcctgtggtgtcagttgccacaccgacacttccaggacagggaatggggggatatccgagcgctatctccacaacatacgggacagagtattctctgtcctccgcagacttgagttcactctccggattcaatacagcttcggcacttcacctcggctcagtgacgggttggcagcaacaacacctgcataacatgcctccatctgccctgagccagcttggggcatgtactagcacccacttatctcagtccagcaacctaagccttccatccacccagtctttgaacatcaagtcagagccggtcagccctccccgagaccgcacaacaactccctcccggtaccctcagcatacaagacatgaggcgggtcggtctccagtggatagcttgtccagttgttcctctagttacgacggatcagaccgggaggatcaccgtaacgaattccattcccccatcgggctgaccaggccatcccccgacgagcgggaaagcccaagtgtaaaaaggatgcggctttctgaagggtgggccacctag

SEQ ID NO: 231520 - DNA, 1563 bp, synthetic construct
  misc_feature 1..1563: note = Description of Artificial Sequence: Synthetic coding sequence
  source 1..1563: mol_type = other DNA
atgggacgcaaaaaaattcagattcagagaataaccgacgagagaaatcggcaggtgacctttaccaagcgtaagtttggcctcatgaaaaaagcctacgaactgtctgtactatgtgactgtgaaatcgctttgatcatcttcaatcattccaataaattgtttcagtatgcctcgactgacatggacaaggtcttgctaaagtacacagaatataatgagccacacgagtcacgcaccaacgctgacattatcgaggccctccataaaaaacacagggagtgtgagagccctgaggtggatgaggtgttcgccctgaccccacagacagaagaaaagtacaagaaaatcgacgaagaattcgacaagatgatgcaatcataccgcctggcctccacagtgccggctcctaatttcgcgatgcccgtgacagtccccgtgagtaaccaatcatccctccagttctctaatcccagtggaagccttgtgacaccatcactcgttactagctcacttaccgatcccaggcttctgtcaccacagcagcctgcactgcagcggaattcagtctcccccggactgccacagagacctgccagcgccggagccatgcttgggggtgatctcaatagtgcaaatggggcttgtccctcccccgtcgggaatggctatgtaagtgctagagcctcccctggactcttaccagtggccaacggcaatagtcttaacaaagtgataccagcaaagtcacctcctccacccacgcactcaacacaactaggggctcccagtagaaagccagatttacgcgttattacctcgcaagcgggaaaggggctgatgcaccatctgaccgaggatcacctggatctgaacaacgcacagagacttggcgtatctcaaagtacccactctctaactacccccgttgtgagtgtggctacaccctcactgctgtcacagggcctgccttttagttcgatgccgactgcctacaacaccgactaccagcttacttcagccgaactgagtagccttcccgcatttagttcacctggcggtctgtctctgggaaacgtgacagcttggcagcagccccagcagccacagcaaccccagcagcctcagccacctcaacagcagcctccccagcctcagcagccacaaccccaacagccccagcagccccaacagccgccacagcagcagtcacatctggtgccagtctctctatccaatttaatccctggatccccgctgccacacgtgggcgcagcgctgacggtgactacccacccgcatatttcaattaagagcgagccagtgagtccgagccgcgagcggagtccagccccaccccctccggcagtattccccgcagcccgtccagaacccggagacggcctgagttcacctgcgggtgggtcctatgagactggagatcgagatgacggcaggggcgacttcggtcccacacttggcctgttgaggcctgctcctgagccagaagcagaagggtccgcggtgaaaaggatgcggctggatacttggactctaaagtag

SEQ ID NO: 231521 - DNA, 1566 bp, synthetic construct
  misc_feature 1..1566: note = Description of Artificial Sequence: Synthetic coding sequence
  source 1..1566: mol_type = other DNA
atgggaagaaaaaagattcagatccagagaataacggacgagcgtaatcgacaggtgactttcacaaagcgaaaatttggcctgatgaaaaaggcatacgagttgtccgtgctgtgcgactgtgagattgcactcatcattttcaatcacagtaacaagctgttccagtatgccagcaccgatatggataaggtgctcttgaagtataccgaatataatgaaccacacgagtccaggacaaacgcagacatcattgagaccttacggaagaaaggatttaacggctgtgacagtcctgagcccgacggggaggattcactcgaacaatcccctctgctagaggataagtacaggagggcgtcggaggaactggacggactatttagaagatatggtagtaccgtgccggcaccaaatttcgccatgccagtgactgtgcctgtgagcaaccaatcttctttacaattctcgaatccctccgggtccctggtcacacccagccttgtgacctcaagccttaccgaccctcggctcctgagcccgcagcaacctgcactgcaacggaactccgtcagccccggactgccccaaaggcctgcgagcgccggagccatgctgggcggagacctgaactccgccaatggagcttgtccatccccagtggggaacgggtacgtgagcgccagagcaagtcccggtttgttgccagtcgccaacggaaactcactgaataaggtgattccggctaaaagccctcctccacccacacactccacacagttaggagcaccaagtagaaaacccgacctgcgtgtgatcaccagccaagcgggtaaaggcttaatgcaccatttgacggaagatcatctcgacttgaacaacgcgcagcggctcggcgtcagccagagcacccactccttgacaactcctgttgtcagtgtcgcaaccccatcactccttagccagggactgccattttcctccatgcccactgcctataacactgattatcaacttactagcgcagaactctcctctcttcccgctttctccagccccggaggcctaagcttaggaaatgttactgcttggcagcagccccagcagccacagcagccccaacaaccacagccaccccagcagcagccccctcagccgcaacagccgcagccccagcagccacagcagccccaacagcccccacagcagcagtcccatctggtgcccgtgagcctttcaaacctgatccccggttcccctttaccacatgtgggggctgccctcacagtgactacgcacccacatatctctatcaaatctgagccagtgtctcccagtcgcgagcggagtcccgctcctcccccaccagctgtcttcccggctgccagacccgaacccggtgacggtctgagtagccctgccggtggtagctacgaaacaggcgacagggacgatggcagaggggatttcggtcctacacttggcctgttaagacccgcacccgagccggaggccgaggggtcagcagtcaagcgcatgagactggatacatggaccctcaagtag

SEQ ID NO: 231522 - DNA, 1428 bp, synthetic construct
  misc_feature 1..1428: note = Description of Artificial Sequence: Synthetic coding sequence
  source 1..1428: mol_type = other DNA
atggggaggaagaaaatacagatccagcgaataaccgatgagcgcaatagacaggtcaccttcaccaagcgaaagtttggcctgatgaagaaagcctacgagttgtcagtgctgtgcgattgcgagatcgccctcatcatcttcaatcactccaataaattgttccaatacgcctccacagatatggacaaggtcctactgaagtacactgagtataacgagccccacgaaagtcggaccaatgccgatatcattgagagtacggttcccgcacccaactttgcaatgcccgtgaccgtgcctgtgtctaaccaatccagcctccagttttcaaacccttctgggtccctagtcactccctcgctggtcaccagctccctgaccgatccaaggctgctatcgccacagcaacctgctttacagaggaattctgtatcgcccggactgccccagcggcctgcctccgcgggtgcaatgctgggcggagacctgaattccgccaacggtgcctgtcctagccctgttggcaacggctatgtttcagcccgtgcctcacccggattactccccgtggctaacggaaactctctcaacaaggtgattcccgcaaaaagtccacccccacccacccattcaacacaactcggagcaccttcgcgcaaaccagatctccgcgtcataacatcccaggctgggaagggcctgatgcatcacctgacagaggatcacctcgacctcaacaatgcccaacgtctcggggtgagtcagtccacccactctctaacaactcctgtcgtctccgtcgcaacacctagtctccttagccagggactgcccttctcttcgatgcctaccgcttataatactgactaccaactcaccagtgccgaactgtccagcctgccagccttttctagcccgggtggtctcagcctgggaaacgtgacagcctggcagcagccacagcaacctcagcagccacagcaaccacagccccctcaacagcagccccctcagccccagcagcctcagccacaacagccccagcagcctcaacagcctccacagcaacaaagtcacctagtgcctgtaagcctcagcaacctgattcctgggtcccctctcccacatgttggcgcagccctcaccgtaactacacatcctcacataagcattaagtctgaacccgtgtctcctagcagggagcgttcgccggctccaccaccaccagccgtttttccagctgcacgtcccgaacccggtgatggactgtcctcacccgcaggagggagctatgaaaccggagaccgggacgacggtaggggcgatttcggccctacattaggtctcctgcgacccgcaccagagcctgaggcagagggatcggccgttaagcgcatgagattagacacctggactctcaagtag

SEQ ID NO: 231523 - DNA, 1545 bp, synthetic construct
  misc_feature 1..1545: note = Description of Artificial Sequence: Synthetic coding sequence
  source 1..1545: mol_type = other DNA
atgggcaggaaaaaaattcaaatccagcggatcacagacgaaaggaatagacaagtgacgttcacaaagcgcaagtttggtcttatgaaaaaggcctacgagctcagtgttctgtgcgattgcgagattgcccttatcatattcaaccactccaacaagctgttccagtacgcttcaacagatatggacaaagtgctcttaaaatatactgagtacaatgaacctcatgagtccaggacaaatgcggatataattgagacacttcggaagaagggcttcaacggctgtgattcgccagaacctgacggcgaagattccttggaacagtccccactgctggaagataaatacaggcgggcatctgaggaactcgacggacttttccgtaggtacggcagcaccgtgccagcacccaatttcgccatgcctgttactgtccctgtcagtaaccaaagtagtcttcagttctcaaatcctagtgggagcctggtgaccccatctttggtgacttcctccctgactgatccacgcttgctctctcctcaacagcccgctttgcagcgtaatagcgtgtcgccagggctgccccaaagacccgctagtgctggagccatgttgggcggagatctgaacagtgcgaatggtgcctgtccgtcacctgtgggtaatggatacgtctcagccagagcctcccccggactgctgccagtagctaatgggaactctctcaacaaagttattcccgctaagagcccccctcccccaacacattccacacaactcggtgccccatcacgaaagcccgacttaagagtaataaccagccaggctggcaagggactgatgcaccatctgaataatgcacagagacttggggtgagccagtctacacatagtttaaccacacccgtcgtgtctgtggccactcctagccttctctcacaggggctgccctttagttctatgcccactgcttacaacactgactaccaattgacttctgcggaattatcttccttgcctgcctttagcagcccaggtggcttgtcgctaggcaacgtcactgcctggcagcagcctcagcaaccacagcaaccacagcagcctcagcccccacagcaacagcctcctcaacctcagcagccacagccccagcaaccacagcagccacagcagccccctcagcagcaaagccatctggtgccagtgtcactcagtaacttaataccaggctcaccgcttcctcatgtgggcgctgcgctcactgtaaccacgcaccctcatatctctattaagagcgagcccgtgagcccatcacgcgagcgttctcccgctcctccacctcccgctgtgttccctgcagctcgccctgaacccggagacggactcagttctccagctggtggatcttacgagaccggagatcgtgacgatggcaggggcgacttcggaccgaccctggggctgctgagacctgctccagagccagaggccgaggggagtgcggtgaagcgtatgagactggacacttggactctgaagtag

SEQ ID NO: 231524 - DNA, 1545 bp, synthetic construct
  misc_feature 1..1545: note = Description of Artificial Sequence: Synthetic coding sequence
  source 1..1545: mol_type = other DNA
atggggaggaaaaaaatacagatccagcggataactgatgagagaaatagacaggtaactttcactaaaagaaagttcggcttaatgaagaaggcatatgaactgtctgtgctgtgtgactgcgaaattgctcttatcatatttaatcactcaaataaactgtttcaatacgcgagtacagatatggataaagttctgctcaaatacaccgagtataacgaaccccatgagtcacgcacaaatgcggacatcattgagacccttaggaagaaaggattcaacggttgcgattcccccgaacccgatggcgaggattccctcgaacaatccccgctgctggaagataaatataggagagccagcgaggaactagacggcttatttcggagatacggaagcacagtacctgcaccaaattttgcaatgccagtcactgtccccgtcagcaatcagtctagcctacagttctcgaacccctccggcagtctcgtaaccccaagtctcgttacaagctcattgacagacccccgtcttctgagtcctcagcagcccgcattgcagcggaatagtgtgagccccggacttccacagaggccggcttctgccggtgcgatgctgggtggcgacttgaattcagctaacggcgcttgtccatcccctgtcgggaatggatatgtgtccgctcgggcttcgccaggcctgctccctgtggcaaacggaaattccctgaacaaagttatccctgccaaaagtccacctccaccaacccatagtactcaattgggtgctccgtcaagaaaacctgatcttagggtcatcaccagtcaggcagggaaaggcttgatgcatcacctgaataacgcccagcgattaggcgtctcacagtcaacacatagcttgacaactcctgtcgtctctgtggcaaccccttccctcctctcccagggcctcccgttttccagcatgccgacagcctataacaccgactatcaattaacgtcggccgaactctcctctcttcccgcattctccagccctggcggtctatccctgggcaacgtcaccgcttggcagcagccccagcagccccagcaaccccagcagcctcaacctccacaacagcaacctcctcaacctcagcaaccgcagcctcaacagccacagcagccacagcaaccaccgcagcagcagagccatctcgtgccagtaagcctgagcaacttaatccccggatccccacttccccacgtcggtgctgctctgactgtaaccacccatcctcatatcagtattaagtcagaacccgtttcgcccagccgggagcggagtcctgcaccgcctcctcctgccgtgtttcctgccgctcggcctgaaccaggagatggactgagtagtcctgcgggtgggtcttacgagaccggtgaccgcgacgacgggaggggcgactttgggccaaccttgggcctcctgaggccagccccagagccggaggctgagggctcagcggttaagcgcatgcgactcgatacatggacactgaagtag

SEQ ID NO: 231525 - DNA, 1533 bp, synthetic construct
  misc_feature 1..1533: note = Description of Artificial Sequence: Synthetic coding sequence
  source 1..1533: mol_type = other DNA
atggggcgaaagaaaatccagattcagcgtataacagacgaacgtaatcggcaggttaccttcaccaaacgcaaattcgggttaatgaaaaaggcctatgaactctccgttctttgcgattgcgagatcgccctgatcatctttaaccacagtaacaagttgtttcagtacgcttccacagatatggacaaagtgcttctgaaatacactgagtacaacgaaccacacgagtccagaaccaacgccgatatcattgaagcactccacaagaagcatcgagagtgcgagagcccggaggtggacgaggtcttcgctctgacacctcagacagaggaaaagtacaaaaagattgatgaagagtttgataagatgatgcagagctaccgcctcgcgtcaaccgttcctgcacctaactttgccatgccggtgacggtgccagtgtcaaatcagagctctctgcagtttagcaacccctctggcagcctggtcactccaagcttggtgacttcttccctgactgacccccgactattgtcaccccagcagccagccttgcagcgaaatagcgtcagtccagggttgccccaacgtccagccagtgctggcgcaatgctgggcggagatttgaatagcgcgaacggggcatgtccctctccagtagggaatgggtacgtgtccgccagagcctctcccggattactccctgttgcgaatggcaatagcctgaataaagtgatccctgcgaagagcccccctccacccacgcacagcacacagctgggcgcaccatctaggaagccggatttacgcgttattaccagtcaggccggtaagggcctgatgcaccatctgaataatgcacagcgcttaggcgtcagccagagtactcattcactcaccactcctgtggtctccgttgccacaccatccctgctctcccaggggctgccattttcttcaatgccaacagcctataacaccgattaccagttaactagcgccgaactgtctagtctgcccgcttttagttccccgggaggcctgtcattgggcaacgtgaccgcctggcagcagccccaacagccacaacaacctcagcagccacagccacctcaacagcagccacctcagccccagcagccgcaacctcagcagccccagcagccgcaacagccccctcagcaacagagccatctggtgcccgtctctctgagcaacttaattccaggatctccactcccgcacgtgggtgccgcactgactgtcacaacacacccacatatttctatcaaatcagaacccgtttcaccaagtagggagcgcagccctgcgccacctcctcccgcagtgtttcccgctgcacgacctgaacctggcgatggtctgagcagccccgcaggagggtcttacgagactggtgacagggatgacggtagaggggattttggaccgacattggggttgctccggcctgccccagagccggaggcagagggctccgcagtgaaaagaatgcgcttggacacatggtag

SEQ ID NO: 231526 - DNA, 420 bp, synthetic construct
  misc_feature 1..420: note = Description of Artificial Sequence: Synthetic coding sequence
  source 1..420: mol_type = other DNA
atggggagaaagaagattcagatacagaggataaccgacgaacgtaatcgccaggtgactttcactaaacgtaagtttgggcttatgaaaaaagcctacgaactctctgtgctctgtgattgtgaaatcgctctgattatatttaatcacagtaacaaattattccagtacgcatctacagatatggataaggtcctgctaaagtatacggagtataatgaaccacatgaaagccggaccaacgccgatatcattgaaactctgagaaagaaagggtttaacggatgcgacagtcctgaaccagatggcgaagactcacttgaacagtcaccgttactggaagataagtatcggagagcaagcgaagagctggatggactctttcggaggtatggcggaccatgttggggggtcacatag

SEQ ID NO: 231527 - DNA, 1410 bp, synthetic construct
  misc_feature 1..1410: note = Description of Artificial Sequence: Synthetic coding sequence
  source 1..1410: mol_type = other DNA
atggcggaagagcgcgagcccgagctgtacctcaaatggaaacactgcgagacccccggagtgaaaacgctgtgtaaccttaagcattgcgaaacaccaggggtaaaaactctatgtaacctgaaaaagttgctgaatcgtcttcaaaaggatcacagggaggacgtatatctttacatcagcggtcacttgaatccgaataagttgtatcaaccgccagagactattttgcagcattggccaaatgcccacaggcccaaaggtgagcgcgcaagcgaagtgggcgaaccacccgctgggaaagttgcaagaatgaaggaagctctcgcgcacttcaccatccacaccgctttggtaccatctgaggcacaggacacaccactgttccgctatttgaatcctcaggccagcctttcacatacgtccgaagaggatttcttgccagtggaggccgtgcgtgagggcaaggaagaaaaaaaagggggacccccagggagaggacctccaggttggcgtagaagagaggagctgaggctgccagacttaaaagtgctctgttaccaggaagctggctctcggggtacccgcgatagacaccactacgtgtcaagctacctagccggtgcaacaagtgctgataggtataggatgttccttcggttccaaaaagaggtgctcgccaaacaagatctgttgaaaaatgactttacaggctctaaagccgcagccggtcatgagagaaagctgcagcaggaacttcagaagatctgtacatgttctccacagcagtttaacaggctacatgtgttcggcaaggtgtttgaggacatttgcaattctagtttgattttcggcgacctgcttaagaaagtcaaggacgagtacgagctgtacatggctacacttcttgaaagccagcctgccgctcaatacgaggcactacttgctcagctcaaggcactgggacagcggcctgttaagacggctgacatggaccttgcacgagaagagctgcgcatgctggtgactgccacaaaggcagccctagagcagaatgaccgattgagaagcgaacttgaaatggaggtggccctgttacagagcgcaaaggaacggtctgaatcatctgagaagcacattatcgatgagaatagattgactctcacagaaaaagtggaaaagaaaaggtgtgagatcctgtccaagtgggatgagattcaagccctggagaaagaaataaaaacaactctggtccatacgggaatcagtgatattactgagaatcggatcaaaagtatagagcatgaagccatccagcttgaaactgaaaacatgatacttaagaaaaagattaaaggcccactcgagatataccagggtatctgcaagattaggggcaacagacgttag

SEQ ID NO: 231528 - DNA, 741 bp, synthetic construct
  misc_feature 1..741: note = Description of Artificial Sequence: Synthetic coding sequence
  source 1..741: mol_type = other DNA
atgtatcaagtgtctggacagcgtcccagtggctgcgatgctccatacggcgcacccagcgccgcacctggccctgctcagacactttccctcctgccaggcctagaggttgtcacagggagcacccaccccgctgaagccgcaccagaggaggggagcctcgaggaggctgcgacaccgatgccgcaggggaatggacccggaataccccagggactcgactcgactgacctcgacgtcccaaccgaggctgtgacttgccagcctcaggggaatccacttgggtgtacgccactattgccaaacgactcgggccatccttctgagttgggaggcactaggagggccggaaacggagctcttgggggtcccaaggcacatcgaaaactgcagacccacccatctcttgcgtcacagggatccaagaagagcaagagctcctcaaaatctacaacctctcaaatccctctacaggcacaggaagattgttgcgttcactgcatcctcagttgtctgttttgcgaattcctcactctgtgtaacattgttctggactgcgctacatgcggatcgtgtagttctgaggattcgtgtctttgttgttgttgctgtggaagtggcgagtgtgctgactgtgatctgccctgtgacttggactgtggaattttggatgcatgttgtgagagtgccgactgcctcgagatctgcatggaatgctgcggcctctgtttctctagttag

SEQ ID NO: 231529 - DNA, 696 bp, synthetic construct
  misc_feature 1..696: note = Description of Artificial Sequence: Synthetic coding sequence
  source 1..696: mol_type = other DNA
atgtaccaggtgtccggacaaagacccagcggctgtgatgccccatacggcgctccctccgcagcccctgggccagcccagacactgtctttgctgcccggactggaggtggttaccggttctactcatcccgctgaggctgctcctgaagagggctccctggaggaggcagctactccgatgccgcagggtaatggacccggtatcccgcaagggctggattctactgacctggatgtgcccacagaggcagtgacatgtcaaccacaaggcaatccacttggttgcacaccgttgcttccaaatgattccggccacccaagcgagcttgggggtaccagacgcgctgggaacggcgcacttgggggacctaaggcccatcgcaaattgcagacgcacccctccctggcatcccagggtagtaagaaatctaagtccagctcgaaatccacaacgagccagatccctcttcaggctcaggaagattgctgcgttcattgtattctgtcttgtctgttttgtgaattcctcaccctatgcaacatcgtgctggactgcgccacctgcgggagctgttcaagtgaggattcctgcctgtgttgttgttgttgcggaagtggggaatgcgctgactgtgacctcccttgcgacctcgattgcggtatcctggacgcctgctgcgagtctgctgactag

SEQ ID NO: 231530 - DNA, 642 bp, synthetic construct
  misc_feature 1..642: note = Description of Artificial Sequence: Synthetic coding sequence
  source 1..642: mol_type = other DNA
atgtaccaagtgagcggacagcggccttcaggttgcgacgcaccctacggcgcaccatcagcagcccctggaccagcccagaccctaagtctgctaccaggcctggaggtggttactggcagtacgcaccccgctgaagccgctcctgaagaggggtccctggaagaagcagccactccaatgccacaaggcaatgggccaggaataccgcagggacttgacagtactgatttggacgttccaactgaagcagtaacgtgccagcctcaggggaatcctttggggtgtacccccctgttgcccaatgattcagggcatccctctgaactcggcggaacacgtagagccggaaatggagccctcggcggaccgaaagcccatcgcaaactccaaacccacccttcactcgcctcccagggcagcaagaagtccaagtcaagctctaagagcactaccagccagatccccctccaggctcaggaggattgttgcgttcactgcattctgtcctgtctgttctgcgaatttctaactctctgtaacattgtgctcgattgtgctacatgcggctcttgcagctctgaagatagttgtctgtgttgctgttgctgtggtagcggggagtgtgcagattgtgactag

SEQ ID NO: 231531 - DNA, 297 bp, synthetic construct
  misc_feature 1..297: note = Description of Artificial Sequence: Synthetic coding sequence
  source 1..297: mol_type = other DNA
atgtatcaagtatctgggcaacggccaagcggatgtgacgccccatacggggcacctagcgccgctccgggaccagctcagaccctatcactattacccggactggaagtggtcacgggatccacccatcctgcagaagcggcacccgaggaggggtccctggaagaagcagccactcctatgcctcagggcaatggacccggaattcctcaagggctggactcgaccgatctcgacgtaccgacagaggccgttacatgccagcctcaaggtaaccctctggggtgtactccgtag

SEQ ID NO: 231532 - DNA, 387 bp, synthetic construct
  misc_feature 1..387: note = Description of Artificial Sequence: Synthetic coding sequence
  source 1..387: mol_type = other DNA
atgtaccaggtgtccggacagaggcccagtggatgtgacgccccatacggggctccttctgccgcacctggaccggcacagacactgagcctgctcccaggcttggaggtcgtcactggctccacccaccctgcggaggcagcacccgaggaaggatcgctggaggaggctgccactcctatgccccaggggaacgggccaggaataccacagggtctggattctaccgatcttgatgtcccaacagaagctgtcacgtgtcagccgcaaggaaacccgctcgggtgcaccccactgctacctaacgattcgggccacccatccgagttggggggaacgagacgggctggtaacggggcactgggcggacccaaagcccatagatag

SEQ ID NO: 231533 - DNA, 741 bp, synthetic construct
  misc_feature 1..741: note = Description of Artificial Sequence: Synthetic coding sequence
  source 1..741: mol_type = other DNA
atgtatcaggtctccggtcagaggccgagtggctgtgatgctccctatggagcaccatccgcagccccaggacccgctcaaaccctctctttgcttccgggactggaagtcgtaaccgggagcacccatccggcagaagcagcccctgaggagggctccctggaagaagcagccacccctatgccacaaggaaacggtcctggaatcccacaaggactagactctactgacttggacgtccccaccgaagccgtgacatgccagccgcaaggtaaccccctggggtgtacgccactgctcccaaatgactccggacatccatccgaattgggcggaacgcgcagggcaggaaacggcgcactgggaggaccaaaggcccataggaagcttcaaacacatcctagtctggccagtcagggctctaaaaaaagcaaatcgtccagcaaaagcaccacatctcagattccgctgcaggcccaagaggactgttgcgtgcattgcatcttgtcctgtctgttctgcgaattccttactctctgtaatatcgtactcgactgcgccacttgcggctcttgttcgagcgaggatagctgtctctgctgctgttgctgcggaagcggagaatgtgcggattgtgaccttccatgtgacctcgactgcggtatcctggatgcctgctgtgagagtgccgactgccttgagatttgtatggaatgctgcggtctctgcttttcaagttag

SEQ ID NO: 231534 - DNA, 729 bp, synthetic construct
  misc_feature 1..729: note = Description of Artificial Sequence: Synthetic coding sequence
  source 1..729: mol_type = other DNA
atgatgatggacctctttgaaacaggttcttacttcttctatctcgacggagaaaatgttactctccagccactggaggtagctgagggcagtcccctttatcctggctcagacggcactttgagcccatgtcaagatcaaatgcctcccgaagctgggtctgacagttccggcgaggaacacgtactggcacctcccggtctacaaccccctcattgcccgggtcaatgccttatttgggcctgtaaaacgtgcaaacgcaaaagtgctccaacagatcgtcgcaaggccgcaacactaagagagagaaggcgtctgaagaagattaatgaggcgttcgaagcattaaaacgaagaacagtagcaaaccctaaccagcgtctgcctaaagtggagattctacgatccgccataagttacatcgagcggctgcaagatctgttacaccggctcgatcagcaggagaagatgcaggagttgggggtagaccctttctcctacaggccaaagcaggaaaacctggagggagcagacttccttaggacatgctcctcccaatggccgagcgtttccgatcattctcgcggtctggtgattacagccaaagaagggggagcatctattgacagttcagccagcagcagtctgcggtgtttgagcagtatcgtagacagcatctcctccgaagaaagaaagcttccatgtgtggaagaggtggttgaaaagtag

SEQ ID NO: 231535 - DNA, 1527 bp, synthetic construct
  misc_feature 1..1527: note = Description of Artificial Sequence: Synthetic coding sequence
  source 1..1527: mol_type = other DNA
atgactcagactttgaaatatgcgagccgggtatttcacagagtgcgctgggctcccgaactcggagccagcctcgggtaccgggagtaccatagcgcccgaagatctctggcagacataccaggtccctcaaccccttcgttcctggcagagcttttctgtaaagggggacttagcaggctgcacgaactgcaggtgcagggggcagctcactttggacctgtttggcttgctagcttcggaacagttagaactgtgtacgtggccgctcccgcattggtagaggagctgctccggcaggaaggcccaagacctgagagatgctccttctccccatggacagagcacagaagatgcagacagcgggcttgtggtcttctcactgcggaaggggaggaatggcaacgccttagatctctgctggcgccactactcttgcggcctcaggcggcagcgaggtatgcaggcacattgaacaacgtggtgtgtgatctggtgaggagactgagaaggcagcgcggtaggggcaccggaccacccgctcttgtccgggacgtggctggcgagttctacaagtttgggctggagggaatcgccgctgtgctgctgggaagcagattaggttgcttggaagcccaggtcccaccagacaccgaaacatttattcgcgctgtcggatccgtgtttgtatccactctcctgacaatggcaatgcctcattggcttcggcatctcgtcccaggtccttggggacggctgtgtagagactgggatcaaatgtttgcatttgcgcagagacacgtcgagcggagggaagcagaagccgctatgcggaacgggggtcaacccgagaaagaccttgagtcaggcgcacatctcactcactttctgttccgtgaagagttgccggcacagagtatcttaggtaatgtaacagagctgctgcttgcaggagttgataccgttagcaatacactcagctgggctctgtatgagctctcacggcacccagaggtgcagactgctttgcacagtgagattactgctgccctgtcaccagggagttccgcctatccatctgctacagtgctgagccagttgccccttcttaaggccgtggtaaaagaggtgctccggttgtatcctgtcgttcccggaaacagccgggtgccagacaaagatattcacgtcggagattacatcatcccaaaaaatacactcgtcacgttatgtcattacgccacctcccgagatcccgcacaatttccagaacccaacagctttaggcccgcacgctggcttggagaaggacctacaccacatccctttgcgtcactaccttttgggtttgggaaaaggtcatgcatgggacggagactggccgaactcgagctgcagatggctttggcacagatcctgacccacttcgaggtgcaacccgagcccggagcagctccagtgcgccctaaaaccagaacggttctggttcctgaaaggtcgatcaatctgcagtttctggatagatag

SEQ ID NO: 231536 - DNA, 675 bp, synthetic construct
  misc_feature 1..675: note = Description of Artificial Sequence: Synthetic coding sequence
  source 1..675: mol_type = other DNA
atggaactatacgaaacttcaccctacttttatcaggagcctcgtttctacgacggcgaaaattacctgccagttcacttgcagggatttgagccacccggatacgagaggacggagttgacattaagtccggaggcgccaggaccccttgaggacaaagggctcggaactcctgaacactgcccgggacaatgcctcccatgggcatgtaaggtttgtaaaagaaaaagcgtatccgtggaccgcaggagggccgctacactgagagaaaagcgtaggctgaaaaaagtgaacgaagctttcgaggctctgaagaggagcacgttgttgaatcccaatcagcgtctgcccaaggtagagatcctgcgcagtgctattcagtacattgagagattgcaggccctgctgtctagcctaaaccaggaggagcgcgacctgcgttacagaggcggaggagggccacaacccggtgtcccctcagagtgcagcagtcactcagcatcatgtagccccgaatggggatcggcgcttgaattttccgctaaccccggagaccatctcttaaccgctgacccgacggatgctcacaacttgcattccttaacctctatcgtggactcgatcaccgtggaggatgtgtccgtcgcttttcccgacgaaaccatgcccaactag

SEQ ID NO: 231537 - DNA, 465 bp, synthetic construct
  misc_feature 1..465: note = Description of Artificial Sequence: Synthetic coding sequence
  source 1..465: mol_type = other DNA
atgggcctgtcagacggtgagtggcagctagtgctcaatgtctggggtaaggtggaggccgatattccagggcatggtcaggaagttcttatccgcctcttcaaaggacatcctgagactctagagaaatttgataagtttaagcatttaaagtccgaggatgaaatgaaggcatcggaggatctgaagaaacacggggcaaccgtcttaaccgctcttggcggaatcctgaaaaaaaagggccaccacgaagcagaaatcaagccactagcgcagtctcacgcgacaaagcacaagatacctgtgaagtatctggaatttatctcggagtgtataatccaggtgttgcagtccaagcaccccggtgacttcggagctgatgcccagggggctatgaataaagccctggagttatttaggaaggacatggcctctaactacaaagaactgggcttccaaggatag

SEQ ID NO: 231538 - DNA, 465 bp, synthetic construct
  misc_feature 1..465: note = Description of Artificial Sequence: Synthetic coding sequence
  source 1..465: mol_type = other DNA
atgggcctgtccgacggggagtggcaactggtgcttaacgtatggggaaaggtggaggctgatatccctgggcatggacaggaggtgctgatcaggttatttaaaggacatccggagactttggaaaagttcgacaagtttaaacatttgaagagcgaggacgaaatgaaagcctctgaggacctcaaaaagcatggcgctaccgtgctcacggctttgggtggtattctgaaaaagaaaggccaccacgaggccgaaatcaaacctctggctcagtcacacgccacaaagcacaagattcctgttaaatatcttgaattcatatccgagtgtataatacaggttttgcagagcaagcatcccggagactttggggctgacgcacagggtgcaatgaacaaggctcttgagctgtttcggaaggacatggcttcaaattataaagagctcggatttcagggatag

SEQ ID NO: 231539 - DNA, 465 bp, synthetic construct
  misc_feature 1..465: note = Description of Artificial Sequence: Synthetic coding sequence
  source 1..465: mol_type = other DNA
atgggcctgtccgatggtgagtggcaacttgtcctaaacgtctggggaaaggtggaagcggacatccccggacacggccaggaagtattaatccgcctcttcaagggacaccccgagaccttggaaaagtttgataagttcaaacaccttaaaagcgaggacgagatgaaagcaagcgaagatctgaaaaaacatggcgcaacggttctgactgctttaggcggaattttgaagaaaaagggtcaccatgaggctgagatcaagcccctggcgcagagccatgctacgaaacacaagatcccagtaaagtacttggagttcatttcggaatgtattatacaggtgttgcagtccaagcacccaggtgactttggcgctgacgcccagggcgctatgaacaaggctctggagcttttccgcaaagacatggcaagtaattacaaggagctcggattccaaggatag

SEQ ID NO: 231540 - DNA, 465 bp, synthetic construct
  misc_feature 1..465: note = Description of Artificial Sequence: Synthetic coding sequence
  source 1..465: mol_type = other DNA
atggggttatcagacggagaatggcagctggtcctgaatgtctggggcaaggttgaagccgacatcccaggacatggacaggaagtgttaatcaggcttttcaaaggacatccagaaaccctggaaaaattcgacaagtttaaacacctgaaatcggaagatgaaatgaaggcctctgaagatttgaaaaagcacggcgcaaccgtcttgacagcactgggcggaatcctgaaaaagaagggccaccacgaggcagaaatcaagcccctggcgcagagtcacgccactaagcataaaataccagtcaagtatctcgagttcatctcggaatgtattatacaggttctccaatctaagcaccctggagattttggagctgacgcacagggagcgatgaataaggcactggaactctttcggaaagatatggcaagcaattacaaggaacttggattccaagggtag

SEQ ID NO: 231541 - DNA, 234 bp, synthetic construct
  misc_feature 1..234: note = Description of Artificial Sequence: Synthetic coding sequence
  source 1..234: mol_type = other DNA
atggggttgtcagatggcgagtggcagctcgttttgaacgtatgggggaaggtggaagcggacataccagggcacggccaggaagtgcttatccgcctctttaaggggcatccagaaactctggagaaatttgataaattcaagcacttaaaaagcgaggacgagatgaaggcctctgaagatctgaagaagcacggcgctaccgttctgacagccctaggcggaatcctatag

SEQ ID NO: 231542 - DNA, 432 bp, synthetic construct
  misc_feature 1..432: note = Description of Artificial Sequence: Synthetic coding sequence
  source 1..432: mol_type = other DNA
atggggctctcagacggggagtggcagctcgtactcaacgtatggggaaaggttgaggctgatatccccggacacgggcaggaggtgctgatcaggctctttaaagggcacccggaaacactggagaagttcgataaattcaaacacctcaagtcagaggatgagatgaaagcgtccgaggatctgaagaaacacggtgcaaccgtgctgactgcccttggcggtattctcaagaagaaaggccaccacgaagcagaaatcaagccattagcccagtcacacgccactaagcacaaaattcccgtcaaatatctggaatttatcagtgaatgtatcattcaagtgctccagtcaaagcatccgggagactttggggctgacgcccagggagccatgaataaggcactggaactcttcagaaaagacatgtag

SEQ ID NO: 231543 - DNA, 321 bp, synthetic construct
  misc_feature 1..321: note = Description of Artificial Sequence: Synthetic coding sequence
  source 1..321: mol_type = other DNA
atgggcctttcagacggcgaatggcagctggtgttgaacgtgtgggggaaagtggaagccgacatccccggacacgggcaggaagtgcttatacggctctttaagggacacccagagacactggaaaagtttgacaaatttaagcacctgaaaagcgaggatgagatgaaggccagcgaggatctcaaaaaacacggcgcaacagtgttgacagccctgggcggaatacttaagaaaaagggtcaccacgaagctgagatcaagcccttggcccagagtcacgccacaaagcacaaaatcccagtcaagtatctggagtag

SEQ ID NO: 231544 - DNA, 321 bp, synthetic construct
  misc_feature 1..321: note = Description of Artificial Sequence: Synthetic coding sequence
  source 1..321: mol_type = other DNA
atgggtctgtcagatggagagtggcagttggtgttgaacgtctggggcaaagtggaagctgatattcctggtcatggccaggaggtcttgatccggctcttcaaaggacaccctgaaactcttgaaaagtttgacaagtttaagcacttaaagtctgaggatgagatgaaagcatcggaggacctgaaaaaacatggggcaactgtgctgaccgccctcgggggaatcctgaaaaaaaaaggacaccatgaggctgagatcaagccactggcccagtctcacgccaccaagcataagattcctgtaaagtatctcgaatag

SEQ ID NO: 231545 - DNA, 411 bp, synthetic construct
  misc_feature 1..411: note = Description of Artificial Sequence: Synthetic coding sequence
  source 1..411: mol_type = other DNA
atggctgtaggggctgaaaggctcggtgaagttttgatccggctattcaagggtcaccctgagaccctagaaaagttcgataagtttaaacatctgaaatcagaggacgaaatgaaagcatctgaagatctcaagaagcacggtgccaccgttctgaccgccctgggcggaatcctaaaaaaaaaaggccatcacgaggcagagatcaagccgcttgcccagtctcacgcaaccaagcacaagataccagtgaagtacctcgagttcatttctgagtgcattatccaggtgctacagtcgaaacatccaggcgatttcggcgctgatgctcagggcgctatgaataaggcccttgagctattccgaaaggacatggccagcaattataaggagctgggatttcaggggtag

SEQ ID NO: 231546 - DNA, 4398 bp, synthetic construct
  misc_feature 1..4398: note = Description of Artificial Sequence: Synthetic coding sequence
  source 1..4398: mol_type = other DNA
atgtcgctggtgacagtacccttttatcagaagaggcaccgccattttgatcaaagctaccgcaacattcagactagataccttttggatgaatacgcatccaaaaaacgggcaagcacgcaagccagctcccagaagtcactgagccaacgatcttcatcgcagcgcgctagttcacagactagtctggggggtacaatctgtcgcgtctgcgcgaagcgcgtgagcacgcaggaggatgaggagcaggagaatcggtcaagatatcagtccttggttgctgcttacggagaggccaaacggcaaagatttttgtccgagttggctcacctggaagaagacgtgcacctggctcgatcccaggctcgcgacaaattagataaatatgctatacagcaaatgatggaagataaactggcatgggaaagacacacatttgaagaacgtattagtagagcaccggagattctcgtccggctccggtcccataccgtgtgggaacggatgagcgtgaaactgtgtttcactgtgcaagggtttcccacgcccgttgtacaatggtacaaggatggatccctcatctgccaggccgctgagccgggaaaatatagaatcgaaagtaactatggagtgcacacccttgaaattaaccgcgctgacttcgacgacaccgccacttatagcgctgtggcaactaacgcacatgggcaggtctcgactaatgccgctgttgtggtgcgaagatttcgcggagatgaagaacctttccggagcgtgggactgcccatcggcctcccgctgagctctatgatcccttatacacacttcgacgtgcagttcctggaaaaatttggggttacttttcgcagagaaggggagactgtgacactcaaatgtacgatgttagtgacacccgatctgaagagggtccaaccgagagcagaatggtatcgcgatgacgtgctactgaaggagtccaagtggaccaagatgttttttggcgaggggcaggcctcactgtctttcagtcacctccacaaggatgacgagggactctacacattaaggatcgtcagcaggggaggcgtttctgaccacagtgccttcttgttcgtgagagacgccgaccccctggttactggtgctcccggagctccaatggacctgcagtgccatgatgctaacagggattatgtaattgttacatggaaacctcctaacacgacaaccgagagccctgttatgggatatttcgtcgacagatgtgaggtgggtacaaacaattgggtccaatgcaacgacgctccagtcaagatatgcaagtatccagtgacaggacttttcgaggggcgaagttatattttccgcgtgcgagctgtgaatagcgccggtatctctagaccgagccgcgtgtccgacgcagtggctgctctcgatcctctggatctgagacggttgcaggcagtccaccttgagggcgagaaggaaattgcaatttaccaggatgatctggagggggatgctcaggtaccaggaccacctactggagtccacgctagtgaaatctcccgcaattatgtggtgctctcatgggagccacccacgcctaggggtaaggacccacttatgtatttcatcgagaagagtgtcgttggttctggtagttggcaacgggtgaatgcccagactgctgtgcgttcccctcgctatgccgtgttcgatttgatggaggggaagtcctacgtttttcgggtattgagcgccaatcggcacggcctctccgaaccatcggaaattactagccctatccaggcacaggacgtcacagtcgtgcccagtgccccagggcgagtcctggcctcaagaaatactaaaacgtcggtcgtcgtgcagtgggacaggcctaagcatgaagaggacctgctaggttactacgtcgactgttgcgtagctggcaccaacctgtgggaaccatgcaatcataagcctattggatacaaccgctttgttgtccacgggttgaccacaggggagcagtatatatttagggtgaaggcagtgaatgcggtgggcatgagtgaaaactcccaggagtctgatgtgataaaggtgcaagctgccctgaccgtgccaagccatccatatggcattaccctcctgaattgcgacggacacagtatgactctggggtggaaggtacccaaattttccggcggaagccccattctgggctactacctggataaaagagaggttcatcataagaattggcacgaggtgaattcttcaccctccaaaccaactattctgacagttgatggactgacggaaggcagcctgtatgaattcaaaattgccgctgtaaacctagccggaatcggagagccttccgacccctcagaacacttcaagtgcgaagcttggaccatgcctgagcccggaccagcttacgacctgacattttgcgaggtcagagacacaagccttgtgatgctgtggaaagcacctgtctactccgggtcgagtcccgttagtgggtacttcgtggacttccgcgaagaggatgccggtgagtggatcacggtcaatcagacaaccacagcaaaccgatatctgaaggtctctgacctgcagcagggtaagacctatgtgttccgggtgcgtgcggttaacgccaacggggtgggaaaacccagcgacacctcagagcctgtgcttgtcgaggctcgccctggaaccaaagagattagcgcaggcgtggacgaacagggaaacatttacctgggttttgattgccaggagatgaccgacgcgtctcaattcacctggtgcaaatcatacgaagaaatttctgacgatgaacgctttaaaatcgagaccgtgggggaccattcaaagttgtatcttaaaaatcctgataaggaagatctaggcacctactcggtgtctgtgtcagacacagatggagtgagcagcagctttgttcttgatccagaagagctggagcgtctaatggctctctccaatgagatcaaaaatcccaccattccgctgaaatcagaacttgcatatgagatcttcgacaagggacgcgtaaggttttggctccaggctgaacatctcagccccgatgcatcctacagatttatcatcaacgatagagaagtcagtgacagtgaaatccacaggataaagtgcgacaaagccaccggaattattgagatggtgatggaccgtttcagcattgaaaatgaggggacgtataccgtccagatccacgacggtaaggcaaagtcgcagagctcactcgttcttatcggcgatgcctttaagacagtgttggaggaggccgagttccagagaaaagagtttctccgcaaacaggggcctcatttcgctgagtacctccattgggacgtcaccgaggaatgtgaagttaggctcgtttgtaaggttgcgaatactaaaaaagagaccgtcttcaaatggctcaaggacgatgttctttatgaaaccgagaccctccctaatctcgaacggggaatttgcgagctcctaattcctaagctgtctaaaaaggaccatggagaatacaaagcgacactcaaagacgaccgcggacaagatgtatcaatcctggaaattgccggtaaagtctacgacgatatgattctggcaatgtcccgcgtttgtggaaagagtgccagcccgttgaaggttctctgtacaccagagggaatcaggctgcagtgtttcatgaagtactttacagatgaaatgaaggtgaactggtgtcataaagacgcaaaaatcagcagctccgagcacatgaggatagggggtagtgaggaaatggcctggctccagatttgcgagcctacagaaaaggacaaagggaagtacactttcgagatcttcgacggcaaggataaccatcagagaagcctggacctgtccggacaagctttcgatgaggcatttgctgagtttcagcagttcaaagccgcagcttttgccgaaaagaatcggggtagactgattggcggacttccagacgtggtgacaattatggaaggaaagacattgaacttgacatgtacagtgtttggaaacccagacccagaagtaatttggtttaagaatgaccaggacattcagctgtccgaacacttctctgtgaaggtggaacaggcaaaatacgtatccatgacaattaagggagtgactagcgaggactctggtaaatactccatcaacattaagaacaaatatggcggtgagaaaattgatgttacagtgtccgtatataaacatggggagaagattcccgatatggctccacctcagcaagcgaagcctaagctcatccctgcatctgccagtgcagccggacagtag

SEQ ID NO: 231547 - DNA, 3420 bp, synthetic construct
  misc_feature 1..3420: note = Description of Artificial Sequence: Synthetic coding sequence
  source 1..3420: mol_type = other DNA
atgcccgagcctacgaagaaggaggacgaagaggaggtcagccctccgtcagctttacctcctgattggaccctagtagagactcccccaggcgaagagcaggccaagcaaaacgctaattcccagttgtctatccttttcattgagaaaccacagggtggcactgttaaggtcggcgaggacatcacctttatcgccaaggtcaaagctgaggacttactgagaaagcccaccatcaaatggttcaagggcaaatggatggatttggcaagcaaggcaggcaagcacttgcaactgaaggagacatttgagcgccattcaagagtgtatacctttgagatgcaaattatcaaggctaaggataactttgccggtaactacagatgcgaggtgacttataaggacaaattcgattcttgctcattcgacttagaggtgcacgagagcactggcacaacacctaatatcgacatacgatctgctttcaagcgttcaggagagggtcaagaagacgctggggagctggatttttccggtttgctcaagaggcgggaggtgaagcagcaggaagaagagcctcaggtagacgtgtgggagctcttaaagaatgcaaagccatctgagtacgaaaagatcgcgtttcagtacggaataaccgacttacgcggaatgctgaagcggctcaaacgtatgagaagagaagaaaagaagagcgcagcctttgctaagattctggacccagcatatcaggtagacaagggcggaagagtccgctttgttgtggaactcgccgaccccaagctcgaagttaagtggtataagaatgggcaggagatccgcccttcaaccaaatacatctttgagcataaaggctgccagcggattctattcataaataactgccagatgactgacgatagcgaatattacgtaaccgcgggagacgagaagtgtagcacagaactctttgtacgcgagccgccaatcatggttaccaaacaattggaagacaccaccgcgtattgtggggagcgcgtagagttagaatgcgaagtgtcagaggacgatgcaaacgtaaagtggtttaaaaatggggaggagatcatccctgggccaaagtctcggtatcggattcgcgtggaaggcaagaaacacattctgataattgagggggctacaaaggctgacgccgctgagtacagcgtgatgacaactgggggtcaatctagcgcaaaactcagtgttgatttgaagcctctaaagatcctcaccccacttacggatcagaccgtgaacttaggcaaggaaatttgtctgaagtgtgaaatctcagaaaacattcctggtaagtggacaaaaaatggactaccagtccaggagtccgatcgtttaaaagtggttcacaaaggtcggatccacaaattggtaatcgccaatgccctcaccgaagacgagggtgactacgtgtttgcacctgacgcctacaacgtgaccctgcctgcaaaagtgcatgtcatcgaccccccaaagatcatattagacgggctggatgccgataatacagtgactgtcattgccggaaacaaactgcgactggagatccccatcagcggggagccgccacccaaagcaatgtggtctaggggagataaagccatcatggaaggatccggcaggattcgcaccgagagctaccccgattccagcaccttagtgattgacattgccgaacgcgatgacagtggcgtgtaccatatcaacctaaagaatgaagccggtgaagctcatgcttcaataaaagtgaaagtagtggatttcccagatccgccagtcgccccaacagttacggaagtaggcgatgattggtgcatcatgaattgggagccaccagcctatgacgggggttctcctatccttggatacttcatagaaaggaaaaagaagcagagttcaagatggatgagacttaattttgatctttgcaaagaaacaaccttcgaacctaagaagatgattgagggggtcgcctatgaggttagaatattcgccgtgaatgccatcggcatcagcaagccctccatgccctcccggcctttcgtacctctggccgtgacgagtccccctactctactcaccgtggattcagtaactgatacaacagtcacgatgagatggagaccacccgaccatatcggcgctgcagggctcgacggttacgttcttgagtattgttttgaaggcaccgaggattggattgttgcaaataaagatttgatcgacaagacaaagttcacgatcactggacttccaactgacgccaagatttttgtgcgagtgaaagctgtgaacgctgccggtgctagcgagccaaaatattactcacagcctattctagtgaaagagatcattgagccaccgaaaattaggatccccaggcatctgaaacaaacgtatatccggagggtgggggaggcagttaacctggttatcccattccagggcaaacccaggcctgaattgacctggaaaaaggacggcgctgagatcgataaaaaccagattaacataagaaacagcgaaaccgacactataatatttattcggaaggctgaaagaagtcattctgggaagtatgaccttcaggtaaaagtggacaagttcgttgaaacagcatcaattgatatccagatcatcgatcgacccggtcccccacaaatagttaagatagaggatgtttggggcgagaatgtggctttgacttggacaccaccgaaggatgacggcaacgctgcaattaccggctatacaattcagaaggctgacaagaaaagtatggagtggtttacagtcattgagcattatcaccgtacatctgcaactattaccgagttggtcatcggaaacgagtattatttccgcgtattcagtgaaaacatgtgtgggttgagcgaagacgctaccatgaccaaggaaagtgcagtaatcgcgcgtgacggtaagatctataagaatccggtttatgaagattttgattttagcgaagctcctatgttcactcagcctcttgtcaatacatacgcaatcgccggttacaacgccacattgaactgtagcgttcggggaaatcctaagcctaagatcacatggatgaaaaataaagtggccattgttgatgaccctaggtacaggatgttttcaaaccagggggtgtgtacactggagatccgtaagcccagtccatacgatggcggaacttactgctgtaaagcggtaaacgatctgggcaccgtggaaattgaatgtaagcttgaagtgaaagggggattaagcttttgccgtctactgctgcagggcgtgcccccaaacatcatagattcctacctcagagatctgcactctagcaatccagaagaatactag

SEQ ID NO: 231548 - DNA, 3522 bp, synthetic construct
  misc_feature 1..3522: note = Description of Artificial Sequence: Synthetic coding sequence
  source 1..3522: mol_type = other DNA
atgccggagcctacaaagaaagaagagaacgaggtacctgctcccgctcccccacccgaggaaccttccaaggagaaggaagccggtaccacacccgcaaaagactggaccctcgtggagaccccacctggagaggagcaggcgaagcagaatgccaacagccagctgagcattctgtttattgaaaagccacagggagggacggtaaaagtgggggaagacattaccttcatcgcaaaagtgaaggctgaagacctgctgaggaagcctacaattaagtggttcaaaggaaagtggatggatctggcctccaaggctggcaagcatttacagctaaaagaaactttcgagcggcactcacgggtgtacacattcgagatgcagatcatcaaggccaaggataattttgcgggaaattataggtgcgaagtgacctacaaagataagttcgactcttgtagcttcgatttggaggtgcatgaatcaacgggcacaactcccaatatcgatatacggtcagcgttcaaaaggtcgggggagggccaggaggatgccggagaactggattttagtgggctgctaaaacgaagagaagtcaagcaacaggaagaggaaccccaggttgatgtatgggagttattgaagaatgctaagccgtccgagtatgagaaaatcgcgttccagtacgggataaccgatctaaggggcatgctgaaacgactgaagcggatgcgccgagaagagaagaaatctgcagcttttgctaagatcctagatcctgcctaccaggtggataaggggggaagagttcggttcgtggtcgagctggccgaccctaaactggaggtcaaatggtataaaaacgggcaggaaatcagaccaagtactaaatatatttttgaacataaaggttgccaacggatcctgtttattaataactgccaaatgacagatgactcagagtattacgttacagctggcgatgagaagtgtagcacagagctgttcgtacgcgagccacccataatggtcacaaaacaactagaggacacaaccgcatactgcggcgagagggtcgaacttgagtgtgaagtttcagaggatgatgcgaatgtaaagtggtttaagaacggtgaagagatcattcctggcccaaaatcccgctaccgaatccgggtggaaggcaaaaaacatatactgattatcgagggcgcaacaaaggctgacgccgcagaatactcagtgatgacaaccggcggacagagctctgccaaactcagcgttgacttaaagccacttaaaatcttaactcccctcacagaccagaccgtaaacctagggaaggagatctgtttgaaatgtgaaatttctgagaatattcctggaaaatggacaaagaacggacttcctgtccaggaaagcgatcgtctcaaagtagtccacaaaggcagaattcataagctcgtaatagcaaatgcattaaccgaagatgagggggattatgtgtttgccccagacgcatacaatgtgacactgcctgctaaggtgcacgtcatcgatccacccaagattattcttgatgggttggatgcagacaataccgtgactgtgatcgcaggcaataagctcagactcgagatccccatctccggcgaacccccaccaaaagccatgtggtccagaggcgataaggcgattatggagggttctgggagaatccggacagaatcgtaccctgattcctcaacactcgtgattgacatagctgagagagatgattctggcgtctatcatattaatctgaaaaatgaagcgggagaggctcacgcctccataaaagtgaaagttgtagatttccctgaccctccagtcgctcccactgtgactgaggttggcgacgattggtgtattatgaactgggagcctcctgcctacgatggcggtagccccatcctgggatacttcatcgaacgtaagaagaagcagagctcaagatggatgcgcctgaactttgacctgtgcaaagagactacgtttgagcccaagaaaatgatcgaaggcgttgcttacgaagttcggatatttgccgttaacgcgattggcatcagcaaaccgagtatgccttcccggcctttcgtgcctctcgccgtcacgtccccacccacccttctcaccgtggactctgtgactgatacaactgtgacaatgagatggagaccacctgaccacataggtgctgctggtctcgacgggtatgtgctggagtactgttttgaggggtccacttctgctaaacagtctgacgaaaacggcgaagctgcatacgacctgcccgctgaggactggatcgtagccaataaagatctcatcgataagaccaagttcaccatcacgggcttgcccactgatgccaaaatattcgtcagggttaaagcagttaatgccgcaggcgcaagcgagccgaagtactactcccagccgatcctggttaaagagatcattgaaccgccaaaaatccgcatccccaggcatctgaagcagacttacatcaggcgtgtgggcgaagcggtgaatctggtcatccccttccagggaaaacctaggcccgagttgacatggaagaaggacggagcggagatagataagaaccagatcaacattcggaacagcgagactgataccattatctttattagaaaagcagagcggagccactctggtaaatatgatcttcaggtaaaagttgataagtttgttgaaaccgcctccatcgatatccagataatagacaggccaggaccccctcagattgtcaagatcgaggatgtctggggggaaaacgtggcactgacatggacaccgccaaaagatgacggtaatgccgctatcactggatacaccatacagaaggccgacaaaaaatctatggaatggtttactgtcatcgagcattatcaccggaccagcgctaccatcacagaactggtgataggtaacgagtactatttccgagtgtttagcgaaaacatgtgcgggctgagtgaggacgccactatgacaaaggagtcagccgtgattgctcgcgacggcaaaatctacaaaaatcctgtttacgaagactttgacttttccgaagccccaatgtttacacagccactggtaaatacctatgccatcgcgggatacaacgccactcttaattgctctgtgagaggcaatccaaagcccaagatcacgtggatgaaaaacaaagtcgcaattgtggacgatccacgctaccgtatgttctctaaccagggtgtttgcaccttagaaatccgtaaaccctcaccatacgatgggggaacctattgctgtaaagccgtcaacgacctggggaccgtggagatcgaatgtaagctggaggtaaaagttatctatcaaggagtgaacacgcccggtcagcccgtttttctcgagggccagcagcaagtggggtcaccatccgctgactcaagttgcaaagcctacctccaaacgtag

SEQ ID NO: 231549 - DNA, 3384 bp, synthetic construct
  misc_feature 1..3384: note = Description of Artificial Sequence: Synthetic coding sequence
  source 1..3384: mol_type = other DNA
atgccagagccaacaaagaaagaggagaacgaagtgcccgcacccgcaccgcctccagaagaaccctccaaggagaaggaagctggaaccacccctgccaaagactggacgttggtggaaaccccccctggagaggaacaggcgaagcaaaatgccaatagccagctttccatcttgtttatcgaaaaacctcagggtggtacggtcaaagttggagaggacatcacctttatcgcgaaagtcaaagctgaggacctgctgcggaaacctacaatcaaatggttcaaggggaaatggatggatctcgcttctaaggccggaaagcacctgcagctgaaagagacatttgaacggcactcccgagtctatacttttgaaatgcagatcatcaaggcaaaggacaacttcgcaggaaattaccgctgcgaagtgacttacaaagataaattcgattcttgttcatttgacttagaggtccatgaatcaacgggtactactcccaacattgatatccggtctgcttttaagagaagggaggtcaagcagcaagaggaggagccacaggtggatgtttgggagctgttgaaaaatgcaaagccatctgaatacgaaaagattgcattccagtatggtatcacagatttgagaggaatgctcaagagactcaagcggatgcgaagggaggaaaagaaatccgctgcgtttgccaaaatactggaccctgcttaccaggtggacaagggcggacgcgttcggtttgtggtcgaactggcagatccgaagttggaggtcaagtggtataagaacggccaagaaattagaccctccaccaaatatattttcgagcataaggggtgtcagcgcattctatttatcaacaactgtcagatgacggacgacagcgagtactacgtgaccgctggagacgagaaatgctccacagagctgttcgtaagagagcctccaattatggtgacaaagcagctcgaggacactactgcctactgtggggaaagggtggagcttgagtgcgaggttagcgaggatgatgctaacgttaaatggttcaaaaatggagaagagatcatccctggacccaagtcacggtataggattcgggtggaggggaaaaagcacattctgatcatcgaaggcgctactaaagccgatgctgcagaatactcagttatgacaactggaggccaatccagtgccaaactgtccgtagatcttaaacccctcaaaattctgaccccgctcaccgatcagacagtgaatttggggaaggagatctgcctcaagtgtgagatttctgagaatattcccggaaaatggacaaaaaacggtctgcctgtgcaggagagcgatcggttaaaagtcgtccataagggcagaatacacaaacttgttatcgccaacgcattaactgaggatgaaggggactacgtcttcgccccagacgcttataatgtgactctgcctgccaaggtccatgtgatcgacccacctaagatcattttagacggactggacgccgacaataccgtgactgtcatagcagggaataagctaagactggagatcccaatctcgggtgagcccccaccgaaggccatgtggtcccggggagacaaagccatcatggaagggtcaggaagaattaggaccgagagctaccctgattccagtacactggtgatcgacattgccgaaagggacgacagcggtgtgtaccacattaatctgaagaacgaggcgggagaagctcatgcttctatcaaggtcaaggttgttgatttccccgaccctcctgtggcccctacggtcacagaagtgggagatgactggtgtataatgaattgggaacctcccgcttacgatgggggtagcccgatcttgggatattttattgagagaaaaaagaaacagtcgagtcggtggatgcgcctgaatttcgatctctgtaaagaaaccacgttcgagcctaaaaagatgattgaaggggttgcctatgaagtgcgaatcttcgctgtgaacgctatcggaatctcaaagcctagcatgccgtccaggccattcgtccccctggccgtcactagtccgccaaccctgctgacagtagactcagtgacggacaccacagttacaatgcggtggaggcctccagaccacataggagccgctggtctcgatggatatgtgctggagtactgttttgagggaacggaagattggatcgtggctaataaagacttgattgataaaacaaagttcacgattactggtctccccactgatgccaagatctttgtccgggtaaaggcagtgaacgcagccggagccagcgaacctaagtattacagccagcctattctggtaaaggagatcattgagccacccaaaattaggatccccagacatctgaaacagacctacattcggagagtcggcgaggccgttaatttagttatcccgtttcaggggaaacctcgccctgaactgacctggaaaaaagatggagctgagatcgataagaaccagatcaacatccgcaactcggaaacagacacaatcatttttattaggaaggctgaacgctctcatagtgggaaatacgatctccaggtgaaggtagataagttcgttgagacagcttccatagatattcagattattgacagaccaggccctccacagatcgtgaaaatcgaggacgtttggggggaaaacgtcgctttaacttggacgccgccaaaggatgatgggaatgctgcgatcactggatatactatccaaaaggctgacaaaaagagcatggaatggttcacagtgatagagcactatcatcgcacgtccgcgacgataaccgagctcgttatcggaaacgagtattactttcgggttttcagcgagaacatgtgcgggttgagtgaggatgcgacaatgacgaaggaaagcgcagtcattgctcgggacggaaaaatatacaagaaccctgtgtacgaagatttcgacttcagcgaagccccaatgttcacccagccgctagtgaatacgtacgcgattgcagggtacaacgcgacactgaattgtagcgtgcgtggcaatccaaagcccaagattacatggatgaagaacaaggttgccattgtagatgacccccgatataggatgtttagtaaccagggcgtttgtactctcgaaataagaaagccaagtccttatgatggaggaacctactgttgcaaagctgtgaacgaccttggcacagttgaaattgaatgtaaacttgaggttaaggtcatctaccagggcgttaatacgccagggcagcctgtctttctggaaggccagcagcagtccttgcataacaaggatttctag

SEQ ID NO: 231550 - DNA, 3363 bp, synthetic construct
  misc_feature 1..3363: note = Description of Artificial Sequence: Synthetic coding sequence
  source 1..3363: mol_type = other DNA
atgcccgagcccaccaagaaggaggattggaccctggtggagactccccctggcgaagaacaagcgaagcaaaatgctaacagtcagctgagcattctatttatcgagaaacctcaggggggtacagtcaaggtcggggaggatatcactttcattgctaaggtgaaggcagaggacctgctgagaaagcccactatcaaatggttcaaggggaaatggatggacctcgcaagcaaggccggaaagcacttacagctgaaggaaactttcgaacggcattctagggtgtacacgttcgaaatgcagatcattaaagccaaagacaacttcgctggtaattaccgatgtgaggtcacgtataaggataagttcgactcttgcagcttcgacctggaggtccacgagtccacgggcactacaccaaacattgacattagaagtgcctttaaaagatctggggagggccaggaagatgctggggaattggacttttcggggctgctgaagcgcagagaggtgaaacaacaggaagaggaaccccaagttgatgtctgggagcttctaaagaacgctaagcctagtgagtatgaaaagatcgccttccagtacggtatcaccgatttgcggggtatgctaaaacggttgaagaggatgcgaagagaggagaagaaatcagccgcttttgcaaagatcctggacccagcttaccaagtcgacaagggcggtagggtaaggtttgtagtcgaactggccgaccccaaacttgaagtgaaatggtataagaacggacaggagattagacctagcaccaagtatatctttgagcacaaaggatgtcagaggattctctttatcaacaattgtcagatgacagacgatagtgagtattacgtgactgccggagacgaaaagtgtagcactgagctgtttgttcgcgaaccccctatcatggtgaccaagcagctggaagacaccactgcctactgcggtgagcgcgtagaattagagtgcgaagtttccgaagacgacgccaacgttaagtggtttaagaatggggaggaaatcatccctggcccaaagtccagataccggattcgggtggaaggcaagaagcatattttgattatcgagggggctaccaaggcggacgcagcagaatactcagtcatgactacgggtgggcagtcatccgcaaaactgagcgtggacctgaaaccgctcaagatacttacgcccctgacagatcagacagtgaatcttggtaaggaaatctgcctgaaatgcgaaataagcgaaaatatccctggaaaatggaccaagaacggactgccagtacaagagtcagaccggctgaaagtggtccataaaggccgtattcacaagttagtgattgctaatgccctgactgaagacgaaggagactacgtcttcgccccagacgcctacaacgtcactttgcctgcaaaggtgcatgttatcgatccccctaagattatactggatggactggacgcagataatactgtgaccgtgatagcagggaataaattgcgtttggagatcccaatctctggcgagcccccaccgaaggccatgtggtcacgcggagacaaggcaatcatggagggatcaggaaggattcgtactgaaagttatccagattcatcaaccctggttatcgatatcgcagaacgagacgactccggcgtgtatcacattaacttgaagaacgaagctggggaggcacacgcaagcataaaggtgaaagtggtagattttcccgacccaccggtcgcgccaaccgtgaccgaggtgggagacgactggtgcatcatgaattgggagccaccagcctacgacggcggatcccccattcttggatatttcatagagcggaagaaaaaacagagtagccgttggatgagactcaacttcgatctctgcaaggaaacaacctttgagcccaagaagatgattgagggagtcgcctatgaggtgcgaattttcgcagtaaatgccattggtattagcaaaccgagtatgccgtctaggcccttcgtgcctctggcggtgacttcacctccaacccttttgaccgtcgacagcgtgacagatactacggttaccatgcggtggaggccgcctgatcacatcggtgcagctggactggacgggtatgtgcttgagtactgcttcgaggggacggaagactggatcgtcgcgaacaaagacctcattgacaagacaaagtttacaatcacggggttgcccacagacgctaaaatttttgtgcgagttaaggctgtgaacgctgcgggagcttccgagcccaaatattacagccagccaatcctggtgaaggaaattatcgaacccccaaagattaggataccccgacaccttaagcagacttacattagaagagtgggggaagcggtgaatctcgtgattccgttccagggaaagcctagacccgaactgacttggaagaaagatggggcagaaattgacaagaaccagatcaatattaggaacagcgagaccgacaccatcatttttatccgtaaagcagaaaggagtcacagcggcaagtatgacttgcaagtgaaagtggataagttcgttgaaactgcttcaatcgacattcagatcattgaccggcctggaccaccacaaattgtgaagattgaggatgtttggggcgagaacgtggccctgacctggaccccccctaaggacgacggtaatgcggcaattaccggctacaccatccagaaggcagataaaaagagtatggagtggttcacggttattgagcactaccatagaacttcagccactatcacagaacttgtgatcggaaatgaatactatttccgggtgttctctgaaaatatgtgtggcctttccgaggatgccaccatgacaaaggagtcggccgtgatcgcaagagacggcaaaatctacaaaaatcctgtgtacgaagacttcgatttctctgaagctcccatgttcacacagcccttggtgaacacctatgctatagctggctacaatgctactctcaactgtagcgtgcggggtaaccctaagcccaaaatcacatggatgaaaaataaggttgccatcgtggacgatccacggtatagaatgttctcgaaccaaggtgtgtgcactctggaaattagaaagccttccccatacgatgggggtacttactgctgcaaggctgtgaacgacttgggaacagtggaaatcgaatgtaagctggaggttaaagtcatttatcagggggtcaacacaccgggtcagccagtcttcttggagggccaacagcaatcccttcacaataaagacttctag

SEQ ID NO: 231551 - DNA, 3399 bp, synthetic construct
  misc_feature 1..3399: note = Description of Artificial Sequence: Synthetic coding sequence
  source 1..3399: mol_type = other DNA
atgccggagccaaccaaaaaagaagagaacgaagtcccagcgcctgcccctccccctgaggactggacccttgtggaaaccccgccaggcgaggaacaggctaagcagaatgcaaattcccagctgtcaatcctttttatagaaaagccacaagggggtaccgtcaaagtgggggaggacataacatttatagccaaggtgaaagctgaagatctgttgcggaaacctacaataaaatggtttaagggaaaatggatggacctggcctccaaggctgggaagcacttacaacttaaagagacattcgaacgtcattcccgggtgtacactttcgaaatgcaaatcattaaagccaaagacaatttcgcaggcaactaccgttgcgaagttacgtataaagacaaatttgactcatgcagtttcgatcttgaagtgcatgagagtaccggcaccacacccaacattgatattagaagcgcctttaagcggtccggggaaggacaggaggacgctggcgaactcgactttagcggtctacttaagagaagggaggtgaagcagcaggaagaagaaccacaggtggacgtatgggagctcctaaaaaatgcgaaacccagtgaatacgagaagatcgcatttcagtacgggatcaccgacttgaggggaatgctcaagcgcctcaagaggatgcgcagagaagaaaaaaagagtgccgcatttgccaagatactcgacccagcataccaagtagataagggtggtcgtgtgaggttcgtggttgagttagccgatcccaagcttgaggttaaatggtacaaaaacgggcaggaaattcgcccatcaaccaagtacatcttcgagcacaaggggtgccagaggatcctattcatcaataactgccagatgacagacgacagtgagtactatgttacagctggggatgagaagtgctcaacggagttattcgtacgcgaaccacccataatggtgactaaacagctggaagacacaaccgcgtactgtggtgagcgggtagagcttgagtgtgaggtgtccgaggacgacgctaacgttaagtggtttaagaatggagaggaaatcatcccagggcctaaaagccggtatcgaatacgtgtggaaggaaagaagcatattctaattattgaaggcgctaccaaggccgatgcagctgaatatagcgtcatgacaaccgggggtcagtcgagtgctaaactgtccgtggatctgaagcctctcaagatattgacccctctgaccgaccagaccgtgaacctcggaaaagaaatctgtttgaaatgcgagataagcgaaaacatcccgggaaagtggacaaaaaatggactgcctgtgcaggagagcgacaggttgaaagtggtgcacaaaggcagaattcataaactggtgatagctaacgctctgacagaagacgagggcgactacgttttcgcacccgacgcctataacgtgaccctgcccgctaaagtccacgtcatcgatccgccaaagatcatcctggatggactcgacgccgataacaccgtgactgtaatagcgggaaataaattgcgtctggagattcctattagcggcgaacctcccccaaaggccatgtggagcagaggtgacaaggcgatcatggagggctccggcaggattcggactgagagctatccagattccagtacgttggtaattgatatcgctgagagagacgattccggcgtgtatcacattaacctaaaaaatgaagctggggaagcccacgcctcaattaaagtcaaggtggtggacttccctgacccacctgtggcccctaccgtcaccgaggtgggcgacgactggtgcattatgaactgggaacccccagcctatgatgggggaagccctatattggggtactttattgagagaaagaaaaagcagagttccaggtggatgcgactcaatttcgatttgtgcaaggagaccacctttgagccaaagaaaatgattgaaggggtggcttatgaagtccgaatctttgcggtcaatgctattgggattagtaaaccttcaatgcctagtcgcccttttgtgcctctcgcagtgaccagtccccctaccctcctcactgttgattccgttaccgacaccaccgttaccatgcggtggcgaccccctgaccacatcggtgctgctggattggatggttacgtgttggagtactgttttgagggtactgaagattggattgttgctaataaggatctgatcgacaaaacaaagtttactattactggcttacccacagacgcaaaaatatttgttagagtgaaggcagtgaatgccgctggtgccagcgagccaaagtactactcccaaccgatactggttaaggagatcatcgagcccccaaaaatccgaatacctaggcaccttaagcagacctacatccggagggtgggcgaggctgtgaacctggtgatcccttttcaaggtaagccacggcctgagttaacatggaagaaggacggcgctgaaatagataaaaatcagatcaatatccgcaactcagagactgacactattatatttattaggaaagcagagcggagccactccggtaaatacgacctgcaggtgaaagttgataagttcgtcgaaacagcaagcattgacattcagatcattgatcggcctggccctccacagatcgtgaaaatagaggatgtgtggggcgaaaacgtagcccttacatggacaccccctaaggatgacggaaatgcggctatcactggatataccattcagaaagccgataaaaagtccatggaatggtttacggtcattgagcactatcaccgtacaagtgccaccatcacagaacttgtaatcggtaatgaatactactttcgtgttttctctgagaacatgtgcggactctccgaggatgcgactatgacaaaggaaagtgcagtgattgctagagatggtaagatctacaagaatcctgtgtacgaagattttgacttctcggaagccccaatgtttactcaacccctggtgaatacttatgctattgcagggtataacgctacactcaattgctccgtccgaggcaaccccaaacccaagatcacatggatgaaaaacaaagtggccatcgtcgatgatccacgctaccgcatgttcagcaatcaaggcgtgtgtacgctagagatccgtaaaccttccccttatgacggaggtacatactgttgcaaagcagtgaatgacttgggaacggtggagatcgagtgtaaattggaagtgaaagtaatatatcagggtgtgaatacccccggacagcctgtcttcctcgagggccaacaacagagcttgcataacaaggacttttag

SEQ ID NO: 231552 - DNA, 3822 bp, synthetic construct
  misc_feature 1..3822: note = Description of Artificial Sequence: Synthetic coding sequence
  source 1..3822: mol_type = other DNA
atgccagaacccggtaagaagcccgtttctgccttttcaaaaaagcctagatcagtggaggtagccgcagggtccccggcagtgtttgaggccgagactgagcgcgcaggcgtgaaagtgcgttggcaacgcggtgggagcgacatcagcgcgtccaataaatacggtctggccactgaagggacgaggcacactctgactgttcgggaggtgggccctgccgaccaaggaagttacgctgtaattgcaggaagttctaaggtgaagttcgacctgaaggtgatcgaggcagagaaggccgagcctatgctggccccagctccagccccagcggaagctacaggcgcaccgggtgaggctcctgctccagcagccgaattaggtgaaagtgccccatcacccaaaggctccagttctgccgctctcaacggacccacacctggtgcacctgatgaccccattggtttatttgtcatgcgccctcaggatggggaagtgacagtgggaggaagtattacattcagcgcacgcgtggctggtgctagtctccttaaacccccagtcgttaaatggttcaaaggtaagtgggtggatttgtcaagtaaggttggccagcacctacagttacatgatagctatgaccgcgctagcaaagtttatttgtttgaattgcacatcacggatgctcagccagccttcacaggcagctaccgttgcgaggtaagcaccaaggacaaattcgactgttcaaattttaacctgactgttcacgaagctatgggtaccggggatctggatctccttagcgcattcagaaggacatcactggctggcggaggcaggcgcatctccgactctcacgaggacactggcattctggacttttcgagcctgctgaagaaatcttcatcgtttcggacccccagggatagtaagctggaggccccagctgaagaagacgtttgggagatcctgaggcaagccccaccttcagaatatgagcgcatcgcattccagtacggtgtcactgacttgaggggaatgctcaagcgtctcaaaggtatgcgcagggatgaaaaaaagtccacagcctttcagaagaagctcgagcccgcttatcaagtttccaaaggccacaaaattaggctgactgtagaattagctgaccacgacgctgaggtgaagtggctgaaaaacggacaggagattcaaatgtcaggaagatacatatttgagtctataggcgctaagcgaacattgaccatatcacagtgctcgttagctgatgacgcggcttatcaatgcgtcgtcggaggggaaaagtgcagcactgaactgttcgtgaaagagccaccagtgttaattacacggcctctagaggatcagctcgtgatggtggggcagcgagtggagtttgaatgcgaggttagcgaggagggtgcccaggtgaagtggctgaaagatggggttgaactcacacgcgaagagacctttaaatataggtttaagaaggacggccagaggcaccatcttatcataaacgaagccatgctcgaagacgcaggacattacgcgctgtgcaccagcggtggacaagctctcgccgagctaatcgtgcaagagaaaaaactggaagtgtatcagtctattgccgatctaatggtaggcgcaaaagaccaggcagtgtttaagtgtgaagtgtccgatgaaaacgtaaggggcgtgtggctcaaaaacgggaaggagctagtgcccgattccaggattaaggtcagccatatagggcgtgtacataaactgacaatcgacgacgttacacccgctgacgaggctgactacagttttgtccccgaaggatttgcctgcaatttgtctgcaaaacttcacttcatggaggtgaaaatagactttgtccctcgccaggagcctcccaagatacatctcgattgccccggtcgaattcctgataccatagtcgtggtggctggtaacaaactccgtctggacgtaccgataagtggtgatcctgcacctaccgttatttggcagaaggccatcacacaggggaacaaggctccggctagacctgctcccgatgctcccgaagacacgggtgacagcgatgagtgggtctttgacaaaaagctcctatgcgagactgagggcagagtgagagtggaaacaactaaagaccgcagtatctttactgtggaaggggctgaaaaagaggacgaaggcgtgtacaccgtgaccgtgaaaaatcccgtgggcgaggaccaggtcaatctgaccgtgaaagtaatcgacgtgcccgacgccccagccgctcccaagatcagcaacgtgggcgaggactcctgtacagttcagtgggagcctcccgcatatgatgggggtcagccaatcctaggttacattcttgaacgcaaaaagaagaagagctaccgatggatgcgcctgaatttcgacctgattcaggagctgtcccacgaggcccgacggatgatagaaggagtggtctatgagatgcgcgtgtacgcggtgaacgcaatcgggatgagccgccctagcccagcatcgcagccctttatgccaataggaccaccatccgaaccaacacatcttgctgtagaggacgtgtcggatacgaccgtctcactgaaatggcgtcctcctgagagggtcggtgcgggaggtctggatgggtacagcgtcgaatattgtccagagggctgctctgaatgggtggctgctctgcaaggtctgaccgaacatacgtccattctggtgaaagatctgcctacgggggcacgcctactcttccgcgttcgcgctcataacatggccggaccaggggctcctgtgacaactacagagccagtgactgtgcaagagatactccagcgacctcgactgcagctgccccgtcacttacgccagaccatccagaaaaaggtgggcgagcccgtgaatctcctgattccttttcaaggcaaacctagaccccaggttacttggactaaggaaggtcaacctctcgctggcgaggaggttagcataaggaattctccaacagacactatccttttcatcagagccgctcgacgcgtgcactccgggacctatcaggtcacagtgagaattgaaaacatggaagataaagctacactcgtgctgcaggtagtggacaagccatctccccctcaggatctcagagttacggacgcgtggggattaaacgtcgctttagaatggaaaccaccgcaggacgtggggaataccgagctgtgggggtatacagtacagaaggctgataaaaaaacaatggaatggttcacagttcttgaacattacaggagaacgcattgtgtggtgcctgagctgatcatcggcaacggatactatttccgggtgtttagccaaaacatggtgggattttcagatagggccgctactaccaaggaaccagtgtttatcccgcgacctgggatcacctacgaaccacccaactacaaggctctcgacttcagcgaagctcctagcttcacccaacccctggtcaatagaagcgtaatcgcgggatataccgccatgctatgctgtgcagtgagaggatcgcccaaacccaaaattagttggtttaaaaatggtctagacctgggtgaggatgcaaggtttcgaatgttcagcaagcagggagtgctgaccctcgagattagaaagccctgtccttttgatggcggaatttacgtttgtagagccacaaacctgcagggcgaggctcgctgcgagtgtcgtctcgaggttagagttcctcagtag

SEQ ID NO: 231553 - DNA, 3825 bp, synthetic construct
  misc_feature 1..3825: note = Description of Artificial Sequence: Synthetic coding sequence
  source 1..3825: mol_type = other DNA
atgcccgagccaggtaaaaagccggtgagcgcttttagtaagaagcccagatctgtggaggtggctgccggttccccagcagtttttgaagccgagacagaaagagccggagtgaaagttcgctggcaaagaggagggtccgacattagtgcctctaacaaatacggcctcgctacagaagggacaaggcataccctcaccgttagagaggtgggccctgccgaccaagggtcctatgcagtaatagccggttctagtaaggtgaaattcgatttgaaagtgattgaggctgaaaaggccgaacccatgttggctcccgcacccgctcccgctgaagccaccggtgctcctggcgaagctccagcaccagccgctgagctcggtgaaagcgccccttcacctaaaggaagttcctcagctgcccttaacggacctaccccaggtgcacctgacgacccaattggcctttttgtcatgcggcctcaggatggcgaagtaactgttggcggtagcataaccttttctgccagagtagcaggcgcaagtcttctgaaaccccctgtcgtgaagtggttcaaaggaaaatgggtagatctctcatcgaaggtaggacaacacttgcagcttcatgacagctacgacagagctagtaaggtttacctattcgagttgcacatcacagatgcacagcccgctttcacaggtagctaccgctgtgaggttagtacgaaagacaagttcgattgcagtaatttcaatctgacggttcatgaggctatgggtaccggcgatctggaccttttgtcggccttccgaaggacaagtttggcaggcggaggcagaagaatctccgacagtcacgaagacaccggaattttagacttttctagcctactgaaaaagagctcatctttccgcaccccccgtgactcaaagctagaggcacctgctgaagaggacgtgtgggagattctccgccaggcccctccttccgagtatgagcgcatcgccttccagtacggggtgaccgatctgaggggaatgttgaagcgactcaagggtatgcgccgagacgaaaagaagtccaccgccttccagaaaaagctggaacctgcataccaggtttcaaaagggcacaagatcagattgacagttgaattagccgaccatgatgctgaggtgaagtggcttaagaacggtcaggaaatccaaatgtcaggatccaagtatatcttcgaaagtatcggtgcaaagcgtacactaaccatcagtcagtgttccctggccgatgatgcagcctaccagtgcgtagtcggtggggaaaaatgtagcactgaactcttcgtaaaagagccacccgtgctgatcacaagacctctggaagatcagctcgtcatggtgggacagagggtagagtttgagtgcgaggtgagcgaagagggcgcacaggtcaagtggctaaaagatggtgttgagctcacaagggaagaaactttcaagtaccggttcaaaaaagacggacagcgccaccatcttattatcaacgaggctatgctcgaagacgccggacactacgctctttgtacttctgggggacaggccctagcagagttgatcgttcaggagaagaaactagaggtttaccagagtatagctgacctcatggtaggcgcaaaggatcaagccgtgttcaagtgcgaggtgtccgatgagaatgtacgcggagtgtggctgaagaatgggaaggaactggtacctgatagccggattaaagtctcacacattggccgtgtacataaactgaccatcgacgacgtgactccggctgacgaggcggactactcatttgtgcctgagggattcgcttgcaatctgagtgcaaagctacattttatggaggtgaagattgacttcgttcctcggcaggagccaccaaagattcatttggattgtcctggacgcatccctgacaccatcgtggtagtggcaggcaacaaactgcgactcgacgtccctatctccggcgaccctgctccaacagtgatctggcaaaaagcgataacccagggaaacaaggcaccagcccgacctgcaccagatgcgcctgaggacacgggagattcagacgaatgggtctttgataagaagctgttgtgtgagacagaaggacgtgttcgggttgagacgaccaaagaccgctctattttcacagtagagggggcagaaaaagaggatgaaggagtctacaccgtaacggttaagaatccagttggtgaggatcaggttaacttgacggtcaaggtcatcgacgtgccagacgccccagcagccccaaagatttctaacgtgggggaggactcctgcacagtccagtgggagccacctgcctacgacggtgggcagccaattttgggatatattctcgagagaaaaaagaagaaatcctacagatggatgagattgaacttcgacttgatccaagaactgtcccatgaagcccgtaggatgatcgagggcgtggtgtacgaaatgagagtgtacgccgtgaatgccattggaatgtcaagaccatccccggcatcacagcccttcatgccaattgggcctccctccgaacccactcatctggccgtggaagatgtctctgacacaacagtcagcctaaagtggaggcctcccgagcgagtcggagccggtgggctggacggatactccgtagaatattgtcctgagggttgctcagagtgggtggccgctttgcaagggctgaccgaacacacctctatcctggttaaagatctgccgacgggcgcacggcttctgttccgtgtccgggcacacaacatggccggacccggtgccccagtaaccaccacggagcctgtcacagtgcaggaaatcctacaacgacctagactgcagttacctcgccacttaagacagactattcagaaaaaggtcggtgaacctgttaaccttttgattccttttcaggggaaacctcgccctcaggtgacctggaccaaggaaggccagcctctggcgggagaggaagttagtattcggaattcacccacggatacaatcctgttcatcagagccgctcgtcgagtgcacagcggcacttaccaagtcaccgtgcgcatcgagaacatggaggataaagccaccctggtgctgcaagttgtcgacaagcccagtcctccccaggatctgagagtgacggatgcctggggactcaacgttgcactggagtggaagcctccccaggacgtgggtaacaccgagttgtggggatacacagtccagaaagctgacaaaaagaccatggagtggtttacggtgctggagcactacagaagaacccactgcgtcgtccctgagttaatcatcggcaatgggtattatttccgggtattttcccaaaacatggtcgggttctctgacagggctgccactactaaagagccagtgtttatcccacgtcctggcatcacatatgagccgccaaactacaaagccctggattttagcgaggccccaagcttcacccaacccttagtcaaccggagcgtgatcgctggctatacggctatgctgtgctgcgccgttcgagggtcccctaagccaaaaatctcttggtttaagaatggactggacctcggcgaggacgccagatttaggatgttctccaagcagggtgtcttgaccctagaaatcagaaaaccctgcccatttgatggcggaatttacgtctgccgtgcaactaacctgcagggggaggccagatgtgagtgtcggttagaggtacgcgtgccccagtag

SEQ ID NO: 231554 - DNA, 3825 bp, synthetic construct
  misc_feature 1..3825: note = Description of Artificial Sequence: Synthetic coding sequence
  source 1..3825: mol_type = other DNA
atgccagagccaggcaagaaaccggtctcagctttttcaaaaaagcctcggtctgtagaagtggccgcaggaagccctgcggtattcgaagccgaaaccgagagggccggagtgaaagtacgttggcagcgaggaggttctgatatctctgcctccaataagtacgggttggcaacagagggcacaagacatacattgaccgtgagggaggtgggcccagccgatcagggttcttacgctgtcatcgcgggatcatctaaggtgaaatttgatctcaaagttattgaagccgaaaaggctgagcccatgctagcgccagcccctgccccagccgaggcaaccggcgcacctggagaagcacccgcacctgcagccgaattgggagaaagtgctccaagtcccaaaggaagtagctccgcggcactgaacgggcctactcccggagctcctgatgaccctattggcctgtttgtgatgcgccctcaagacggcgaggtcacagtcggcggaagcattactttcagcgcgagggtggccggagcctcactcttgaagcccccagttgtgaagtggtttaagggtaagtgggtggatctgagtagcaaggtcgggcagcacctccaactgcacgactcttacgatcgcgctagcaaagtctatcttttcgagctacacataaccgatgcacaacccgctttcacggggtcttatcgctgcgaggtatccaccaaggacaagttcgattgcagcaacttcaatttaacagttcacgaagcgatgggtacaggggacctagacctgctgagcgcctttcggagaacttcgttagccggtgggggaagacgcatttcagattcccacgaagacactggaattttggacttctctagtctgcttaaaaaacgagatagttttcggacaccacgtgattcaaaactggaagctcctgccgaggaagatgtgtgggaaatcctgaggcaagcccctccctccgaatacgaaaggatcgcctttcagtatggggtgacagatcttaggggcatgctgaagcggctgaagggtatgaggcgcgacgagaagaagtcaacagcgtttcaaaaaaaactggaaccagcataccaggtttccaagggacacaaaatcaggctgacggtggaactggctgatcacgatgccgaagtgaagtggcttaagaacggacaggagatccagatgagcggcagtaagtacatattcgagagtattggggctaaacgcacactgactatctctcagtgtagcttagcagacgacgccgcttatcagtgcgtggtgggaggggagaaatgttccaccgaattgttcgtgaaagaaccccctgttctcattacacgcccactggaagatcagctcgtgatggtaggacagcgtgtggagtttgaatgcgaagtctcagaagagggtgctcaggtgaagtggcttaaggatggagtggaactgacaagagaggagacgttcaaatatcgattcaagaaggatggccaacggcatcatttgatcatcaatgaagcaatgttggaggacgctggtcattacgctttgtgcacctcaggcggacaggctctcgctgaattaattgtccaggaaaaaaagctagaagtataccaatcaatcgccgacctgatggtgggtgctaaggaccaagccgtattcaaatgcgaggtgagcgacgaaaacgtcaggggggtttggctgaaaaatgggaaagaacttgtcccagactccagaatcaaggtgagccacatcggccgagttcacaagctcaccatcgacgatgtgaccccggctgacgaggcagactactctttcgtgcccgaaggcttcgcctgcaacctgagtgccaaactccacttcatggaggtgaagattgacttcgttcccagacaggaaccccctaaaatccatctcgattgcccgggacggatacccgatactatcgtggtggtggccggtaacaaactgcgcctcgacgtgcccattagcggcgaccctgcgccaacagtgatttggcaaaaggctatcactcaggggaataaggcaccagcacgcccagcgcctgatgcccctgaggacacgggagactctgatgagtgggtctttgacaaaaaactgttgtgtgagaccgagggacgtgtacgagtggagaccaccaaggacagatcgatctttaccgtcgaaggagccgaaaaagaggatgaaggcgtatacactgtgaccgtgaagaatcccgtcggtgaggaccaggtcaacctcaccgttaaagttatcgacgtgccagatgccccagccgctcctaagatttcaaacgtaggggaagatagttgcaccgtacagtgggagcccccagcgtatgacggagggcaaccaatcctgggatacattttggagcgcaagaaaaaaaagagctatcgctggatgcgactaaacttcgatctcattcaggaactcagccatgaggcacggaggatgatcgaaggcgtagtttatgagatgagagtgtacgccgtgaatgctatcggcatgtccagaccttcgcccgctagccagccattcatgccgattggcccaccgagtgagccaacacacctggcagtggaggacgtgtccgacaccactgtctccctgaagtggcgtccaccagaacgcgtgggtgcgggtggacttgacggttattctgtggaatattgccccgaaggctgctctgaatgggtggcggctctgcaagggctgactgaacatacgagcatcctcgtcaaggatctgccaaccggagcacgtcttttatttagggtgcgggctcacaacatggcaggccctggagcgccagttactactacagaacctgtaacggtccaggagattctgcagcgaccaagactacagctgccacgacacctgcggcagaccatccagaagaaagttggagagccagtaaatctgctcataccattccagggaaagcctcgaccacaggtgacttggactaaggaagggcagccgctcgcaggagaggaggtttcaatacgaaacagccccacagatactatactgttcattcgcgctgctaggcgagtccatagcggcacctatcaggtgaccgttaggattgaaaatatggaagacaaggcaacactggtcttgcaggtggtcgacaagccgagcccccctcaggatttacgtgttaccgatgcttggggattgaacgttgctctggagtggaagcccccacaggatgtcggcaatacagagttgtggggctatacagttcagaaagccgataaaaagaccatggagtggttcacggtcctcgagcactataggcgcacccactgcgtagtgcctgagttgattattggtaacggttactactttcgcgtgttcagtcagaatatggtcgggttctccgaccgtgccgcaacaacaaaggaaccagtgtttattccgagacccggaatcacgtatgagcctcccaactataaggctttagatttctctgaagctcctagttttacgcagccactcgtgaatcgctccgttatcgccggttacaccgccatgttatgctgcgcagtgcgaggttcccccaagccaaaaatcagctggttcaagaatggactggatctgggcgaggatgcacgattccgtatgttcagcaagcaaggggtgctgacgctggaaattaggaaaccttgcccattcgacgggggaatatacgtgtgtcgcgctactaatctacagggggaagcgagatgcgagtgcagacttgaggtcagggtacctcaatag

SEQ ID NO: 231555 - DNA, 3426 bp, synthetic construct
  misc_feature 1..3426: note = Description of Artificial Sequence: Synthetic coding sequence
  source 1..3426: mol_type = other DNA
atgcccgaggcgaagcctgctgctaagaaagcccctaagggcaaagacgctcctaagggagcgcctaaggaggcccctcccaaagaggcccctgccgaagctccaaaggaagctccccctgaggatcaaagtcccaccgctgaagaacccaccggggtctttctgaaaaagccagattccgttagcgtggaaacagggaaggatgctgtggtggttgcaaaggtgaacgggaaggaacttccagacaagcccacaatcaagtggttcaaaggaaagtggttggaactgggttctaagagcggcgctcggttttcttttaaagagtcacataattcagcaagcaatgtctataccgtggaactgcacattgggaaggtcgtactcggggaccgagggtattatcgacttgaggttaaggcaaaagatacttgtgacagctgtggattcaacattgacgtggaagccccaagacaggatgccagtggccagagtctagagagcttcaaaagaactagcgagaagaagtctgatacggctggagaactcgacttctctgggcttctgaagaagagagaggttgtggaagaggaaaaaaaaaagaaaaaaaaagacgatgatgacctgggcattcctcccgagatttgggagctgctgaagggagcgaagaagagtgagtacgagaagatcgcatttcaatatggcatcacagacctgcgaggtatgctgaagagattaaaaaaggcaaaagtggaagtgaagaaatcagcagcttttactaaaaagttggaccctgcgtatcaggtcgatagaggcaataaaattaaactaatggttgagatatcggatccagatctgaccctcaagtggttcaaaaatggccaggagatcaaacccagctccaagtacgttttcgaaaatgtgggaaagaaaagaatattgaccattaataaatgcaccttagctgatgacgctgcatacgaagttgcggtgaaagacgaaaagtgctttaccgagctttttgttaaggagcctccagtcttgattgtgacccctctcgaggaccaacaggtgttcgtgggcgaccgggtcgagatggccgtagaagtgtctgaagagggggctcaggtaatgtggatgaaagatggggtggagctgacaagggaggactctttcaaagcccgataccggtttaaaaaggacggtaaacgccacatcctgatcttttctgatgtagtgcaggaagacaggggtcggtaccaggtcatcacgaatggaggtcagtgtgaagctgaacttatcgtagaggagaagcagctcgaagttctgcaggacattgccgacttaacagttaaagccagcgagcaggcagtgttcaagtgtgaggtgagtgacgagaaggttactggtaaatggtataaaaatggagtggaagtcaggccaagcaaacgaattaccatcagtcacgtaggaagattccacaagctggtgattgatgatgtgagacccgaagacgaaggcgattacacttttgtcccagatggatacgcgttgtcactttctgctaagcttaacttcttggaaataaaggtggaatatgtgcctaagcaggaaccgccaaaaatccatctggactgcagtggaaaaacctctgagaacgcaatcgtcgtggtggcaggcaataaactgcggctcgacgtgtctattaccggcgaaccccctcctgtggccacttggctcaaaggagatgaagtattcaccactaccgaaggcaggacgagaatagagaagagagtcgattgtagcagctttgtgatcgaaagcgcacagcgcgaggatgaagggaggtatacaattaaagttacaaatcctgtaggagaggacgttgcaagcatcttcctacaagtggtggacgtgcctgaccccccagaggccgtgagaatcacatcagtcggggaggattgggcgatcctcgtctgggagccaccgatgtacgacgggggaaagcctgttaccggctacctggttgagcggaaaaagaaaggaagtcagcgttggatgaagcttaacttcgaggtgttcaccgagacaacctacgaaagtacaaaaatgatagagggaatcctgtatgaaatgagggtgttcgctgtgaacgctattggcgtctcccaaccatctatgaacacaaaacctttcatgcccatcgccccaacaagcgagcccttacatcttattgtcgaagacgttactgacactaccacaacactgaagtggcgccctccaaatcggatcggcgcaggagggattgacggctacttggtggagtactgcctcgagggcagcgaagaatgggtgcccgcaaacactgagcccgtcgaacgttgtggatttacggtgaagaatctcccaaccggtgctcgtattctctttcgcgttgtcggagttaacatcgcagggaggtcggagcccgctacactcgcccagcctgtgactatcagagaaattgctgagcctccaaagatcaggctgcctcgacatctccgccagacatatatcagaaaagtgggagaacagttaaacttggtggttccgttccaagggaaaccgcgtcctcaggtcgtctggactaagggtggcgcacccttagacacatcacgagttcacgtccggaccagtgacttcgacactgtgtttttcgttaggcaggctgcccgtagcgacagcggggagtacgagctgtccgttcagatcgagaatatgaaggacaccgcgaccattcggatcagagtcgtggagaaggccggaccgcctatcaatgttatggttaaagaggtttggggcaccaatgcgctcgtcgagtggcaggcaccaaaagatgacgggaatagtgagatcatgggctatttcgtgcagaaagcggataagaagacgatggagtggttcaacgtttatgagagaaaccgacatactagctgcaccgttagcgatctaattgtgggcaatgaatattattttcgagtgtataccgaaaatatttgcggactttccgactctccaggggtatcaaagaataccgccaggattctcaaaacaggaatcacctttaaacctttcgaatataaggagcatgacttccggatggctccgaagttcctaacacctctgattgatagggttgtcgtagcaggttattccgccgcattgaactgcgcagtgcggggtcacccgaaacccaaggtggtttggatgaaaaataagatggagattcgggaggatccaaaatttctaataaccaactatcagggagtgctgaccctgaacattagacgacccagcccatttgacgccggtacatacacgtgtcgggcagtgaacgagctgggtgaagccctagctgagtgcaagctcgaggttagggtaccccagtag

SEQ ID NO: 231556 - DNA, 3426 bp, synthetic construct
  misc_feature 1..3426: note = Description of Artificial Sequence: Synthetic coding sequence
  source 1..3426: mol_type = other DNA
atgcctgaacctacaaaaaaggaggagaacgaggttcctgcaccagcgcctccacctgaggagccgagtaaggagaaggaggctggtacaacaccagccaaggattggacactcgtcgagacacctccaggagaggagcaggcaaagcaaaatgcaaactcccaactctctattttgtttattgaaaagcctcaagggggaacagtcaaggtgggggaggatattactttcatcgccaaggtcaaggctgaagacctgctgcgcaaacccaccatcaaatggttcaaaggaaagtggatggatttagcttccaaggctggcaaacacctgcagcttaaggaaacattcgagcgccacagccgcgtttacacgtttgagatgcaaatcatcaaagccaaggataatttcgccggaaattacagatgcgaagtgacatataaggataaattcgatagttgttctttcgatctggaggtgcatgagagcaccggaaccacgccaaacatcgatatccgttcagctttcaaaagaagcggcgaaggccaagaggacgccggtgagctcgacttctccggcctgctaaagaggcgcgaagttaaacagcaggaggaggaaccacaggtggatgtctgggaactgctcaagaacgcaaagcctagtgagtatgagaaaattgcatttcagtatggcatcacagacctgagaggcatgctcaaacggctgaagcgcatgagaagagaagaaaagaaatctgccgcattcgccaagatcttggatcctgcttatcaagtagataaggggggacgggtcaggtttgtggtggaactcgctgaccctaaattagaagtgaagtggtataagaacggccaggagatccgccctagcaccaagtatattttcgagcacaaaggctgccagcgaatactctttataaataattgtcagatgaccgacgacagtgagtactacgtaacagccggagacgaaaagtgttccactgagctgttcgttcgcgaaccaccaattatggtcaccaaacagctggaggataccacggcatactgcggagaacgagtcgagttagaatgcgaagtctccgaagatgacgccaacgtcaagtggttcaaaaatggggaggaaatcatacccggacctaaaagtaggtatcggatcagggtggagggtaagaaacacatactgatcattgaaggagcaacaaaggctgatgccgctgaatacagcgtgatgaccaccggcggacagtcttctgcaaagctaagcgtagacctgaaaccactgaagattctgacacccttaactgaccagacagtcaatcttggcaaggaaatctgtttgaagtgtgagataagcgaaaacattcccggtaaatggacgaaaaacgggctgcccgttcaagagtcagacagactcaaggtggtgcacaagggcaggatacacaagctggtcatagcaaatgccctcaccgaggacgaaggcgattatgtgtttgcacccgatgcgtacaatgtgactctgccggcaaaagtccatgtgatcgaccctccaaagatcatactggacggactggatgccgacaataccgtgacggttattgccggtaacaaactgaggctcgaaatccccatttctggcgagcctcctcctaaggctatgtggagcaggggcgataaggctattatggagggctctggaaggattcggacggaatcatatcctgatagttccacacttgtcatcgatattgcagagcgcgatgatagcggcgtgtaccacattaatctgaagaacgaagccggtgaggcccacgcctcaataaaagtcaaggtggtggatttccccgaccccccagtagctcctaccgtcactgaagttggcgatgactggtgtataatgaactgggagccacctgcatacgatgggggatctccaatactgggatacttcatcgaaaggaaaaagaagcagtcttcacgatggatgaggctcaatttcgatctttgcaaggagacaacgttcgaacccaagaaaatgatcgaaggcgttgcttacgaggtcaggatcttcgctgtcaatgctatcggcataagcaagccctccatgccctctcgcccattcgtgcccctggcagtgacctcgccgccaaccctcctcacagtggacagcgttacggacaccaccgttaccatgcgctggagacccccagatcacatcggcgctgccggacttgatgggtacgttctggagtactgttttgaggggtcgacttctgctaagcagagcgacgagaacggggaggcagcttacgatctccccgctgaggactggatcgtagcgaataaagacttgatcgataagaccaagttcacaataaccggattgcctacagatgctaagattttcgtcagggtcaaggcagtgaacgccgctggcgcatctgaaccaaaatactactcccagcccatcctagtgaaggagataattgagccacctaaaatccgcataccgagacacctgaaacaaacttatatccgaagggtgggagaagctgtcaatcttgtgatcccctttcagggtaaacccaggccagagctcacctggaagaaagatggggctgagatcgacaaaaaccagattaacattcggaattccgagacagacaccattatattcatccggaaggccgaaagatctcatagcggcaagtacgatctgcaggttaaggtggacaaatttgttgagactgcctccatcgatattcagatcatcgatcggcctggccctccccagatcgttaagatagaggatgtgtggggcgagaacgtagcactgacttggacccctcccaaggacgacgggaacgctgccattaccggctacactattcagaaagccgacaaaaagagtatggagtggttcaccgtaatagaacattaccaccggacgtctgctacaatcaccgagctggtgatcggaaatgagtattattttcgcgtgttctcagagaatatgtgcggcctttcagaggatgcgacgatgacaaaagagagcgctgtcatcgcacgggacgggaagatctataaaaaccccgtctacgaggatttcgattttagtgaggcacctatgttcacccaaccacttgttaatacttacgcaattgccggttacaacgcaacgttgaattgctcagtcagggggaatccaaaacctaaaatcacttggatgaagaacaaggtggcaattgttgatgaccccagatatagaatgttctcaaatcagggagtctgtacactggagattcgtaagccaagcccctatgatgggggaacatattgctgcaaagcagtgaatgaccttggaacggtagaaatcgagtgtaagctcgaggtgaaagtaatagcccagtag

SEQ ID NO: 231557 - DNA, 3516 bp, synthetic construct
  misc_feature 1..3516: note = Description of Artificial Sequence: Synthetic coding sequence
  source 1..3516: mol_type = other DNA
atgcccgaacccaccaagaaagaggaaaatgaggtgccagctcctgctccgccaccggaagagccatctaaagagaaggaagccggaacgaccccagccaaagacgaggaggaagtaagtccccctagcgctttgcctccgggtctggggagtcgcgctctggaacggaaggattctgactggacgctggtcgaaaccccgcctggggaggaacaagccaagcagaacgccaactcccagctctcaatcctgttcattgagaagccacagggagggactgtgaaagtgggcgaggacataacatttattgccaaagtcaaggctgaggatctgctccgaaagcctaccattaagtggtttaagggcaagtggatggatctggcaagtaaggcaggaaagcatctgcagctgaaggagacctttgagcggcattcccgcgtctatactttcgagatgcaaattattaaggccaaggacaatttcgccggaaactaccgctgtgaagtgacttataaggacaagtttgactcctgctctttcgatttggaggtgcatgaatcgacaggtaccactcctaacattgatattagatctgcctttaagcggagtggtgagggtcaggaggatgctggagaactggacttttcaggactgctcaagcgcagggaggtgaagcaacaggaggaagagccccaggtggatgtatgggaactgcttaagaacgctaagcccagcgagtacgaaaagatagctttccagtacgggattaccgatttgagaggaatgttaaagcgcctaaagcggatgagaagagaggaaaagaagagtgccgctttcgctaaaattctggatcctgcataccaggtggacaagggcggaagagtccgtttcgtcgtggaacttgctgacccgaagctggaggtaaagtggtataagaacgggcaggaaatccgccctagcacgaagtacatcttcgagcataaaggctgtcagcggatcctgttcattaacaactgccagatgaccgatgactctgaatactacgtgactgcaggagatgagaagtgttcaacagagctgttcgtgcgggagcctcccattatggtgaccaagcagctcgaagataccactgcgtactgtggagaaagagtggaactggagtgcgaagtgtctgaagatgacgctaatgtcaagtggtttaagaacggcgaagagattattcccggacctaagagccggtacaggattcgcgtggagggcaagaaacacatactgataattgaaggcgcaaccaaggccgacgctgccgagtactccgtgatgacaaccgggggacagagttccgccaagctgagcgttgatcttaagcctctgaagatcctgacgcccctgacagatcagaccgttaacctgggtaaggagatctgcctcaagtgcgagattagcgagaacatacctggtaaatggacaaagaacggtctgcccgtccaagagtccgacaggctgaaggttgtccacaaaggaaggatccacaaacttgtgatagctaatgccttaacagaagatgagggcgactatgtgtttgcgcctgatgcatacaacgtcaccctccccgctaaggtgcatgtgatcgacccgccaaaaattatactggacgggctggatgcggataatacagtcaccgtgattgccggaaataagctccggctggagattccaattagcggtgagccccctcccaaggccatgtggagcaggggagataaagcgattatggagggaagcgggcgaatccgtacggaatcctaccccgattcttccactttagtgatcgatatcgcagaacgcgatgactctggcgtgtaccacatcaaccttaaaaatgaggctggagaagctcatgcctccatcaaggtcaaagtggtggatttcccggatccacccgtcgctcccaccgtcactgaggtcggcgatgattggtgcattatgaactgggagccccctgcatatgacgggggatccccaatactgggctactttatagagaggaaaaaaaaacagtcttcacgctggatgcgactgaactttgacctctgtaaagagaccacgttcgagccaaagaagatgattgaaggagtggcctacgaggttaggatttttgcggtaaacgccatcgggatctcaaaaccaagtatgccttctcgcccatttgtgcccctggcggtcacttcacctccgaccctccttaccgtggactccgtgaccgacaccactgtaaccatgaggtggagacccccagaccatattggcgctgcgggactggatgggtatgtgctagaatactgctttgaagggactgaagactggatagtagccaataaagacttgattgataagactaaattcactattacgggcctgccaactgacgccaagatcttcgttcgggttaaggcagttaacgccgctggcgctagtgaaccaaagtattattcccagccgatcctggttaaggaaatcatcgaacccccaaaaatcagaattcctcgacacctgaagcagacctacattagaagagtgggtgaagcagtgaatctggtgatccctttccaaggcaagccgcgtcctgaacttacttggaaaaaggacggggctgagatcgacaaaaatcagatcaatattcgaaactctgaaaccgatacaattatttttataagaaaggctgaacgctctcatagtggtaaatacgaccttcaagtaaaagttgacaaatttgtggaaacagcatcaattgatatccaaataatcgataggcccggtccgccacaaatagtgaaaattgaggatgtgtggggtgaaaatgtggctctgacatggaccccaccaaaagatgatggcaacgccgcaatcaccggttatacaattcagaaagcggataagaaatctatggagtggttcaccgtcatagagcactaccatagaacgagcgcgacaattacagagctggtgattggcaatgaatactattttcgggtattctctgagaacatgtgtggacttagtgaagacgcgacaatgactaaagaaagcgcagttatcgcccgagacggcaagatttacaagaatccagtgtacgaagattttgatttctccgaagcacctatgtttacacagcccctggtgaacacttatgccattgctggatacaatgccacactaaactgctcagtccggggaaatcccaaacctaagattacctggatgaagaataaagtggccatcgtcgacgatcctcgctaccgaatgttttccaaccaaggggtttgtaccctggagattcgaaagccatcaccttatgatggtggtacgtactgttgcaaggccgtcaacgatctgggaacagtggaaatagagtgcaaactagaggtaaaagtgatctatcaaggcgtgaatacgcctgggcaaccagtgttcctggagggacagcagcaatcattacataacaaagatttttag

SEQ ID NO: 231558 - DNA, 3447 bp, synthetic construct
  misc_feature 1..3447: note = Description of Artificial Sequence: Synthetic coding sequence
  source 1..3447: mol_type = other DNA
atgcccgagcccaccaaaaaggaagagaatgaggtacctgcgcctgccccacccccagaagagccttccaaggagaaggaggcgggaaccacacccgcaaaggatgaggaggaggtgtcccccccatctgccctcccacccggattaggatctcgtgcccttgagcggaaggattccgactggaccctcgtagagaccccacccggagaggaacaggcgaaacaaaacgccaatagtcagttgagcatcctattcattgaaaagcctcagggtgggacagtcaaggtgggcgaagacattacctttattgccaaggtcaaagcagaggacctgttgcggaagcccactatcaaatggtttaagggaaagtggatggacctggcctccaaggctggaaagcacctgcagctgaaggagacattcgagaggcactcccgagtgtacacgttcgagatgcagatcattaaggctaaggacaatttcgctggtaactacaggtgtgaagttacatacaaagacaagttcgactcatgctccttcgatctagaggtgcacgagagtaccggaaccactccaaacattgacattaggtcagcatttaagcgttctggcgaaggacaggaagacgccggtgagctggacttctccgggctgctgaaacgacgagaggtcaagcagcaggaagaggagccccaggtggacgtttgggaactgctcaagaatgcaaagcctagtgagtatgaaaaaattgcctttcaatatggaatcacagatctccggggtatgttgaaacgcctcaagagaatgcgcagagaggagaagaagagcgcagctttcgccaagatcctggaccccgcttaccaggtcgataagggaggcagagtccggtttgttgtggaactggcggacccaaaactggaagtgaagtggtataaaaatggccaggagattcgcccttccaccaagtacatcttcgagcacaaagggtgccagagaatcctgttcatcaacaattgtcagatgacggatgacagcgaatattatgtgaccgcaggcgacgaaaaatgttctacggagcttttcgttagagaaccccctatcatggttaccaaacaacttgaagacaccaccgcttattgcggagagcgtgtcgaactggaatgtgaggtgtccgaggatgacgcgaacgtgaagtggttcaaaaacggggaagagatcattccaggacctaagtcccgctaccgaatccgcgttgaaggcaagaagcacatactcataattgagggcgcaacaaaagccgatgccgcagagtattcggtaatgactactggcggtcaatcatcggctaaactgtctgtggacctgaaaccattaaagattttgacacctttaaccgatcagacggttaatctgggcaaagaaatttgtctgaaatgtgagatctccgaaaacatccccggtaagtggactaagaacggcttgcccgttcaagagagcgataggctcaaggttgttcacaagggcaggatacataaactcgtcattgcaaacgccctcacggaagacgagggggattacgtctttgcccctgacgcttacaatgtgacgctgcccgctaaagtacacgtgatcgacccccctaaaattatcttggacggcctcgatgccgataacacagtcaccgtgatagccggaaacaagctcagattagagattcccatttcaggagagcctcccccaaaggccatgtggtctcggggagacaaggcgattatggaaggaagcggccgaattagaacagaatcatatcctgactcttcaacactggtgatcgatattgccgaacgtgatgacagcggtgtgtaccatatcaatctgaaaaacgaagccggtgaagcgcacgcgtctatcaaggtgaaggttgtggattttccggaccctcctgtagccccaaccgtcacagaagtcggggatgactggtgtatcatgaactgggagcctcccgcatacgacggagggtcacctatcctggggtacttcattgaaaggaagaagaagcaatctagtaggtggatgcgactgaatttcgacctctgcaaagaaactacatttgaaccaaaaaaaatgattgaaggggtggcgtacgaagttcgtatattcgcggttaatgctatcggaatatcgaagccgagcatgccctcgagaccgtttgtaccgctcgccgtcactagccccccaacactgctgaccgtcgattcagttaccgataccacagttactatgaggtggagacctccagaccacatcggggcagcaggcctcgatggctatgtgcttgaatattgtttcgaaggcacagaggattggatagtagctaacaaggatctcatcgataaaacaaaattcacgataactggacttcctactgatgcgaaaattttcgtgcgcgtcaaggctgtcaacgctgcgggagccagtgagcccaaatattatagtcagcctatcctggtgaaagagattatagagccccctaaaattcgcatcccccgtcacctgaaacagacatatatcaggcgcgtgggcgaagctgtaaacctcgtcatcccttttcagggtaaaccccgtcccgagctgacatggaaaaaggacggtgctgagatcgacaagaaccaaatcaacataagaaactcagagaccgacacaataattttcatccgcaaagctgaacgcagccatagtgggaagtacgatcttcaggttaaggtcgacaaatttgtggagacagcaagcattgatatacagattatcgataggcctggacctccccagatcgtgaagatagaagatgtgtggggtgagaatgtcgcactgacctggactccccctaaagacgacggtaacgccgcaattactggatatacaatacagaaagctgataagaaatccatggagtggttcaccgtaatcgaacattatcatcgaacatcagccacgatcaccgagttggttatcgggaacgagtactacttcagggtcttcagcgaaaacatgtgcggcttgagcgaagacgctacaatgaccaaagagagtgcggtgatcgctagagacgggaaaatttataagaatccggtctatgaagactttgatttctcagaggctcccatgtttacacaaccgctggtaaatacatacgccattgccggttacaacgccactctgaactgttctgtaaggggcaaccccaaaccgaaaattacatggatgaagaacaaagtggccattgtggacgaccctagataccgcatgttctccaaccagggtgtctgcacactggagatccgaaagccctcgccatacgacggaggcacatactgctgcaaagcggtaaatgatctcggaaccgttgagatcgaatgtaaactggaagtcaaggtgatcgctcaatag

SEQ ID NO: 231559 - DNA, 3495 bp, synthetic construct
  misc_feature 1..3495: note = Description of Artificial Sequence: Synthetic coding sequence
  source 1..3495: mol_type = other DNA
atgcctgagccaacaaaaaaggaagagaacgaggtacctgcgcctgcaccgccacccgaggagccaagcaaggagaaagaagctggaaccacaccagctaaggactggacactggtcgaaacaccacccggagaggagcaggccaaacaaaacgccaatagccagctctctatcttgtttatcgaaaaaccccaaggaggcactgtgaaggtaggcgaagacatcacgtttattgccaaggtaaaggcggaggaccttctgagaaagcctactattaagtggtttaaaggcaagtggatggatttggccagcaaagcaggcaaacacctgcaactgaaagaaaccttcgagcgtcacagccgggtgtatacattcgaaatgcagatcatcaaagctaaggataattttgccggaaattatcgttgtgaagtgacatacaaagataaatttgatagttgttctttcgatctggaggtgcacgaatcaaccggcacaacccccaacatagacatccgatcggcctttaaacgttcaggggaaggccaagaagatgcaggggagctggatttttccggccttctgaagcggagagaggttaaacagcaagaagaggagccccaggtcgatgtatgggaactcctgaaaaatgccaaacccagcgagtacgagaagatcgcttttcagtacgggataaccgacctgagaggtatgcttaagcggctcaagcggatgcgccgtgaagaaaagaaaagcgccgcttttgccaaaatcctggatcccgcatatcaagtggataagggtggccgtgtccggtttgtggtcgaattagccgacccgaaattggaagtgaagtggtataagaacggccaggagatcagaccctcaacaaagtacatcttcgagcacaagggctgtcagcggatcttgttcatcaataactgccaaatgacagacgatagcgagtattacgttaccgctggcgatgagaaatgctctacggagttgttcgtacgcgaaccaccaataatggtgacaaaacagctggaagatactaccgcttactgcggtgaacgggtggaattggagtgcgaggtttctgaggatgatgctaatgtgaaatggttcaagaatggagaggagatcatccctggtcctaagagccgctaccgcatccgggttgaggggaaaaaacatattttaattatcgaaggtgcaaccaaggccgacgcggctgagtactctgttatgactaccggtggacaatctagtgcaaaattgtcagtcgacctgaagcctctgaagatcctcactccgctgaccgatcaaaccgtgaacctcggcaaagaaatttgtttaaagtgcgaaatctccgagaacattccaggtaaatggacgaaaaacggacttcctgttcaagaatccgaccggcttaaagtggtgcacaagggcagaatccacaagttggtcatcgctaacgccctaaccgaggatgagggggactatgttttcgccccagatgcctacaacgtgacgttaccagccaaagttcacgtgatcgacccacccaaaatcatcttagatggcttagatgccgataacactgtgactgtcattgcgggtaataaactgagactcgagattccaatctctggtgagccacccccaaaggctatgtggagccgcggtgacaaagccattatggagggatcaggacgcatacggaccgaaagttatccagacagttcaactctggttatcgatatagcggaacgcgatgacagcggcgtctaccacattaatctaaagaacgaagcaggagaggcacatgcttctattaaggtgaaagtggtcgactttccggatcctcccgttgccccaactgtaaccgaggtgggcgacgattggtgcattatgaactgggagccccctgcatacgatggaggctcgccaatcctaggctatttcatcgagcgcaaaaagaagcaatcatcaagatggatgaggctcaatttcgacctgtgcaaagaaaccactttcgagcccaaaaaaatgatcgaaggcgtggcctatgaggttcgtatctttgctgtaaacgccatcgggatctctaaaccatcaatgccatccagaccattcgtccccctggctgttaccagccccccaactctccttaccgttgattctgtgaccgacacaaccgtcacgatgcgttggagacctccggatcatatcggggctgcgggattggatggttatgtccttgagtattgtttcgagggatctacgtccgccaaacagtccgatgagaatggagaggccgcttacgacttgccagctgaggactggatcgtggcgaacaaggacctgatcgacaaaactaaattcactatcaccgggctccctacagacgcgaaaatttttgtgcgagtgaaggcggtgaacgccgctggagcttctgaaccaaagtactatagccagccaatactggtgaaggagattattgaaccacccaaaataagaatcccaagacacttaaagcagacatacattcgcagggtcggggaggcggtcaatctggtgatcccatttcagggcaaaccacggccagagttgacttggaaaaaggacggggctgagatagacaaaaatcagattaatatcaggaattccgagacagatactattatcttcatacggaaagctgaaagatcccattccggcaaatacgatctgcaggttaaggtggacaagtttgtggagacggcgtcaatcgatatccagatcattgataggccgggaccaccccagatagtcaagatcgaagacgtgtggggcgagaacgtcgcgctcacctggacaccaccgaaggatgacgggaacgctgccattactggctatactatccaaaaagccgacaaaaaatccatggaatggttcactgtgatcgaacattaccatcgcacaagtgccaccatcaccgagctagtgattggaaacgagtattattttagagtcttttctgagaacatgtgtggactgtccgaggacgcaacaatgacgaaggagtccgcagtgatagcgagagatgggaagatttataagaatccagtctacgaagattttgacttttccgaagcccctatgttcacacagccactcgtcaacacatacgccattgctggatataacgctacattgaactgcagcgtgagggggaatccaaagcctaagatcacgtggatgaaaaacaaagtcgcaatcgtcgatgacccccgttataggatgttctctaaccagggcgtctgtactctggagattaggaagcccagcccttacgatggcggtacttattgctgcaaggccgtcaatgacctcggcactgtggagattgaatgtaagttagaggtgaaagtcatttaccagggggtgaatactccaggacagcccgtctttttggaaggtcagcagcagtctctgcacaataaggacttctag

SEQ ID NO: 231560 - DNA, 2349 bp, synthetic construct
  misc_feature 1..2349: note = Description of Artificial Sequence: Synthetic coding sequence
  source 1..2349: mol_type = other DNA
atgcccgaacctacaaagaaagaggagaatgaagtcccggctccagctccacctcccgaagagccatccaaggagaaggaggctggaaccacaccagccaaagacgaagaggaggtgtctcccccatccgcccttccaccgggattgggaagtagggctctggagcgcaaagactccgactggaccctagtcgaaacaccgcctggagaagagcaggccaagcagaatgcaaactcccagttgagcattctctttattgaaaaaccccaaggcggtactgtgaaagttggcgaggacataaccttcattgctaaggtgaaggccgaggatctccttagaaagccgactattaagtggtttaaaggcaagtggatggatttggcctccaaagctggcaagcacctgcagctaaaagagacgttcgagagacattcacgagtctatactttcgagatgcaaataatcaaagcgaaggacaattttgcaggtaactatagatgtgaagtcacttacaaggacaagtttgactcatgctccttcgacttggaggtccacgagtccacagggactacccccaacatcgatatacgctccgcattcaagaggagcggcgaagggcaggaagacgcaggtgaactggacttctccgggttgctaaaacgcagggaggtgaagcagcaggaggaggagccccaggtcgatgtgtgggaattacttaaaaatgcaaagccatccgagtatgaaaaaattgcattccagtacggtatcactgatctgcgcggaatgctcaagaggctgaagcgcatgagacgcgaagagaagaagtcagcggctttcgccaagattctcgatcctgcctaccaggttgataaaggtggaagggtgcgatttgtggtcgagctggctgatcctaagcttgaggtaaagtggtataaaaacggtcaggaaatccgacccagtactaaatacatctttgagcataaaggatgccagcggatcctgttcattaataattgccagatgacagatgattcagaatattatgtgacagccggtgacgaaaagtgcagcaccgaattgttcgtgcgcgaaccccctattatggtcaccaaacagttggaagacactacagcttactgcggagaaagagtggaattagagtgcgaggtgtctgaggatgatgctaacgtgaagtggttcaaaaatggcgaagagatcatccccggacccaaatccagatatcgcatcagggtcgaagggaaaaagcacattctaatcattgagggtgctacaaaagctgatgcggcagagtacagtgtgatgactacagggggacaatcctccgctaaactgagcgttgatcttaaaccgctcaagatccttacacccttaactgaccaaaccgttaacctgggaaaggagatttgtctcaagtgcgagatctcagagaacatcccaggtaaatggacaaagaatgggctacccgtccaggagtctgatcgccttaaagtggtgcataaaggcaggatccataaattggttatagctaatgctctaactgaggatgagggagattatgtctttgctcccgacgcatacaatgtaacccttccagctaaggttcatgttatcgacccgccaaagattattttggacggcttggacgctgacaatacagtcacggtgatagccggtaataagctgcgcctggaaatccccattagtggggagccgcctcctaaggcaatgtggagtcggggagataaagcaatcatggaggggtccgggaggattcgaacagagagctatcccgattcatctactctagttatcgacattgctgagcgcgacgacagtggcgtgtaccatatcaacctcaagaacgaagccggagaggcgcatgcgtctataaaagtgaaagttgtggattttccggacccaccagttgccccaactgtgaccgaggtcggagacgactggtgcatcatgaactgggaacctcctgcctacgatgggggttctcccatattaggatatttcatcgagagaaaaaagaagcagagcagtaggtggatgcgcttgaacttcgatctgtgtaaggagacgacgttcgagcccaagaaaatgattgagggtgtggcgtacgaagtgagaatatttgcggtgaatgccataggaatttctaagcctagcatgccatctcggccttttgttccactggccgtgacgagcccgccaactcttttgaccgtggattctgtgacagacacaactgtaacaatgcgctggcgccctcggccacattggtgttctcggttccgctggctatgcgctcgggtactattgtag

SEQ ID NO: 231561 - DNA, 3426 bp, synthetic construct
  misc_feature 1..3426: note = Description of Artificial Sequence: Synthetic coding sequence
  source 1..3426: mol_type = other DNA
atgccagagcctacaaaaaaagaggaaaatgaagtccctgccccagccccaccccctgaagaaccctctaaagagaaagaggccggaacgacccctgcgaaggactggacgctggtggagacccctcctggcgaagagcaggctaaacagaacgcaaattctcaactgagcatcttattcattgaaaagccacaaggcggaacagtaaaggtcggtgaggacataacgtttatcgcaaaggtgaaagccgaagatttacttagaaaaccgaccattaagtggtttaaaggcaaatggatggacctggcatctaaagctggaaagcacctgcagctcaaggaaacatttgagcgccatagtcgtgtgtacaccttcgagatgcaaatcatcaaggcaaaggataattttgcaggcaattaccggtgcgaagtgacatacaaagacaaatttgatagctgttccttcgatctcgaagtccatgaatccacaggcaccactcccaatattgacataagatctgctttcaaacgaagcggcgaaggccaagaggatgctggtgaactcgatttctcagggcttctgaaacgccgtgaagtgaaacaacaggaagaggaaccacaggttgacgtgtgggagctgcttaagaacgctaaaccttctgagtatgaaaagatagcttttcaatacggtattacagatctcaggggcatgttgaagcggctcaaaagaatgagacgggaggagaagaagagcgcagcgtttgccaagatcctagatccagcttaccaggtggacaaaggtggacgggtaagattcgtggtagagttggcggatcccaagcttgaggtgaaatggtacaaaaacggacaggagatacgtcccagtacaaagtacatttttgaacacaaagggtgccagcggattcttttcatcaataattgccagatgaccgacgatagcgagtactacgtgaccgccggagacgagaagtgctccaccgaattgttcgtgagagagcccccaattatggtgacgaaacagctggaggacactaccgcgtactgtggcgagcgcgtggagttagaatgcgaagtttcagaagatgatgccaatgtcaagtggtttaaaaacggagaagaaattatcccagggccaaagtccagataccggatcagggtcgagggaaaaaaacatatcctgattatcgagggagctacaaaagccgatgccgcagaatacagcgtcatgaccaccggtggacagtccagcgccaaattgtcagtggacctcaagcccctgaagatcctcactcctctcaccgaccaaactgtgaatctgggcaaggagatatgtttgaaatgtgaaattagtgagaacatcccagggaagtggactaaaaacgggctcccagtacaggaaagtgatcggctcaaggtggttcacaagggaaggatacacaaactcgtgatcgcaaacgccttgacggaggacgagggagactacgtattcgcgcctgatgcctacaacgtcaccttgcctgctaaggtacacgtgatcgaccctcccaagatcatcctggacggactcgatgccgataacacggttaccgtgattgccggtaataaactgcgcctagagatcccaatcagcggggagccccctcctaaagcgatgtggtcccggggtgacaaggcaatcatggagggctcaggcagaataagaactgagtcctatcctgactcctcaaccctggttatagacattgccgagagagatgatagtggcgtgtaccacataaatcttaagaacgaagctggggaggcccatgcctcgattaaggtgaaggtagtggacttccccgacccaccagtagcacccacggttacagaggtgggcgacgactggtgcattatgaattgggaaccgcctgcctatgatggcggaagccccatcctgggatatttcatagaaaggaagaagaaacagagcagccgatggatgcgtttaaatttcgatctgtgtaaagaaacaaccttcgagcccaaaaaaatgattgagggggtagcctacgaagttcggatcttcgcagttaatgccattggaatttctaaaccctcaatgccttccaggcccttcgtccccctcgcggttacctccccaccaacactccttactgtagacagtgttactgataccaccgtgactatgcgttggcggcctcctgatcatatcggtgcagctggtctcgacggttacgttctggaatattgctttgaggggtcgacgtctgctaaacaaagtgacgagaacggagaagcagcctatgatctcccagccgaggactggattgtggcgaacaaggatctgattgacaagactaagttcactattacaggactacccacagacgcaaaaatttttgtacgggtgaaggctgtcaacgctgcgggagccagtgaacccaagtactatagtcagcctattttggtgaaagaaataattgagccacccaagattcgtatcccacggcatctgaaacagacatacattcgtagagtcggtgaggccgtcaacttagtcatacctttccagggcaagcccagacctgagctgacctggaagaaggatggggcagaaatcgataagaatcagataaacatccgcaacagtgagacagacactataattttcattagaaaggcagagaggtctcactctggaaagtatgatttgcaggtgaaggtggataaattcgtggaaactgccagcatcgacattcaaatcatcgacagacctggtccacctcagattgtcaaaatagaagatgtctggggggagaacgtagcactgacatggactccacccaaggacgacggaaacgcggctattaccggctatactatccagaaagctgacaaaaaaagtatggagtggtttaccgtaatcgagcattatcaccggacatcggcgacaatcaccgaactcgttataggaaatgagtactactttcgggtgttttctgagaacatgtgcggcctgagcgaagacgccactatgactaaggaatcagcagttatcgcaagggatggtaagatttacaagaaccctgtgtacgaagactttgacttctctgaggcgccaatgttcactcaacctctggtgaatacatacgccattgccggatataacgcaacactgaattgttccgtcagaggcaacccgaaaccgaagatcacatggatgaaaaataaagtagcgattgtggacgatccacgctaccggatgttcagtaatcagggagtgtgcacactcgaaatccgcaaacccagtccatacgacggaggcacttactgctgcaaggcggttaacgatctgggcaccgtggagatagagtgcaaactggaggtgaaagtaatcgcacaatag

SEQ ID NO: 231562 - DNA, 3372 bp, synthetic construct
  misc_feature 1..3372: note = Description of Artificial Sequence: Synthetic coding sequence
  source 1..3372: mol_type = other DNA
atgcctgaaccgactaaaaaggaggagaacgaagttccggctcccgctccaccaccagaagaacctagcaaagagaaggaggccggaactaccccagccaaagattggaccttggttgagacacctccaggggaagagcaggctaagcaaaacgctaatagccaactgtcaatcctgttcattgaaaagccccaaggaggcaccgttaaggtgggtgaggatatcactttcatcgccaaggtgaaagctgaagacttgttacgaaagccaaccattaaatggtttaaaggaaaatggatggatctggcaagtaaggctggcaaacatctccagctcaaagagacatttgagcgccacagcagggtttacacattcgaaatgcagatcattaaggcaaaagacaactttgctggcaattaccggtgcgaggttacctacaaagataagttcgactcctgttcttttgacctagaggttcatgagtccactggcactactcctaatatcgacatccgaagcgccttcaaacgatccggcgaagggcaggaggatgcgggagaattggacttctccgggctgttaaaacgtagggaagtaaaacagcaggaggaggaaccccaagttgatgtctgggaacttctaaagaatgccaaacctagcgagtatgaaaaaatcgcctttcaatacgggattactgatctgcgcggtatgctgaaacggctgaagcgaatgcgcagggaggaaaagaagtcagctgccttcgcaaagatcttggatcctgcttaccaagtagataagggcggtagggtccggtttgtggtcgaactagccgatcccaaattggaggtgaaatggtacaagaatggacaagagatcagaccaagtaccaaatacatcttcgaacataaagggtgtcagcggattctcttcatcaataactgtcagatgacagatgattcagagtattatgtgacagcaggagacgagaaatgttccacagagcttttcgttcgtgagccacccatcatggtgactaaacagttggaagacacaaccgcttactgcggggagagagtggagctggagtgcgaggttagcgaagacgatgcaaacgtgaagtggttcaaaaacggcgaggaaattataccgggtccgaagtcgcggtaccggatccgcgtagaaggtaagaaacacatcctgataatcgagggtgccacgaaagcagacgccgctgagtactcagtgatgaccacaggaggccagtcctctgcgaagctgtcggtggacctgaagcctttgaaaatcctaacgcccttgaccgatcagacagtgaacctgggaaaagaaatctgtctgaaatgtgagatcagcgaaaacattcccggtaaatggacaaaaaacgggctgcccgtccaggagtctgacaggctgaaagttgtgcataaaggcaggatacacaaactggtgattgccaatgccctgaccgaggatgaaggggactatgtcttcgcccctgatgcctataacgtgaccctccctgccaaggtgcacgtgattgaccccccaaagatcatacttgatggattggacgccgataacacagtaactgttatagctgggaacaaactgcgcctggaaatacctataagtggggagcctcccccaaaggcgatgtggtccagaggcgacaaggctattatggagggatccggcagaattaggactgagtcttacccggattcctcaactctggtgatcgatatcgcagaacgagacgactccggggtgtatcacataaacctgaaaaacgaagctggtgaagctcacgccagcatcaaagtcaaagttgtggacttccctgaccccccagtggctccaaccgttacagaagtcggtgacgattggtgtattatgaattgggagcctcccgcttatgatggaggatctccaattctgggctatttcattgaacggaaaaaaaagcaaagttctcgctggatgcgactgaattttgatttatgcaaggagactacttttgagccaaagaaaatgatcgaaggggtggcctatgaggtcaggattttcgcagtcaatgccataggcatatcaaagccgtccatgcccagtagaccctttgtccctctggccgtaacaagccctcccactctcttgaccgttgacagcgtcactgatacaacagttacaatgcgctggcggcctccggatcatattggtgcagcgggtcttgacggctatgtcttggagtactgcttcgagggtacagaggattggatcgtcgctaacaaagaccttattgataagaccaagttcacaatcaccggccttccgactgatgctaaaattttcgtccgcgtaaaagccgtcaacgccgctggggcaagcgagcccaaatattattctcagccgatcctggtgaaggaaatcatcgagcccccaaaaattaggatccctcgacacttaaagcagacctacatcagaagggtcggcgaagccgtgaatttggttattcccttccagggtaaaccaaggccggaactcacctggaagaaggatggcgcagagatcgacaaaaaccagatcaacattagaaatagtgagaccgacaccatcatcttcatccgcaaagcagagagatcccactcaggcaagtacgatctgcaggtcaaggtcgataagttcgtggagacagcgtctatcgatatacaaatcatcgaccgccctggccctcctcagattgtgaagatcgaggatgtatggggagaaaacgtggccctaacgtggacgccccctaaagacgatggtaatgcggctatcacgggctatactatccagaaggctgacaagaaaagtatggagtggttcaccgtcatagaacactatcaccgcactagtgcaactataacggaattagtgatcgggaatgaatactattttcgagtcttctccgaaaatatgtgtggactctctgaagacgccaccatgaccaaggagagcgccgttatcgcccgagacggcaaaatatacaagaatccagtgtacgaagacttcgatttcagtgaagcccctatgttcacccaaccattagtgaatacatacgccatcgctggctacaacgctacactgaattgtagtgtacgaggcaaccctaaacctaagatcacatggatgaagaacaaagtggcgatcgtggacgaccctcgatacaggatgttctctaaccagggggtctgcacactcgaaatccggaaaccctccccatacgatggtggcacctattgttgtaaggctgtcaacgatcttgggaccgtcgagatagagtgtaagctggaggtaaaggtgatcgcccagtag

SEQ ID NO: 231563 - DNA, 1434 bp, synthetic construct
  misc_feature 1..1434: note = Description of Artificial Sequence: Synthetic coding sequence
  source 1..1434: mol_type = other DNA
atgatggaaaagaatacctctgagggtccagcctgcagtccagaagaaactgctagtgagtcagccaaggtgcccaccgcagagcccccaggggaagtggcggtctctgaatcaacacgagaagaacaggtccccaagccccaggctccggctccccaagcaccaactgcctcaaccgccactaagccagcaccaccatccgaagatgttccaagcgctccccttctgctcaccctggacgacgtgtcctcatcctcagtcactgtgagctgggaaccgcctgagcggcttggaaggctagggctgcagggctacgtgctcgaactgtgcagagagggcgcatccgaatgggtacccgtaagtgcgcgaccaatgatggtcacccagcagacagtaaggaacctcgccctcggcgacaaatttttgctccgcgtgagtgcagtgtcatccgccggtgccggtcctcctgctatgctcgatcaacccattcacatccgcgagaatatagaagccccaaagataagggtccctcgccatctgagacaaacgtatatcagacaggtgggagaaacggtcaatctgcagatcccgttccaaggtaagcccaagccccaggccacctggacccataacgggcatgctctcgactcacagcgcgtcagtatgagaacaggcgatcaagacagcattttatttatcaggagcgcccagaggagtgactccggcaggtacgagttaacggtcagggtcgaggaccttgaagcgaaggcagtaattgacatattagtaatcgaaaaacccggaccgccttcctctatcagactgctggacgtgtggggctgtaacgccgctctacagtggacacctccccaggatacaggaaacaccgaattgctgggatacatggtccagaaagccgataaaaagaccggccagtggtttaccgtactggaacggtaccatcccacaacctgtaccatcagcgatttaattatcggcaattcctactcattccgtgttttctcagagaacttatgcggcctaagtacatccgccaccgtcacaaaagagcttgcgcacattcagaaggctgacattgccgcaaaacctaagggttttatcgagcgggatttctccgaggcgccttctttcacacaaccactggccgaccacacatctacgcccggatactccactcagctgttttgctctgtacgcgcatctcccaaaccaaaaattatctggatgaagaataagatggaaatccagggaaatcccaagtaccgggctcttagtgagcagggcgtgtgcaccctggaaatccggaaacctagcccctttgacagcggcgtgtatacctgtaaggccattaatgtgctgggggaggcctcagttgattgcagactggaagtgaaggcctccgctgcccactag

SEQ ID NO: 231564 - DNA, 5816 bp, synthetic construct
  misc_feature 1..5816: note = Description of Artificial Sequence: Synthetic coding sequence
  source 1..5816: mol_type = other DNA
atgtccagtgacgcagaaatggcaatatttggggaagccgctccgtatctgagaaaaccagagaaggaaagaatcgaagcccagaatcgccctttcgacagcaagaaagcgtgcttcgtggccgataacaaggaaatgtatgtgaagggtatgattcagactcgcgaaaatgacaaggtgatcgttaaaaccctggacgatcgcatgttgacccttaataatgatcaagttttcccaatgaacccccctaagttcgacaaaatcgaagatatggccatgatgacacacctccacgagccagctgtactgtataatctcaaagaaaggtatgctgcctggatgatctatacctacagcggcctcttttgcgtgacagttaatccatacaagtggctccctgtgtataagcccgaggtcgtggctgcttacagggggaagaaaagacaagaggctccccctcacatcttctccatctctgataatgcataccagttcatgttgacagacagggataaccagagtattctcattacaggtgagtctggcgctgggaagactgtcaacaccaaacgagtgatccagtactttgccaccattgctgtgaccggcgacaagaaaaaagaaacccagcccggaaagatgcaaggcaccctcgaagaccagattatacaggcaaatccccttctagaggccttcgggaacgccaaaacggttagaaatgataatagttcacgattcggtaagttcattcgcatccacttcggggctaccgggaaactcgcctcggccgacattgaaacatatctgcttgaaaagtcacgcgttacctttcagctttcatctgagcgcagttaccacattttctaccagatcatgtccaataagaagcctgagctcatcgatttgttgctcatctcgaccaacccatttgattttccgtttgtctcgcagggggaggtgactgtggctagtatcgatgactcagaggaattactggccactgacaatgccattgatatcctgggttttagtagtgaggagaaagtgggcatttacaagctcactggggctgtgatgcactacggcaatatgaagtttaagcagaagcagagagaagagcaggcagaacccgacggaactgaggttgccgacaaagcaggatacttgatggggctcaactcagcagaaatgctgaagggattgtgctgcccacgagtgaaggtaggcaatgaatatgttacaaaaggccagaatgtgcagcaagtgactaactccgtaggagccctggcgaaagctgtgtatgagaaaatgtttttatggatggtcactcgcatcaaccagcagttggataccaagcagccacggcagtatttcattggagttctggatatcgcgggattcgagatctttgacttcaattcccttgaacaactttgcatcaatttcaccaacgaaaaattgcagcagttttttaaccaccacatgttcgtattggagcaagaggagtataagaaggagggcatcgagtgggagttcattgatttcggcatggacctggcggcttgtattgagcttatcgaaaagccgatgggaatcttctccattctggaggaggagtgcatgtttccgaaagcaactgacacctcttttaagaacaaactgtatgaccagcacctgggcaagagcaataacttccagaagccaaagccagcaaaaggcaaagctgaagcccattttagtctggtccattacgctggtactgtcgactataacattgccggatggctggataagaataaagatcccctgaatgaaactgtcgttggtctctatcaaaaatccagcctcaagctgcttagctttcttttctcaaactacgcaggcgcagagactggagactcaggaggtagcaagaagggtggtaaaaaaaaaggatctagcttccagaccgtgagtgccgtctttcgggagaatttaaataaacttatgacaaatctgaggagcacgcatccccacttcgtccgatgtcttattccaaacgaaaccaaaacacccggagtgatggatcattatctggtcatgcatcagctacgatgcaatggagtactcgaggggattcgaatctgtcggaagggctttccctcgcgaatcctgtacgccgattttaagcagaggtatagaatcctaaatgcgtctgcaatccctgaaggtcagttcattgatagcaagaatgccagcgaaaagttattgaactccatcgacgtagaccgcgaacagttccggttcggaaacacaaaggttttttttaaggcagggctgctgggattattggaggaaatgagagatgaaaagctggtcacactgatgacctcaacccaggcagtatgtcgcggttatctgatgcgggtcgagtttaagaagatgatggaaaggcgggatagcattttttgcatccaatataacattcgctctttcatgaatgtgaagcactggccatggatgaacctatttttcaagatcaagcctctactgaaatccgccgaagcggagaaggagatggccaccatgaaggaagacttcgagaggaccaaagaggaactcgccaggagcgaagctagacgcaaagaactggaagagaagatggtatctttactgcaagagaaaaatgatctccagctacaggtgcaatccgagaccgagaacctgatggacgctgaagagcggtgtgaaggactgataaaatctaaaattcttttagaagcaaaggttaaagagctgactgagagattagaagaagaggaggaaatgaactctgaactcgttgccaaaaagcgcaacttagaagataagtgcagtagccttaagagagatatcgatgacctggaattgacacttactaaggtggaaaaagaaaaacacgctactgaaaataaggtgaagaaccttagcgaagaaatgacagcattagaggagaacatctcaaaactgacgaaggaaaaaaagtcgcttcaggaggctcatcagcaaaccctggacgatcttcaggtggaagaagataaagtgaatgggcttattaagatcaatgccaaattggagcaacaaacagacgatctggaagggtccctggagcaggaaaagaagctcagagctgacctggaacgagccaaacgcaagctggaaggagaccttaagatgagccaagagtctatcatggaccttgagaacgataagcagcagatagaggagaaacttaaaaaaaaggagtttgaactgtctcagcttcaggctaaaattgacgacgagcaggtccattccctgcagttccagaagaaaataaaggagctgcaggcccgaatcgaggagctggaagaggaaattgaggccgagcacacactacgagccaaaattgagaaacagcggagcgatctggccagggaactggaggaaatttcggagaggttagaagaagcttcgggagccacttcggcccaaatcgagatgaacaagaagagggaagccgaattccagaagatgaggcgggatctcgaggaggctaccctgcagcacgaggccactgctgccacattacgaaagaagcaggccgactcagtggccgaactgggagaacagatcgataatctgcagcgagtgaagcagaagttggagaaggaaaagtctgagcttaaaatggagatcgatgacatggccagtaacattgaggctttgtctaagtccaaaagtaatatcgaacgaacttgtcggacagttgaagaccagttcagcgaaatcaaggccaaagacgagcagcaaacgcagctgatccacgatctgaatatgcagaaggcccgtttacagacccagaatggtgagctatcgcaccgtgtcgaagagaaggagtccctgatctctcaactgacaaagtccaagcaggcccttacacagcagctggaagaactaaagcggcagatggaagaggagaccaaagcgaaaaacgccatggcgcacgcgctgcagagcagccggcatgactgcgatctcctgcgcgagcagtacgaagaggaacaagaagccaaagcagaactgcagcgagctctgtccaaggctaattctgaggtggctcagtggcgaactaaatacgaaaccgatgccattcaacgaacagaggaacttgaggaggcaaagaaaaagttagcccagcgactgcaagaagcagaagaaaataccgaaaccgctaactcgaagtgcgcctctttggaaaaaactaaacagaggttgcaaggtgaggttgaagatctgatgagagacctcgagaggagtcacactgcgtgtgccaccctcgataagaagcagagaaacttcgacaaggttttggcggagtggaagcagaagctcgatgagtcacaggctgagcttgaagcagctcagaaagagtcccggtccctgtccaccgaattattcaaaatgcggaacgcttacgaagaggtagttgaccagctggaaaccttaagacgcgaaaacaagaatcttcaggaggaaattagcgatctgactgaacagattgcagaaaccggcaagaacctgcaggaagcagagaaaacaaaaaaactggtggagcaggagaagtccgatctgcaggtcgccttggaggaagtggaagggtctttagaacacgaggaaagtaagatactgagagtgcagctggaactaagccaagtgaagtccgaacttgatcggaaagtgatcgagaaagatgaagagattgaacagctgaagcggaactcccaacgtgcagcggaagcactgcagagtgtgctcgatgctgagatcagatcaagaaacgacgccctgagactgaaaaaaaagatggaaggcgatctcaatgaaatggaaattcagctgggacatagcaatagacagatggcagaaacacagaagcaccttaggactgtgcagggacagctaaaggatagtcagctgcatctggatgatgccttacggagtaatgaggacctcaaggagcagctggccatcgtggagaggaggaacgggctgctgctcgaagaactggaagagatgaaggtggccctggaacaaactgaacgaaccaggagattgtccgagcaggagctgttagatgcatctgatagagttcagcttcttcacagccaaaatacttctctgattaatacaaaaaaaaaactggaggccgacatcgctcagtgccaagctgaggtcgagaattcaatccaggagtctaggaatgccgaagagaaggcgaaaaaagccattacagatgcagccatgatggcggaagagctcaaaaaggagcaggacaccagcgctcacctggagagaatgaagaaaaacctggagcagacagtaaaggacctgcaacatagactagacgaggccgaacagctggcccttaaaggaggcaaaaaacagatccagaaactggagaatcgggtccgtgaactggagaatgagctggatgtggagcaaaagagaggcgctgaagccttgaaaggcgctcacaagtatgaacggaaggttaaggaaatgacgtatcaggctgaggaagatcacaagaatatcctgcgcctgcaggacttggtggataagctgcaagctaaggttaaaagttacaaaagacaagcggaggaagctgaagagcaggctaatactcagctgtccagatgccggagagtgcagcacgaactggaagaagctgcagagagagccgacatcgcagagagtcaagtgaataagttacgggcaaagagcagagatgtgggctctcagaaaatggaggagta

SEQ ID NO: 231565 - DNA, 6110 bp, synthetic construct
  misc_feature 1..6110: note = Description of Artificial Sequence: Synthetic coding sequence
  source 1..6110: mol_type = other DNA
atggccgcagtcacaatgtccgtgcctggcagaaaagcccctcccagacctggcccagtgcccgaggctgcgcagcccttcctgtttaccccaaggggaccatccgccggtgggggacctggatcaggcacatcccctcaagtagagtggaccgccaggcgcttagtctgggtcccctctgagctgcacggctttgaagccgcagccctacgcgatgagggagaagaggaagcggaggtggagttagccgagtccgggagaagactccgcctgccacgcgatcagattcagagaatgaacccccctaagttttccaaagcagaggatatggccgagcttacatgcctgaatgaagccagtgtcctccacaatctccgggaacgctactactccggccttatttacacatactcaggacttttttgcgtcgtaattaacccatataaacagctccctatctacactgaggcgatcgttgaaatgtaccggggaaaaaagcgacatgaagttccaccccatgtctacgccgttaccgagggcgcttaccgctctatgctgcaggaccgcgaggaccagtctattctttgcacgggagaatcgggcgcaggaaagacggagaataccaagaaggtcattcagtacctagcccacgtagccagctcgcccaagggccgaaaggaacctggagtacccgcttccgtgtcaacggttagttatggagaactcgagcgccagctgcttcaggcaaaccccatcctggaggctttcggcaatgcgaagacggtaaagaatgacaacagcagccgctttggcaagtttattcggatcaatttcgacgtggcagggtatatcgtcggagctaatatcgagacttatttactcgagaaaagtagggctatccgtcaggcaaaagatgagtgtagcttccacattttttaccagctcctcggaggcgcaggggaacagctcaaagctgatctgctgctggagccttgtagccactatagattcctcacaaatggaccctcatccagcccagggcaggagcgcgaactctttcaggagacgctcgagtccctgcgggtccttggcttctcccatgaagagatcatttctatgctacgtatggtgtccgccgtgctgcagtttggaaacatagccttgaagcgcgagcgcaataccgatcaagctaccatgcctgataatacagccgcacagaaactatgtcggctgctggggctgggcgttactgacttctcccgggctctgctcaccccaagaatcaaagtggggagagactacgttcagaaggcccagaccaaggagcaggccgacttcgcgctcgaggccctggctaaggcgacgtatgagcgcttgtttcgctggctggtccttcgattgaatcgagcgttagatcgctcgccacgccagggagcatcgtttctaggcatactggatatcgccggtttcgagatctttcagctcaactcattcgaacagctgtgcattaattataccaacgaaaagttacagcagttgttcaaccacaccatgtttgtgctggagcaggaggaataccagagagagggaattccgtggacattcctggatttcggactcgaccttcagccctgcatcgacttgatcgagagaccagccaacccacctggtttgctggccctcctcgacgaagaatgctggtttccaaaggccacggacaagtcgtttgtggaaaaggttgctcaggagcaaggcggtcaccccaagtttcagcggccacggcatctccgcgatcaagcagacttttccgtcctccattatgccggtaaagtagactataaggcaaatgagtggctaatgaagaatatggatcccctgaatgacaatgtggcagcactgcttcaccagtccacagaccgtctgacagccgaaatttggaaagatgagcacgggggttttcaacaattctcctttctgggcagtttcccccctagcccccctggcagcgcagagcgttgttcatccgctatttcccctcccggtgtcgagggaatcgtggggttggagcaggtgtcctcccttggtgacggtcctcctgggggtcgccctcgcagaggcatgtttcggacagtcggtcagctctacaaggagagcctatctcggctgatggcaacactcagtaacacaaatccttcctttgtgcgctgtatcgtgccaaatcacgagaaacgggctgggaaactggagccgaggctggtgctggaccagctccggtgtaatggcgtgcttgaaggaatcagaatctgcaggcaggggtttccaaatcgaatactgttccaagagtttaggcagagatatgagatactgacccccaacgccattcccaaaggcttcatggacggtaagcaggcatgcgagaagatgattcaggccttggaactcgatcctaatctctatcgggtcggtcagtcaaagatcttcttcagggccggagtgctcgcccagctcgaggaggagagagacttaaaagtgaccgacataatagtgtcgttccaggccgctgctaggggctatctggctagacgggcattccagaaacgtcagcagcagcaatcggcactcagagtgatgcagcggaactgcgcagcctatctgaagcttaggcactggcagtggtggcggttatttaccaaggtaaagcccctgttacaagtaacaaggcaagatgaagtgctccaggctagggctcaggagctacaaaaagtgcaggagctgcagcaacagtctgctagggaagtgggcgagctccaggggagagtagctcaactagaggaagaaagggcacgcctggcagagcaattgcgagctgaggcggagctttgtgcagaggccgaggagaccagaggccgacttgcagccagaaagcaggaattggaactcgtggtgtccgaattggaggctagagtcggcgaggaggaggagtgttcacgacagatgcaaacagagaagaaacgattgcagcagcacatccaggagctcgaagcacatttggaagccgaggaaggcgctcgccaaaagctccaattagagaaggtgacaactgaggctaaaatgaaaaaattcgaagaagaccttttgctcctagaggaccagaatagtaagctgtccaaggagcgcaagctcttagaggatcgactcgcagagttttcttctcaggctgccgaggaggaggagaaggtaaaaagcctaaataagctacgcttgaagtacgaggccactatcgctgacatggaggatcgcctgcgcaaggaagaaaaggggagacaagagctggagaaactgaaacgcagacttgacggggagtcttctgagctccaggagcagatggtggaacagcaacaaagggctgaagaattgagagcccagctcggcaggaaagaggaggagttacaagctgcgttggcacgcgctgaggacgagggcggagccagagcccaactcctcaagagcctgagggaggctcaagctgccctggcggaagcacaagaagacttggaatcagaacgcgtagctcggacgaaagccgaaaagcagaggagggatctgggagaagaattggaagctcttaggggggagcttgaggacacactggattccacaaacgctcaacaggaactgcgatctaaacgcgagcaagaagtcacggagctgaagaaaacgctggaagaagaaacaagaatccacgaagccgctgtgcaggagctgcggcagcgtcacggacaggccctgggtgagctggctgagcagctggagcaggccagacgaggaaaaggtgcctgggaaaagacaagactggccttagaggccgaagtcagcgaactgagagccgaactgagttccctgcagaccgccaggcaggaaggcgagcagaggaggagacgactcgaactccagctgcaggaggtccaggggagggccggtgatggcgagagagcacgagccgaggccgctgagaagttgcagcgcgcacaggctgagctcgagaacgtctcgggcgcattgaacgaggctgagagcaaaaccattagactgtcaaaggagttaagctctaccgaggcccagttacacgacgcacaggaactgcttcaggaggaaactcgcgctaagctggccctcggctcgcgtgttcgagccatggaagctgaggcagctggtctgcgggagcaactggaagaggaagctgctgcacgcgaaagagccggacgggagctgcaaactgcccaagcccaacttagtgagtggagaagacgccaggaagaagaggcgggtgctcttgaagccggagaggaagctcgtcgaagagcagcgagggaagccgaagctctgactcagcgcctcgcggagaaaactgagacagtagaccgtcttgaaaggggtaggcgtaggctccagcaagagctggacgatgccacaatggatctggagcagcagaggcaactggtcagtaccctcgaaaaaaaacagcggaaattcgaccagctcctagcggaggagaaggctgcagttttgagggcagttgaagagcgtgagcgtgctgaggccgagggaagagaacgggaggctagggcattgtcactgacccgcgcactggaggaggaacaagaggctagagaggagttggaacggcagaacagagctcttcgggcagaactcgaagctttactaagttctaaggacgatgtgggcaagagcgtgcatgaattagagcgtgcatgtagggtggccgagcaggcagctaacgaccttagagctcaagttaccgagctggaggatgaactgactgccgcagaagatgccaaactccgcctggaggtgactgtgcaggcactcaagacacagcacgaacgggacctgcagggacgagacgaggctggggaagagcgaaggaggcagctcgcgaagcagttacgagacgctgaagtggagagggacgaggaaaggaaacagagaaccctggccgtggcagctcgtaagaagctggaaggcgagcttgaggaactcaaggcccagatggcgtcagccggacaaggcaaagaagaggccgtgaaacagctcagaaagatgcaggcccagatgaaggagctttggcgggaggtggaggagaccagaacctcgagggaggagattttttctcagaatcgagagtcggaaaaacgactgaaagggctcgaagcagaagtcttgcgccttcaagaagagctcgccgcatctgatcgggcacgccgacaagcccaacaagacagggatgaaatggctgacgaggtggctaacggtaacttgtctaaggcggcaatcctggaagaaaagagacagctggaaggtaggctcggacagctggaggaggagctggaagaggaacaatctaacagcgagctgttaaacgacagatacaggaaactactactccaggtcgagagcttgaccaccgaactttctgccgagagaagctttagcgccaaggcagaaagcggacggcagcaactggagcggcagatacaggagctgaggggcaggctgggcgaagaggacgccggtgctagagcccgtcacaagatgaccatcgccgcactcgaatcgaagcttgcccaagcagaggagcaacttgagcaagagactcgcgagcgaatcctgtctggcaagctggtgcggcgagctgaaaagaggttgaaggaggtggtgctgcaggtcgaggaagaacgcagggtggccgatcaactcagggatcaattggaaaagggcaatctgagggtcaaacagttgaaacgccagctggaagaagcagaagaggaggctagtcgcgctcaggcgggacgaagacgtttgcagagagaacttgaagacgtcactgaatcagccgagagcatgaatcgcgaagtcactacactgagaaaccgattacgacgcggaccgctaactttcactacacgtacagtacgacaggtgttcaggctagaggagggtgtcgcatcagacgaggaggccgaagaagctcagcctgggtccgggccaagtccagagcccgagggtagcccacccgcacacccacagta

SEQ ID NO: 231566 - DNA, 5822 bp, synthetic construct
  misc_feature 1..5822: note = Description of Artificial Sequence: Synthetic coding sequence
  source 1..5822: mol_type = other DNA
atgagctcagacacagagatggaagtattcggaatagcagctccctttctccgaaaatccgagaaagagcggatcgaggcacaaaaccagcccttcgacgccaagacctactgcttcgtggtggacagcaaggaggagtatgccaaggggaagataaaatcctcccaagacggcaaggtcacagtcgagacagaggataacagaactctggtggttaaacctgaggacgtttacgccatgaatccaccaaagtttgatcgaatcgaagacatggcaatgcttacccacctgaacgaacctgccgtgctgtataacctgaaagaccgctacaccagctggatgatctacacttatagcggattattttgcgtgacagttaatccatataaatggcttcccgtgtacaaccccgaagttgtcgaaggttaccgaggtaagaagagacaggaagcccctccacatatcttcagcatctctgacaatgcctaccagtttatgctgactgatcgtgaaaatcagagcattctgatcacaggagaatctggcgcagggaaaactgttaacactaagcgggtcattcagtatttcgcgacgatcgccgctaccggagatctggcaaagaagaaggactccaaaatgaaagggacattagaggatcagatcatcagtgccaaccccctcctcgaggcattcgggaacgcaaagacagttcgaaatgacaactccagccggtttgggaagttcatcaggattcatttcggcactacaggcaagctggccagtgccgatattgagacttacttgctggaaaaatctagggtaacctttcaactcaaagccgaacgctcataccacatcttctatcagatactgtccaataaaaagccagagctgatcgagttgctgctgatcacgactaacccctatgactatccattcattagtcagggcgaaattctggtggccagtattgatgatgctgaggaactgttggccactgattcagctatagatattttgggctttaccccggaagaaaagagcggactttataagttgaccggagcagtgatgcattatggcaacatgaaatttaagcaaaagcaacgtgaggaacaggcagaaccagacggcactgaggtagccgacaaaaccgcctacctgatggggctgaacagctctgatttgctgaaagccctttgcttccctcgagtcaaggttggaaatgagtatgtcactaaaggccagacagtagaccaggttcaccacgccgtcaatgccctgagcaagagcgtgtatgagaaactcttcctttggatggttaccaggataaaccagcagctggacacaaagctgcctcggcaacactttatcggagttctagacattgcaggttttgaaatattcgaatacaacagccttgaacagctgtgtatcaacttcacaaacgagaagctacaacagttttttaaccaccacatgtttgtgctggagcaggaggaatacaagaaagaaggtatagaatggacatttatcgacttcggtatggatctggcagcatgcatcgagttgattgagaaaccaatgggcatcttttccatccttgaagaggagtgtatgttcccaaaagccaccgatacatcttttaaaaataaactttacgaccagcacttaggcaaaagtaacaacttccagaagccaaaagtagttaaaggcagggcagaggcccatttttctctgattcactacgccggaactgtcgactattcagtgagcggctggctggagaaaaacaaggacccgctgaatgaaactgttgtgggtctgtaccagaaatcttccaatcggctcctcgcccatctctacgccacctttgccaccgctgacgccgatagtggaaaaaagaaggtggcaaaaaagaaaggcagctcgtttcaaaccgtgtccgctctgttcagggagaatctgaacaagttaatgagcaatctgaggaccactcatccccacttcgtccgctgtattattccaaatgaaaccaagacgcctggcgctatggagcactccttggttttgcatcagctgcgctgcaatggagtgctggaggggatcagaatctgtcgtaaaggtttcccaaatcggatcttgtatggggattttaaacaacgttacagagttttgaacgctagcgcaatacccgaaggacaattcatagactcaaagaaagcctgcgagaaattactggcttcaatcgatattgaccacacccagtacaaatttggacatacgaaagttttctttaaggccggtttgctgggtactctcgaggaaatgcgggacgatcgcttggccaagctaatcaccagaacgcaggcagtgtgcagagggttccttatgagggtggaatttcagaagatggttcagcgcagagagtctatcttttgcatccagtataatatcagatcattcatgaacgtcaagcactggccgtggatgaagttgttcttcaaaattaagcccctgcttaagagcgccgagactgaaaaagagatggctaccatgaaagaagagttccaaaagacaaaagacgagctggccaaatctgaagcaaagcgtaaagagcttgaagaaaagcttgttacactcgtgcaagaaaaaaacgatctccagctgcaggtgcaggccgagtcggagaatctactggacgcagaagaacgttgtgaccagttgattaaagctaaatttcaacttgaagcaaagattaaggaggtgaccgagagagccgaagacgaagaggaaattaacgcggagctgacagccaaaaagagaaaattagaagacgagtgttccgaacttaaaaaagacattgatgatttagaactgactctggcaaaggtggaaaaggagaaacacgccaccgaaaataaggtgaagaacctgacagaagaactgagtgggcttgatgaaactattgccaagctgaccagggagaaaaaggccttacaggaggctcaccagcaggccttggacgatctgcaagctgaggaagacaaggtgaattcgctcaataagaccaaaagcaagttagaacagcaagtggaggatctggaatcttccctggagcaggaaaaaaagttgcgtgtcgatctggagaggaacaaacgcaaactggaaggcgatctgaaactggcccaggaaagcattctagatcttgagaatgataagcagcagcttgacgaaagattgaagaaaaaagatttcgaatactgccagctgcagtctaaagtcgaggatgagcagaccctcggactacagttccagaagaaaattaaagagcttcaggcccgtatcgaagagttggaggaggagatcgaggctgagagagccaccagggcgaagaccgagaagcagcgctctgattatgcaagagaactggaggaactgtctgaacgcctcgaggaggctggcggagtgaccagtactcagatcgaattaaataagaagcgcgaggccgaatttcttaagctcaggagggacctggaagaagctactctgcagcatgaagcaatggttgcagcccttcgcaagaagcacgccgattcagtagcggagttaggcgagcaaattgacaacctacagagagtaaaacaaaaactggaaaaggaaaaaagcgaatttaagctggaaatagacgatctttctagctctatggaatcagtctcaaaaagcaaagccaatcttgagaaaatctgccgaactctcgaggaccagctatcagaagccagggggaagaatgaagaaattcaacgctcactcagtgagctgaccacacaaaagtcccgattgcagactgaggcgggagaactgtcccgccaacttgaagaaaaggagagtatcgtttcccagttaagcaggagcaagcaggccttcactcagcagactgaagagctgaagcgccaactcgaggaagagaacaaagccaaaaacgcactggctcatgcactgcagtcttcacggcatgactgtgacctcctccgcgagcaatatgaggaggagcaagagggaaaggccgaactgcaacgcgctctttctaaggcaaactccgaggtggcacaatggcgcaccaagtacgagacggacgctattcaacggaccgaggaacttgaggaggctaaaaagaagctcgctcagagactgcaagacagtgaggaacaggtggaggcagttaacgctaagtgcgctagtctggagaaaacaaagcaaaggttgcaaggggaagtggaagacctcatggtggacgtggaacgcgctaacagcctcgcagccgcactggacaagaagcaaagaaactttgacaaggtgctggccgaatggaagactaaatgcgaggagagtcaagctgaactagaggcttcgcttaaggaatcacgatctctatccacagaactctttaaacttaagaacgcctacgaagaggccctcgaccagttggaaacggtgaaaagagagaacaaaaatctagagcaggaaatcgctgatctgaccgagcagattgctgagaatggcaaaaccatccacgagcttgagaagtctcggaaacaaattgagctcgagaaggccgacatccagctcgcactggaggaagccgaggccgcactagaacacgaggaggcgaaaatcctgcggatccagttggaactgactcaagttaagtccgaaatcgaccggaagatcgccgagaaggatgaagagatcgagcagctaaagaggaattatcagcgcacggtagagacaatgcaaagtgccctcgacgccgaggtgcgctcccgaaatgaggctattcgccttaaaaaaaagatggaaggtgatctgaatgaaatcgagatccagctaagtcatgccaatagacaggcggctgaaactcttaagcatctccgatccgtccaaggccagttaaaggatacccagctgcatctcgacgacgcgttgagaggccaggaggacctcaaagagcagctggccatcgttgaacggagagcaaatctgctccaggccgaagtggaagagctcagagcgaccctggagcaaactgaacgggcaagaaagttagctgagcaagaactgctggattccaacgaacgggtgcagctgttgcacacccagaacaccagcctgatacacacgaagaagaagctggagaccgatctgatgcagctccagtcagaagtcgaggacgcaagcagagacgcacgcaacgctgaagagaaagcaaagaaggccatcaccgacgccgcaatgatggccgaggaattaaaaaaggagcaggacacctccgcccatctggagcggatgaaaaagaacctcgaacagactgtgaaagatctccagcacagactagatgaagccgagcagctggctcttaagggtggaaagaagcaaatacagaagttggagaccaggatcagggagctggaattcgagttggagggagagcagaagaagaatacagaatccgtaaaaggccttagaaaatacgagcggagggtaaaagaactcacttaccagagtgaggaggaccggaagaatgtactgcgcctgcaggacctcgtagataaattacaggtgaaggtgaagtcttacaagagacaggctgaggaagcggatgagcaagctaatgctcacctgaccaaattcagaaaggcccaacacgagctcgaggaagccgaagagagggcggacatagccgaaagtcaggtgaataagttgcgcgcaaaaacacgggactttacaagttcacggatggtagtccatgaatcagaagagta

SEQ ID NO: 231567 - DNA, 3132 bp, synthetic construct
  misc_feature 1..3132: note = Description of Artificial Sequence: Synthetic coding sequence
  source 1..3132: mol_type = other DNA
atgccgctcttggaggggtctgttggagtcgaagatctcgtgctattggagcctctggtggaagagtccctgctaaagaacctgcagttgagatacgagaataaggaaatctatacatatataggcaacgtggttatctctgtgaacccataccaacagctgcctatatacggcccagagtttatcgccaagtaccaagactataccttctatgagctgaagccacatatctacgcccttgccaatgtggcctatcagtctctgcgggatcgggatcgggatcagtgtatactcataactggggaaagcgggtcaggcaaaacggaagcaagtaagctcgttatgagttacgtggccgcagtctgtggcaaaggggagcaagtgaattctgttaaggagcaactgctgcagtctaacccagtgcttgaggcgttcggaaatgctaaaacgatacggaataacaattctagccgctttgggaagtatatggatatcgagtttgactttaaaggcagtcctctgggcggtgtgattaccaactatctgctggagaagtcacgtttagtaaaacagcttaagggggagcgaaattttcatatcttttaccagctgctggctggcgctgacgaacaacttctgaaagccctgaagctggagagggatacgactgggtatgcttatctgaatcatgaagtcagcagagtagatgggatggacgacgcgagttccttccgtgcggtgcaaagcgccatggccgtgattggatttagcgaagaggagataagacaagtgctcgaggtgacatctatggtcctgaaactcggaaacgtgctggtggctgatgagtttcaggcctccggaatccctgcttctgggattagggatggccgtggggtccgcgagatcggggaaatggtggggctgaactctgaagaagttgagagagccctctgctcccggaccatggagaccgcaaaggagaaggtcgtgaccgccctcaatgttatgcaggcccagtacgccagggacgccctcgccaagaatatatactcgcggttgtttgactggattgtcaacaggatcaatgagtcaatcaaagttggcatcggcgaaaagaaaaaggttatgggagtgctggacatctacgggttcgaaattcttgaggacaactccttcgagcagttcgttattaattattgtaatgagaagctgcagcaggttttcatcgaaatgacactaaaagaagaacaggaggagtacaaacgggaggggattccctggacaaaggtcgactacttcgacaatggtattatttgcaaactgatagaacacaatcagagaggtattctggcgatgttggacgaggagtgcctgcgccctggggtcgtgtcagactctacatttctagccaaattaaaccagctgttctccaaacatgggcactacgagagtaaggtgacgcagaatgcacagagacaatatgaccacaccatggggttaagctgcttccgcatttgtcattacgctggcaaagtaacctacaacgtcacctcgttcattgataagaataacgatttactgttccgcgaccttctgcaggcgatgtggaaggcccagcaccctttgctgcgctccctattccccgagggaaatcccaaacaggcctcactgaagcggccacccacagccggtgcgcagttcaaatcatctgttgccatcctgatgaaaaacttgtacagtaaatccccgaattacatcaggtgcattaaaccaaacgaacatcaacagaggggccagttctctagcgacctggttgctacccaggccaggtatctaggccttctggagaatgttcgggtgcgtcgggctggatacgcccaccgacaaggctacggcccattcctggagagatacaggctcttgagcagatccacatggccccactggaatggcggagaccgagagggcgtagagaaagtactgggagagctgagcatgagcagcggtgaactggcttttggcaagacgaaaattttcatccggagtcccaagactctcttttatctagaggagcaaagaagactcagactacagcaactcgccacgttaatccagaaaatatatagaggctggaggtgcagaactcactaccaactgatgcggaagagtcagatactgatcagcagttggtttcgcggaaatatgcagaagaagtgctatggaaaaatcaaggcctcagttcttctgatccaggcgttcgtacgcggatggaaagcgcgaaagaattacagaaaatactttaggtctgaagcagccctgactctggccgacttcatctacaaatctatggttcagaagtttttgcttggtctgaaaaataatctcccatccacaaatgttctcgacaaaacatggcccgctgctccatataaatgtttatcaactgcaaatcaggaactccagcagctgttctaccagtggaaatgcaaaaggttccgcgatcagctgagccccaagcaggttgagatactgcgagaaaagctttgcgctagcgagctcttcaaaggtaagaaagcctcttatccccagtccgttcccatccccttctgtggggattacattggattgcagggcaaccctaagcttcagaagcttaaagggggtgaagagggccctgtgcttatggctgaagcggtgaagaaggttaaccgcggaaatggaaagacgagctctcggattctgcttttgacaaagggacatgtgatccttacggacaccaagaaatcacaggcaaaaatcgtaattggtctggacaacgttgccggtgtgtctgtgacctccctgaaggacggtttgttttctctccatctgtctgagatgagctcagtgggcagtaagggggattttttattagtttcagagcacgtaatcgagctgctcactaagatgtacagagccgtactggacgctacccagagacagttgaccgttaccgtaaccgaaaagttctccgtaaggttcaaggaaaattccgtggctgtgaaagtggttcagggccctgctggaggggacaattccaaactgaggtacaagaagaagggaagccactgcctcgaggtgacagtgcagtag

SEQ ID NO: 231568 - DNA, 291 bp, synthetic construct
  misc_feature 1..291: note = Description of Artificial Sequence: Synthetic coding sequence
  source 1..291: mol_type = other DNA
atgcctctgctcgagggttctgtcggtgttgaagatctggtgcttcttgagccattagtggaagagagtttgctgaagaatttgcagttgagatacgaaaacaaagagatatatacctacatcggcaacgtcgtcatctctgtgaacccttaccagcagcttcccatctacggacccgagtttattgctaagtaccaagattataccttctacgagctaaaacctcatatctatgctctggcaaacgtcgcataccagtcgctgcgcgatagggaccgcgatcagtgctag

SEQ ID NO: 231569 - DNA, 3132 bp, synthetic construct
  misc_feature 1..3132: note = Description of Artificial Sequence: Synthetic coding sequence
  source 1..3132: mol_type = other DNA
atgccactccttgagggcagtgtgggagtggaagacctggtgctgctggagccccttgtcgaagagagcctcctcaaaaaccttcagctgcgctacgagaacaaagaaatttacacctacatcggcaacgtcgttatttccgtcaacccctatcagcagctgcccatttacggacccgagtttatcgctaagtaccaggattatacattctatgaactgaaaccacatatttacgccctggcaaacgtcgcctatcagtcgttaagggatagagacagagaccagtgtattctcatcacaggcgagtcgggctctgggaagaccgaggcttcaaaactggttatgtcatacgtggcagctgtgtgcggcaagggggaacaggtgaactcagtcaaggagcagctcctacagagcaaccccgtactcgaggccttcggaaacgccaaaaccataaggaacaacaatagcagcagattcggcaaatacatggacatcgagttcgatttcaagggaagccccttaggcggtgtgattaccaattacttgttagagaagtcaaggctcgtgaagcagttgaagggagaacgaaatttccacatcttttaccagttgcttgctggcgctgacgagcaactgctgaaggcactgaagttggaaagagacacaaccggctatgcttatctgaaccacgaagtttctagagtggatggtatggatgatgccagcagttttagggcagttcagtcagccatggcagtgattggattctccgaggaagagataaggcaggtactcgaagtgacgtccatggtactgaagctcggcaacgtgttggtggcagacgagtttcaggccagcggcatcccagcctccgggatcagagacggcaggggtgtgcgcgagattggcgaaatggttggtctgaacagtgaagaggtggaaagagccctttgttctcggacaatggaaacagccaaagaaaaagtagtgactgcattaaacgtgatgcaggcccaatatgctcgtgacgccctcgctaaaaacatttactcccggctgttcgactggattgtcaatagaattaatgaaagcatcaaagttggtatcggtgagaagaaaaaagtcatgggcgtgctcgacatttatgggttcgaaatcttagaggataactcgttcgagcaattcgtcatcaattattgtaacgaaaaacttcaacaggtgtttattgaaatgactctaaaagaagaacaggaagagtataagcgagaggggataccctggactaaggttgactattttgacaacggaattatttgtaagttgattgaacacaatcagcggggaattttggctatgctggacgaggaatgcctgcggccaggggtcgtgtccgattccaccttcctggctaaactcaaccaacttttttccaagcacggacattacgaaagtaaagtcacacaaaacgcccagaggcaatatgaccacacaatgggattgtcgtgttttagaatttgccactacgccggtaaggtcacatataacgtcaccagtttcatagacaagaataatgatcttctttttcgagacctactgcaggctatgtggaaggcccagcatcccctgctgcgctctcttttcccggaaggcaatcccaagcaggcgtcattaaagcgcccacctacagcaggcgcacaatttaaaagcagtgtagctatcctcatgaagaatctctactccaagagtccgaattatattcgctgcattaaaccaaatgaacatcagcaacggggacagttttcctccgatctcgtggccacacaggccaggtaccttggcttactagaaaatgtacgtgttaggcgcgctgggtatgctcaccggcagggatatggtccgtttctcgagcgctaccgactactgtcccggtcaacttggccacactggaatggaggggacagagagggagtcgaaaaggtcctgggcgagctttctatgtcttcaggggagctggcgtttggaaagacaaagattttcattcggtccccaaagactctgttctaccttgaggaacaacgaaggctgcgactgcaacagctggcgacacttatccagaagatctatcgcggatggaggtgccggacgcattaccagctgatgcggaagagccagatcctgatttcctcttggttccggggtaacatgcaaaagaagtgctacggcaagatcaaggcctccgtgttgctgatccaggcgtttgttagaggttggaaggctcgcaaaaattaccgcaaatacttcagaagtgaggccgctctgacccttgctgatttcatctacaaaagcatggtccaaaaattcctgctgggtctgaagaacaatctgccgtctacaaacgtcctcgacaagacatggcccgcagccccatacaagtgtctgtcgaccgctaatcaggagctgcagcagctgttctaccagtggaagtgcaaaaggtttcgcgatcagttaagtccgaagcaggtggagattcttagagaaaagctatgtgctagcgagctgttcaagggcaagaaagcctcatacccccagtctgtgccgattcctttctgcggggactacatcggattacagggcaatccaaagctgcagaagttgaagggcggagaagaagggccagtcctgatggccgaagcggttaagaaggtcaaccgtggcaatggcaagacgtctagtaggatcttactcctgacgaagggacatgtgatcctaacagatactaagaagagtcaggcaaaaatagtgataggtcttgacaacgtggctggggtctccgtgacctctctcaaagacggcctcttcagcctgcatctttcggaaatgtcgtcggtgggatcaaaaggtgactttttattggtgtccgaacacgtcatcgaacttttgaccaaaatgtatcgcgcagtattagatgctacacaacgccagttaactgtcacagttaccgagaaattctcggtcagatttaaagagaatagcgttgccgtgaaagtggtgcaagggccagcaggcggagataactccaagttgaggtataagaagaagggatctcactgcttggaggttaccgttcagtag

SEQ ID NO: 231570 - DNA, 2646 bp, synthetic construct
  misc_feature 1..2646: note = Description of Artificial Sequence: Synthetic coding sequence
  source 1..2646: mol_type = other DNA
atggacatcgagttcgacttcaaaggcagccctctgggcggagttatcaccaattatttgctggaaaagtcaaggctagtgaaacaactgaagggggagcggaacttccacattttctatcaactcctagctggagctgatgagcagctgctgaaagcactaaaactggaacgtgatactactgggtacgcatacctcaatcacgaagtttcacgagtggatggcatggacgacgcatctagctttagggccgtacagtccgccatggccgtaataggattttcagaggaggaaatcagacaggtgcttgaagtgacgtctatggtgctcaagctcggcaatgtactggtcgctgatgagtttcaggccagtggaattccagcctcgggaatcagagatggaagaggagtacgagagattggcgagatggtcggacttaactctgaggaggtcgagagagcactttgtagccgcactatggagaccgccaaagaaaaagtggtgaccgctttaaatgtgatgcaggcccaatatgctcgggacgctctggccaagaacatctactcgcgcctgttcgattggattgtcaacaggatcaatgagtcaatcaaggtcgggatcggcgagaaaaagaaggttatgggggtgctcgatatttacggattcgaaatcttggaagacaattcatttgagcaattcgtgattaactactgtaatgaaaagctgcaacaagtattcatcgaaatgaccctgaaagaggagcaggaagaatataagagggaggggatcccatggacaaaagtggattactttgataacggcataatctgcaagctgattgagcataatcagagaggaatccttgccatgctggatgaggaatgtttgaggccaggcgttgtcagcgacagcacgtttcttgcaaaactaaaccagctgttcagtaaacatgggcattacgagtccaaggtcactcagaacgcacaacgccaatatgatcacactatgggattgtcttgctttcgaatctgtcactacgccggaaaggtgacctacaatgttacgtccttcatcgacaagaacaacgacctgctttttcgggacttgctgcaggccatgtggaaggcacagcatcctcttttgcgcagcctcttcccagagggcaaccccaagcaagccagcttaaagcgccctccaacagcaggggcacagttcaaaagttcggttgccatcctgatgaaaaatttatattcgaaatcacctaactacatccgatgtattaaacctaatgagcaccaacaaagaggtcagttcagtagtgatctggtcgccacccaggccagatacctgggcctcttggaaaacgtgcgagtgcgccgtgccggatatgcgcaccggcaggggtacggccctttccttgaaaggtatagactccttagcaggtccacatggccccactggaatgggggtgacagggagggcgtagaaaaggtcttgggagagttgtcgatgagctctggcgagctggcattcgggaagactaaaatcttcattcggtccccaaaaactctgttttatttagaagagcagcgcaggttgcgactgcaacagctcgccactctcatccagaagatttaccgcggttggaggtgtagaactcattaccagctgatgagaaaatctcaaattttaataagtagctggttccgcggaaatatgcaaaagaagtgctacggtaaaattaaagcttcggttctcctgatacaggcatttgtgcggggttggaaagctcgcaaaaattataggaaatatttccgttcagaagcggcactcacattggccgatttcatctacaaatcaatggtgcagaagtttctgcttggactgaaaaataacctgccaagtactaatgtacttgacaagacctggcccgcagcaccttataagtgcctgtccaccgcaaaccaagagctgcaacaactgttttaccagtggaagtgtaagagatttcgggaccagttgtccccaaagcaggtagaaatacttcgggagaagctgtgtgccagtgaactcttcaaaggcaagaaggcctcatatcctcaaagcgtgcccatcccattctgcggagactatatcggattacaaggaaaccctaagctgcagaaattaaagggcggagaggagggacccgtgctgatggctgaggccgtgaagaaggttaatcgtgggaacgggaagacatcttcccgaatcctgctgctcactaaagggcatgtaattctcactgacaccaagaaatctcaggccaagatcgttatcggcctggataacgtggccggtgtttctgtgacgtctctgaaggacggtctcttcagcctgcatttgtctgaaatgagctccgtgggcagtaaaggcgattttctgctggtctctgagcatgtgattgagttgctgacgaagatgtatcgagcagtgttggatgccacacagcgacagctcacagtgaccgtaacagagaaattttccgtacgcttcaaagagaactccgtggcggtgaaggttgttcaggggccagcgggtggggataatagtaaacttcggtacaagaagaagggatcccactgtctggaagtaaccgtccaatag

SEQ ID NO: 231571 - DNA, 3411 bp, synthetic construct
  misc_feature 1..3411: note = Description of Artificial Sequence: Synthetic coding sequence
  source 1..3411: mol_type = other DNA
atggcaaaaatggaggtcaagacgtccttactggacaacatgatcggcgtgggggatatggtgctgttggaacctcttaatgaagaaacctttattaataatctgaaaaagagatttgatcacagcgagatatacacatacattggttctgtggtcatcagtgtcaatccataccggtcccttcctatatattccccggaaaaggtggaagagtataggaataggaacttctatgaactgtcccctcacatcttcgccctgagtgatgaggcatataggtccttgagggatcaggataaagaccagtgcatattgatcacaggtgaaagcggcgcaggaaagacagaagcgagcaagctggtaatgagctacgttgccgctgtatgcggaaagggtgcggaggtgaatcaggtaaaagaacaactgcttcaaagcaatcctgtcctggaagctttcggtaatgctaaaactgtgcgcaacgataacagctcccgatttggcaaatacatggatattgagtttgacttcaaaggggaccccctcggcggagtcatatcgaactatctgctggagaaatccagggttgtcaaacaaccaaggggggagcgtaatttccacgtcttctatcagctactctctggggctagtgaggagttgttaaataagcttaaactggagcgagacttttcccggtacaactatctttcactggatagcgctaaggtgaatggtgtggacgacgccgcaaacttcaggactgttcggaacgccatgcagatcgtcgggtttatggatcacgaagctgaatcggtactggcggtggttgctgcggtgctcaaacttggcaacattgagtttaagcccgaatcgagagtgaacggactagacgaatcgaagatcaaagacaaaaatgagctcaaagaaatctgcgagctcaccggaattgaccagtcagtgctcgagcgagcattttcattcagaacagttgaggccaaacaagaaaaagtcagtaccaccctgaacgtcgcccaagcttattatgccagagatgctctcgctaagaacttatacagccggttattctcatggcttgtcaataggataaacgagtccattaaggctcaaaccaaagtcaggaagaaggtgatgggcgtcctggatatttacgggtttgaaatctttgaagacaactcatttgagcagttcattatcaactactgtaacgaaaagctgcaacagatcttcatcgagctgacgttaaaggaagagcaagaggagtacatccgagaagacatcgagtggacacatatcgattactttaataacgcgatcatctgcgacctgatcgagaacaacaccaacgggattctagctatgctggacgaggaatgcctccggccaggtacagtgacggatgagacatttctcgagaaacttaatcaggtctgtgctacgcaccagcatttcgagtcccgcatgtctaagtgctcaagatttttaaacgacacatctttgccccacagctgtttcaggattcagcattatgcaggaaaggtgctgtatcaagtcgagggtttcgtggacaagaataacgaccttctgtatagggatctgtcccaggctatgtggaaggcttctcacgcactgattaagtctcttttccccgaaggtaacccagccaagatcaatctaaagaggccacctacggctggctcccaatttaaagccagcgtcgcaacactgatgaagaacctgcaaaccaagaatccaaactacatccggtgcatcaagcctaacgataagaaggccgcacatatctttaacgaagcgctggtgtgtcaccagattcgatacctgggcttgctcgagaatgtcagagtgagaagagctggctatgcatttcggcaagcatacgagccttgtctggaaagatataaaatgctctgtaagcaaacctggccccactggaaggggcctgccaggtccggggttgaagttctctttaatgagctcgagatcccagtggaagagtacagtttcggtcgttctaaaattttcattcgtaaccccagaacattatttaagctagaagatctgaggaaacagcggctcgaagacctggctacgctgattcaaaagatctatcgcggatggaaatgccgaacccatttcctgcttatgaaaaagtctcagattgtcatagctgcatggtacaggaggtacgcccagcagaagagatatcagcagacaaaatcctctgcattggtgattcagagctatatccgagggtggaaagccaggaaaatcctacgggaactcaagcatcaaaagcggtgcaaggaggcagtgactacaatcgcagcatactggcacggcactcaagccagacgagagctccggcgtctgaaagaagaagcacggaataaacacgccatcgccgtcatatgggcatattggctgggctctaaggctcgcagagagttgaagcggctgaaggaggaggccagaagaaaacacgccgtggctgtgatctgggcttattggctggggctaaaggttaggcgggagtaccggaagttttttcgcgctaatgcaggtaagaaaatatatgagttcactctgcagcgcatcgtccagaagtattttctcgagatgaaaaacaagatgccttccctgtcacctatcgacaagaattggccctcccgtccctatttgtttctagattccactcataaagagctaaaacgaatttttcatttatggcgctgcaagaagtaccgggaccaattcactgatcagcaaaagctgatctacgaggagaaattggaggcaagcgaactatttaaggacaaaaaagcactttatccaagctcagttggccagccctttcagggcgcttatctggaaataaataaaaacccaaagtacaaaaagctgaaagatgctatcgaagaaaagattatcattgcggaagtagttaataaaatcaaccgtgctaacggaaaaagtacgagccggatcttcctgctgacaaacaacaacctgttgcttgcagaccagaaaagcggacaaatcaaaagcgaagtccctctcgtggacgtgacaaaggtctcaatgagcagccagaatgacgggttctttgcggtccacctcaaagagggatcagaggctgcctccaaaggagatttcctgttcagctctgaccatcttattgagatggctactaaactttacagaaccactctgtcccagactaagcagaaactcaacattgagattagcgacgaattcttagtccagttccgccaggacaaggtctgtgtcaagttcatccagggtaaccagaaaaatggatctgtgcctacctgcaagcgaaagaacaatagacttttggaggttgcagtaccctag

SEQ ID NO: 231572 - DNA, 3237 bp, synthetic construct
  misc_feature 1..3237: note = Description of Artificial Sequence: Synthetic coding sequence
  source 1..3237: mol_type = other DNA
atggctaaaatggaggttaaaacgagcctacttgacaatatgatcggagtcggggatatggttctcctcgagccattgaatgaagagaccttcataaataacctaaaaaaacggttcgatcattccgaaatctacacctatatcggatccgttgtgatctctgttaatccttacaggagtctgcctatttacagcccagaaaaggttgaggaatacagaaacaggaacttctacgaattgtctccccacattttcgcgctgtcagacgaggcctacaggtctctaagggaccaagataaggaccagtgcatacttatcaccggagaaagtggagctgggaagacagaggccagcaaattggttatgtcatatgttgccgctgtgtgcggaaagggcgctgaggtgaatcaggtcaaggaacagctgctgcagtctaatccggtgcttgaagcgtttggcaatgcaaagaccgtgagaaacgataacagctccagatttggtaaatacatggatatcgaatttgattttaaaggcgaccctctggggggtgtgatttcaaattacctactagagaagtcccgagtcgtaaagcagcctcggggagagcgcaatttccacgtcttctaccagttgctttccggagcttcagaagagttgctcaacaagttaaaactagagcgcgatttctcacgatataattacctctcccttgattctgccaaggtgaacggggtggatgacgcagccaacttccgaactgtcagaaatgcaatgcaaatcgtgggatttatggatcatgaggccgaaagcgtgttagcagttgttgcagctgtgctgaagctgggtaatatcgaatttaagcccgagtctagagtaaacggactggacgagtccaagatcaaggataaaaatgagctgaaagagatctgtgagctgacagggatcgatcaaagcgttctagaacgggctttctcttttagaactgtggaagcaaaacaggagaaggtgtccacaaccttaaacgtggctcaggcctattatgcgagagatgcgctggcgaaaaacctgtatagtaggctcttctcctggttggtgaatcgcatcaatgagtccattaaggcccaaacaaaggtccggaagaaagtcatgggagtgcttgacatttatggattcgagatcttcgaagacaattcttttgagcaatttatcatcaattactgcaacgaaaaactgcaacaaatcttcattgaactaactttgaaggaggagcaggaagaatacattcgcgaagacatagagtggacccatatcgactattttaataacgctatcatttgcgacttgatagaaaacaataccaatgggatcctcgccatgctggacgaagagtgtttgcgccctggaacagtgactgatgaaacattcctagagaagctaaatcaggtgtgtgctacccatcagcacttcgagagcaggatgtcaaagtgttcccggtttctcaacgacacatctctgccccactcctgttttaggatccagcactacgccggtaaggtactttaccaggtcgaaggttttgtggacaagaataacgacctgttgtatagggatctgtcacaggcaatgtggaaagcctctcacgcccttatcaagtctctctttcctgaaggaaatcctgctaaaattaatctgaaacggcctcctacagctggcagccagttcaaggctagcgtcgcaacactgatgaaaaatcttcagactaaaaatccgaactacattaggtgtattaagcctaacgacaaaaaggcagctcacattttcaacgaggctttggtctgccaccagatcaggtatctggggctgttggagaatgtccgagttagaagagccggatatgcatttcggcaggcctacgaaccctgcctcgaaaggtacaagatgctgtgcaagcagacctggccacactggaagggacccgctagatcaggagtagaagtgctgttcaatgagctggagattccggtggaggagtactccttcggaagatctaaaatcttcataagaaatcctcgaacgctgttcaagctggaagatctgcggaagcagagactcgaagaccttgccaccctcatccagaaaatttaccgaggctggaagtgtcgaacccactttctgctcatgaagaagagccagatcgtgatcgcagcctggtatagacgatacgcccagcaaaaacggtaccagcagactaagagtagtgccttagttatccagtcttacatcaggggctggaaggcgcgaaagatcctaagagagctgaagcaccaaaagaggtgtaaagaggctgtgaccaccattgccgcttactggcacggcacccaggtacggagggagtatcgtaagttctttcgagcaaatgcaggcaagaagatttacgagtttacactgcaaaggattgtgcaaaagtattttctggagatgaaaaacaagatgccatctctgagccccatcgataagaattggccgtcaaggccctatctgttcctggattctacgcacaaagaacttaaacggatttttcacctgtggagatgtaaaaagtacagggaccagttcactgaccagcaaaagttgatctacgaagagaagctcgaagccagtgagctgtttaaggataagaaggctctctacccctcctctgttggacagccgttccagggcgcttatctggagataaacaaaaaccctaaatacaagaaactgaaggacgcaattgaggagaagatcattattgctgaggtagtgaacaagattaatcgggcaaacggcaagtctacgagtcggatctttctcctgaccaacaacaatttactcctcgcagaccagaaatcgggacagatcaagtccgaggttccgctggtggacgtgaccaaggtaagcatgtcctcgcagaatgatggctttttcgctgtccatttaaaggagggttctgaagctgccagcaaaggagactttctgttctcctcagaccacttaatagaaatggccaccaagctctacaggaccactctgtcacagactaagcagaagctgaacatcgaaatcagtgacgaatttctagtccagtttaggcaggataaagtgtgtgttaaatttatccagggcaaccagaaaaatggatccgttccaacatgtaaaaggaagaacaacagacttctcgaggttgccgtgccttag

SEQ ID NO: 231573 - DNA, 3324 bp, synthetic construct
  misc_feature 1..3324: note = Description of Artificial Sequence: Synthetic coding sequence
  source 1..3324: mol_type = other DNA
atggctaaaatggaggttaaaacgtcactgctagataatatgattggcgtcggggacatggtgctcctcgagcctctgaatgaagaaacttttatcaataacttgaagaagcgcttcgaccattccgagatctacacatacataggctcagtcgtaatttccgtgaacccttacaggtcattgccgatatatagccccgaaaaggttgaagagtacaggaaccgtaatttctatgaactctcacctcacatcttcgccctctccgacgaggcgtaccgttcactgcgggatcaggataaagaccagtgtatcctgatcacaggggaatctggagcgggaaaaacagaggctagcaaactcgtcatgagctatgttgccgctgtgtgcggcaagggggctgaggttaatcaggtcaaagaacagctgctacagtcaaatcctgtgcttgaggcctttggtaatgcaaagactgttcgtaacgataactctagtagatttggaaaatatatggatatcgaattcgatttcaaaggggaccccctgggcggtgtcataagtaattatctgctcgagaaatcacgagtcgtgaaacagccacggggtgaaagaaatttccatgttttttaccaactgttgtcaggcgcttccgaggaactactaaacaagctgaaattggagcgggacttttcccggtataattacttgtcactggacagcgccaaggtcaatggcgtcgatgatgccgctaactttcgcaccgtcagaaatgccatgcagatcgtaggctttatggatcatgaagcggaaagcgtgctcgctgttgtggctgccgtgctgaagctaggaaacattgagtttaagcccgaatcaagagtgaacggtctggatgagagcaaaatcaaggataagaacgagctgaaagaaatctgcgagctaacaggaatcgaccagtctgtgctagagagggccttctcattccgcacagtggaggccaagcaggaaaaagtgtccacaaccctgaacgttgcccaggcgtactacgcaagagatgccctggcaaagaacctctactcacgcttgttctcatggcttgtcaaccggatcaacgaaagtatcaaggcccagaccaaagtgaggaagaaagtcatgggtgtgctcgacatctatggcttcgagatcttcgaagataatagttttgagcagtttatcatcaattattgtaacgaaaaactgcaacagattttcatagaactaacattgaaagaagaacaggaggagtatatacgcgaggacatcgagtggactcatatagactacttcaataatgctatcatctgtgacttaatcgaaaacaacaccaatggtattctcgccatgttggacgaggagtgtctgcgacctggcacagttaccgacgagacatttcttgagaaactcaaccaggtgtgcgctacccaccagcacttcgagagcaggatgtctaagtgtagtcggtttctgaacgacacgagccttccccacagttgttttcggattcaacattatgcagggaaagtgctgtatcaggtagagggcttcgtggacaaaaacaatgacctgctctaccgcgacctgtctcaagcaatgtggaaggccagccatgctcttattaagagcctcttccctgagggaaaccccgctaagatcaatctcaaaagaccacctaccgccggatcccagttcaaagccagtgtggcgacactgatgaaaaatctgcaaaccaaaaatcccaactacattaggtgtattaaacctaatgacaaaaaggctgcccatatattcaacgaggctctggtttgtcatcagatccgatacctgggcctgctcgagaacgtgcgggtgagacgcgctgggtatgcgttccggcaggcctacgaaccctgcctggagagatacaagatgctgtgtaagcagacctggccccactggaagggcccagcgaggagcggcgttgaagtgttgtttaacgagttagagatccccgtcgaggagtatagtttcggacggtctaaaatctttattcgcaaccccaggacactgtttaagttagaggacctcaggaagcaacgcctagaagatctggctactcttatacaaaaaatctacagaggctggaaatgcagaacccacttcttgctgatgaaaaagagccagatcgtaattgcggcatggtacagaaggtatgcccagcagaagcgatatcagcaaacgaagtcctcagcgctcgtgattcagagctacatccgaggctggaaggcaaggaaaatcctaagggagttgaaacatcagaagaggtgtaaggaggctgtgactactattgccgcttactggcacggcacgcaagcccgtcgtgagctgaaacgactgaaagaagaggcgagacggaagcacgccgttgctgtcatctgggcctattggctgggcttgaaagtgagaagggaataccgcaagttttttagagctaacgccggaaagaagatctatgagttcaccctgcaacggatcgttcagaaatactttttggagatgaagaacaagatgccttcattgagtccaatcgacaaaaactggcccagtcgcccatacctttttttggacagcacccataaagagctgaagcgcatcttccatctgtggcgctgtaagaaatatcgtgaccagttcacagaccagcagaagctgatatacgaagagaagctcgaggcgtctgaattattcaaggataaaaaagcgttgtacccttcctctgtgggccagccattccaaggagcatatcttgagatcaacaagaatcccaaatacaaaaagctgaaagatgctatcgaagaaaagatcataatagccgaagtagtgaacaagatcaatcgcgcaaacggtaaaagcacatctaggattttcctgctgaccaacaataacctgttgctggccgaccagaaatccggccaaatcaaaagtgaggtaccgctcgttgatgttactaaagtgtcaatgtcttcccagaatgatggcttctttgcggtgcacctgaaagaaggttccgaggccgcttctaaaggtgacttcttgttttcatctgaccacctgattgaaatggccaccaaactgtacaggacgaccctgagtcagacaaagcagaagctcaatatcgagatctctgacgaattcctggtgcagttcagacaagataaagtttgcgtgaaatttatccaaggcaatcaaaagaatggcagtgtgcccacgtgtaagcggaaaaataatcgcctgctggaggtggctgtaccgtag

SEQ ID NO: 231574 - DNA, 3411 bp, synthetic construct
  misc_feature 1..3411: note = Description of Artificial Sequence: Synthetic coding sequence
  source 1..3411: mol_type = other DNA
atggcaaaaatggaagtcaaaacctcgctgctggataatatgattggcgtcggggacatggttttgctcgagccattgaatgaggagaccttcatcaataacttgaagaaacgctttgatcactccgaaatctacacttacattggctctgtggtcatctctgtgaatccctataggagtctgccaatatattctcccgagaaggttgaggagtaccgcaatcgtaatttctatgaactgagcccccacatattcgcgctgagcgatgaagcctaccgttcgttacgagatcaggataaggatcagtgcatcctaattacaggagagagtggggcaggcaagaccgaggcctcaaagctcgtaatgtcctacgtagccgctgtgtgcggtaagggagccgaggtaaaccaggtcaaagagcagttgcttcagtccaaccctgtcctcgaggcctttggtaacgcgaaaacagttcgtaatgataattcttcgagatttggcaaatacatggacatcgagttcgacttcaaaggcgacccactgggcggagtcataagcaattatttgcttgaaaagagcagggtggtgaaacagccacgcggagagagaaacttccacgtgttctaccagctcctctctggagccagcgaagaactgctgaacaagctgaaacttgagcgcgacttcagcagatacaactacttgtcattagattccgctaaggtcaacggagttgacgacgccgcaaactttcgcaccgtcagaaatgcaatgcagattgtgggattcatggaccacgaggcggaatctgtgctcgccgtggtggcagccgtcctgaagttagggaatatcgaattcaagccagagagccgtgtaaacgggctggatgaaagtaaaattaaagacaaaaatgaactaaaggagatctgtgagctcactggtatcgatcaatcagttctcgaacgtgccttttccttccggaccgtggaggcgaagcaggaaaaagtttcaaccaccttaaacgtggcacaggcctattatgctagagatgctctggcaaagaatctctacagccgtcttttctcatggttggtcaacaggatcaacgaatcaattaaagcccaaaccaaggttaggaagaaagtgatgggcgtgctggacatctacggcttcgagatatttgaggacaattcttttgagcagttcatcatcaactattgtaacgaaaaacttcagcagatcttcatcgaactgacactcaaggaagagcaggaggagtacattagggaggatattgagtggacccacattgattattttaacaacgccatcatatgcgatctgattgagaataataccaatgggattcttgccatgctggacgaagagtgtctgaggcctggcaccgttacagacgaaaccttcttagaaaagctcaatcaggtctgcgccacccaccagcacttcgaatcccgcatgtcaaagtgcagcaggtttctcaacgatactagtcttccgcactcatgctttagaatccagcactacgcaggcaaagtattgtaccaggtggaaggatttgtggataagaacaatgatctcctctacagggacctctcccaggccatgtggaaggcttcacatgctctaatcaagagccttttccccgaagggaaccccgcaaaaattaatctgaagagaccccctaccgctggttcacagttcaaagctagtgtggcgacactcatgaagaatctgcaaacaaaaaatccgaattatatccggtgtattaagccaaatgacaagaaggcggcacacatctttaacgaagctctggtgtgtcaccaaatccgttatctcggtctcctggagaatgtgcgtgttaggcgcgcaggatacgctttccgccaagcctatgagccttgcctagagcgctacaaaatgctctgcaagcagacctggccacactggaagggcccagcacgctctggggttgaagtgctcttcaatgaactcgagattccagtggaggagtacagttttggccgttccaaaatctttataaggaatcccaggactctgtttaagttggaggacttgaggaaacagagactcgaagacctggccacactgatacagaaaatttatcgcggatggaagtgccgcacgcacttcctcctgatgaagaaatctcagattgtgatcgctgcctggtaccgcaggtatgctcagcagaaaaggtaccagcagaccaagagttccgccctggttattcagagctacattcgcggatggaaagctcgcaagatcctgcgtgagctgaaacaccaaaaacggtgtaaggaagccgtaacaacaatcgctgcttattggcatggcacccaggccagacgtgagctgagaagactgaaagaggaggccagaaataaacacgccattgccgtgatatgggcgtactggctgggatctaaagcaagacgggagctgaaaagactcaaggaggaggctcggagaaagcacgctgtggccgttatttgggcgtattggctgggtctgaaagtgaggcgggaataccggaagtttttccgcgcaaatgcgggaaaaaagatttacgagtttaccctccagaggattgtccagaagtattttctggaaatgaagaacaaaatgccgtccttgagtccgattgacaaaaactggcccagccgcccttacctttttctggatagcacgcataaagaattgaagcggatctttcatctctggcgttgcaagaaatatagagaccagtttactgaccagcagaaacttatttatgaggagaaattagaggcctcggagctatttaaggataaaaaggcactttacccgtcttccgttggccagcccttccagggcgcataccttgagatcaacaaaaaccctaaatacaaaaagttgaaggatgccattgaggaaaaaattattatcgcagaggtcgtgaacaagattaatcgcgctaatggtaagtccacttcgagaatattcctgctgacaaacaacaacctcctcctcgcagatcaaaagtctggccagatcaagtctgaggtgccactagttgatgtgaccaaagtttcaatgtctagccagaatgatgggttcttcgcggtccacctgaaggagggctccgaagctgccagcaagggcgacttcctgttttcatctgatcacctcattgagatggccactaaactgtacagaaccacgctttcccaaactaagcaaaagctgaacatcgaaatttcagatgagtttttggtgcaattccggcaggataaagtatgcgtgaaattcattcaggggaatcagaagaatgggtccgtgcctacttgcaagagaaaaaacaaccggctcctcgaagtcgctgtcccatag

SEQ ID NO: 231575 - DNA, 492 bp, synthetic construct
  misc_feature 1..492: note = Description of Artificial Sequence: Synthetic coding sequence
  source 1..492: mol_type = other DNA
atggcaaagatggaagttaaaacctctctgcttgataacatgataggagttggagacatggtactccttgaaccactcaatgaagagacctttattaacaacctgaaaaagcgctttgatcacagtgagatttacacatacatagggtcagtcgtgatctctgtgaatccgtatcgatccctgccgatctacagtcccgagaaggtggaggagtataggaataggaatttctacgagctgtcgccacacatcttcgcactgtccgatgaagcgtacaggtcactccgagaccaggacaaggaccagtgtattttaatcaccggagaatctggggctggaaagacagaagcaagcaaactcgttatgtcgtatgtagctgcagtgtgtggaaagggggcagaggtgaaccaagtgaaagagcagctgctccaatccaacccagtgttggaggccttcggcaacgcaaagacagttcggaacgacaattcatag

SEQ ID NO: 231576 - DNA, 252 bp, synthetic construct
  misc_feature 1..252: note = Description of Artificial Sequence: Synthetic coding sequence
  source 1..252: mol_type = other DNA
atggccaaaatggaggtaaagacctccctgttggacaacatgatcggagtgggggacatggtgctgcttgagcccctaaacgaagaaacctttatcaacaatcttaagaaaaggttcgaccattctgagatttacacttacatcggaagtgtcgtgatatccgttaacccatacagatcgctgcccatttactcacctgaaaaggtggaagagtataggaatcgcaacttttatgagctctcaccccactag

SEQ ID NO: 231577 - DNA, 450 bp, synthetic construct
  misc_feature 1..450: note = Description of Artificial Sequence: Synthetic coding sequence
  source 1..450: mol_type = other DNA
atggccaagatggaggtgaagacaagcctgttggataatatgattggagtgggtgatatggtcctacttgagccattaaatgaggaaacgttcatcaacaacctgaagaagaggttcgaccactcggagatctatacctatattgggtctgtggtgattagcgtgaatccttataggtctctgccaatctacagccccgagaaggttgaggagtataggaatcgtaacttctacgagttatcgccacacatctttgcactgagcgatgaggcataccggtcgctaagggaccaggacaaggatcaatgcattctcatcactggtgagagcggggctgggaaaacagaagctagcaaactcgtcatgagttacgtggctgccgtttgtggaaagggggctgaggttaatcaggtgaaagagcagctcttgcaatcaaatcccgtgctgtag

SEQ ID NO: 231578 - DNA, 1146 bp, synthetic construct
  misc_feature 1..1146: note = Description of Artificial Sequence: Synthetic coding sequence
  source 1..1146: mol_type = other DNA
atgaagaagtcccagatcgtcatcgccgcatggtacagacgttatgcgcaacagaaacgctatcagcagacaaagagcagtgcactggttattcaaagctacatccggggatggaaggccaggaagattctaagagagctgaaacatcaaaaaaggtgcaaggaagcagtgaccactatcgctgcatactggcatggaacgcaggctcgcagggaactgaagagactgaaggaggaggcgagaaggaaacacgccgtcgccgtaatttgggcatactggctggggctgaaagtccggagagaataccgtaaattctttcgcgctaacgccggtaagaaaatctatgagttcaccctgcaacgcattgtacagaagtacttcctagagatgaagaataagatgcctagtctgtcaccaattgataagaactggcccagccggccatatctgttcttagattcaacacataaagaattaaagcgaatcttccacctgtggcgatgtaagaagtatcgcgaccagtttaccgaccaacagaaattaatctacgaggagaagcttgaggcttctgaactgttcaaggacaagaaggcactttatccttcatctgtcgggcagcctttccaaggagcatacctcgaaatcaacaagaacccgaaatataaaaagctcaaagacgccattgaggaaaaaatcattatcgcagaagtggtcaataagataaatcgtgccaacggcaaaagcacgtcccggattttcctgctgaccaataataacttgctactggccgatcagaaaagcggccagatcaaaagcgaggttccattggttgatgttacaaaggtctctatgagcagccagaacgacggctttttcgccgtccacctcaaggagggttccgaagccgctagtaagggggacttcttgttcagctctgaccacctgattgaaatggcaactaagctgtatcgtacaacactgtctcagaccaagcagaagttgaacatagagatttccgacgagtttctagtgcagttcagacaagacaaggtgtgcgttaagtttatccaggggaatcagaagaacgggagcgtgcctacatgtaaacggaagaacaatagactcctggaggtcgccgttccttag

SEQ ID NO: 231579 - DNA, 924 bp, synthetic construct
  misc_feature 1..924: note = Description of Artificial Sequence: Synthetic coding sequence
  source 1..924: mol_type = other DNA
atggccaaaatggaagtgaaaacgtctctcttggacaatatgattggggtgggcgatatggtgctgctagagcctcttaacgaagagacatttattaataacttgaagaagcgcttcgaccacagtgagatttatacctacattggaagtgtggtaattagcgtgaatccttataggagtctcccaatctacagcccagaaaaggtcgaggagtaccgcaacagaaacttttacgagctgagtccccacatctttgctctgagcgacgaagcttaccgtagccttcgggaccaagataaagatcagtgtattcttatcactggcgagagcggtgcaggaaagaccgaggcttccaaactggtgatgtcctacgtggctgctgtttgtggtaaaggggctgaggtgaatcaagtgaaagaacaattgctccaaagcaacccagtcctagaagcctttggcaatgcaaagactgtcagaaatgacaatagctcacgcttcgggaagtacatggacattgagtttgattttaaaggtgatcctctgggcggtgtgatctccaactatcttcttgaaaaatcacgggtggtcaagcaaccacgtggggaacgaaacttccacgtgttctaccagcttctgtctggggctagcgaggaactcttgaataagctcaaactggaaagggatttctcacgctacaattatctgtctctggatagcgccaaagtcaacggcgtcgacgatgcagctaacttcagaacggtgcggaatgctatgcaaatagtcgggtttatggatcatgaggcggagtctgtgctggctgtagttgccgcagtcttgaagctcgggaatattgagttcaagccagaatcccgggtgaacggactggacgagtccaaaattaaggacaaaaacgagtccaagtag

SEQ ID NO: 231580 - DNA, 912 bp, synthetic construct
  misc_feature 1..912: note = Description of Artificial Sequence: Synthetic coding sequence
  source 1..912: mol_type = other DNA
atggccaagatggaagtcaagacctccctgctggataacatgatcggggtgggggacatggttttgctggaaccactgaacgaagagaccttcattaataatctgaaaaagagattcgaccatagcgaaatctacacgtacatcggatccgttgttatttccgtgaacccttacaggagcctgccaatttactcaccagaaaaggtagaagagtatcggaacaggaatttctatgaattgtcccctcacatatttgctctgtcagatgaggcctacaggagccttcgggaccaggataaggaccagtgcattttgataacaggagaatccggggctggaaagacagaagcctctaagctagtgatgtcttatgtggccgcagtgtgtggaaaaggggctgaagtcaaccaggttaaagagcagttattacaatcaaacccagttttggaggcttttgggaatgccaaaacagtgagaaatgacaatagctctcggtttggcaagtacatggatatcgagtttgatttcaaaggagatcccctcggaggtgtgatctcgaattacctgctggaaaagtccagggtggtgaaacaacctcgaggggagcgcaatttccatgtcttctatcagctactgtcaggagcctcagaggaactgctgaataaactgaagctcgagagagacttcagtcgatataactacttgagtctggattctgccaaagtgaacggtgtggacgatgccgctaacttcaggaccgtgcgaaatgctatgcagatcgtgggcttcatggaccacgaggcagagtccgtgctagcagtggtggctgcagtgttaaagcttggcaacatcgaattcaagcctgaaagccgggtgaacggactggacgagtccaaaattaaggacaaatag

SEQ ID NO: 231581 - DNA, 3192 bp, synthetic construct
  misc_feature 1..3192: note = Description of Artificial Sequence: Synthetic coding sequence
  source 1..3192: mol_type = other DNA
atggccctccaagtggaactggtgcccactggagaaataattagagtcgtgcatcctcacaggccgtgtaaactagccttgggcagcgacggcgttcgcgtgactatggaatcagcgctgaccgctcgcgatcgcgtgggggtgcaggattttgtgctgctggaaaattttacttccgaggcggcttttatagaaaatcttcggcgacgattccgcgaaaatctgatctatacctatattgggccagtgctggtaagcgttaatccataccgggatttgcagatttatagccggcagcatatggagaggtaccggggagtgtcattttatgaagtgcccccacaccttttcgccgtagcagatacagtctacagggcattaagaactgagcgacgggatcaagctgttatgatctctggtgaaagcggcgctggaaagactgaagcgactaagcggcttctgcagttctacgccgagacctgccctgccccagagcgaggaggcgcagtgcgtgatcgcctcctccagtcaaatcccgtgcttgaggcattcgggaatgcgaagactttacgcaacgataactccagtaggttcggcaaatatatggatgtgcagttcgattttaagggagcacctgtaggtggacatattctgtcctacttactcgagaagtccagagttgtccatcagaatcatggggaaaggaattttcacattttctaccagctgcttgagggcggtgaggaggagaccctgcgaaggcttggccttgagcgcaacccccaaagttacctgtatttagttaaggggcaatgcgcaaaggtatcctcaattaatgacaaaagtgattggaaggtggtccgtaaagccctgacggtcatcgactttaccgaggacgaagtggaggatttattgtcgatcgtcgcctcagtgctgcatctgggcaacattcacttcgccgcaaacgaggagagcaatgctcaagtgacgacagagaatcagctgaagtatttgacgcgccttctgtccgtcgaagggtccactctaagggaggctttaactcacagaaagattatcgctaaaggcgaggaactgctgagccctcttaatctcgagcaggccgcttatgccagagatgccctcgccaaggccgtttacagtagaactttcacatggttagtgggtaaaattaatcgttctctcgccagcaaggatgtcgaatccccttcatggagaagtaccactgtgttaggacttctcgatatttatggctttgaagtgttccagcataactcattcgagcagttctgcatcaattactgtaacgagaagcttcagcagttgttcatcgaactcacgctgaaaagtgaacaggaagaatacgaggccgaagggatcgcctgggaacccgtccagtactttaataacaaaatcatttgtgacctggtggaggagaaatttaagggaatcatctctatactggacgaggaatgcctgaggccaggtgaggccacggatctgacttttctcgagaaattggaggacacggttaaacaccacccccacttccttacacacaagttggccgaccagcgcacccggaagagcctcgggaggggcgaattccggctgctgcactacgcaggcgaagttacttatagcgtgaccgggttcctcgacaaaaacaacgaccttcttttcagaaatctgaaagaaactatgtgttccagtaaaaatccaatcatgtcccaatgttttgatagaagtgaactctctgacaagaaacggcctgaaacagtcgccacacagttcaagatgagcttattacaactggtggagatcctccagtccaaagaaccagcctacgtgcgatgcatcaagcccaacgatgccaagcagcccggtcggttcgatgaggtcttgattcgccaccaggttaaatatttaggactgttggaaaatctgcgcgtgcgcagggccggtttcgcgtatagaaggaaatacgaggctttcctacagcggtataaatccttgtgtcctgagacgtggcctacttgggccggacggcctcaagacggcgttgccgttctggttcgccacctcgggtacaaaccagaggagtataagatggggaggacaaaaattttcattcgatttcccaagactctgtttgctacagaggacgcattagaggttcgccgacagagcctcgccacaaaaatacaggccgcttggcgcggtttccactggagacagaagttcctgcgagtcaagagaagcgccatatgtattcaatcttggtggcggggaacattaggccgacgcaaagctgccaaaagaaaatgggccgctcaaaccattagaaggctgatccggggatttgttcttaggcatgcgcctaggtgcccagagaacgctttctttcttgatcatgtacgaacttctttcttgctcaatctaaggcgccagctgccccaaaacgtgttagacacaagctggccgaccccacctccagccctcagggaggcctccgagctgttgagagaattatgtataaaaaacatggtgtggaaatattgtcgatcaattagtcccgagtggaaacagcagctacaacagaaggcagtggcatccgaaatctttaagggcaagaaggataattatcctcagtctgtcccacgcctgtttatctcgacccggcttggcacggacgaaatatcccccagggtcttgcaagctttaggatcagagcctatccaatacgccgtacctgtcgtgaaatacgaccgcaagggctacaaacccaggtccaggcagttacttttgacaccaaatgctgtggtgattgtggaggacgcaaaagtgaagcaacgcatcgattacgccaatcttacagggattagtgtgtcgagcttaagtgatagtctctttgtgcttcatgtccaacgggcagataacaagcagaaaggagacgtggtgctccagagtgatcatgtgatcgagacattaactaaaaccgccctgtcggcaaatagagtgaactccatcaatataaaccaaggaagcataacattcgcaggcggtccaggacgtgatggcactatcgatttcacacccggatctgaattgctgattaccaaggcaaagaacggccatctcgccgtggtggcaccacgcttgaacagccggtag

SEQ ID NO: 231582 - DNA, 3087 bp, synthetic construct
  misc_feature 1..3087: note = Description of Artificial Sequence: Synthetic coding sequence
  source 1..3087: mol_type = other DNA
atggagagcgcacttacagcgagagaccgggtgggagtgcaggatttcgtacttttggagaacttcacatcagaagccgctttcattgagaacctgagaaggcggtttagggagaatcttatctatacttacatcgggcctgttctggtctcagtgaacccttaccgggacctgcagatatatagtcggcagcatatggagcggtacaggggcgtgagtttttatgaggtgcctccacacctgtttgctgtggcagacacagtttatagagccctgaggacagaaaggcgcgatcaggccgtgatgatcagcggggagagtggcgcaggaaagaccgaggcaactaagcgtcttctccagttttatgctgagacctgtccagctcccgagcgaggtggtgccgtgcgcgatagacttctgcaatccaatcccgtcctggaggctttcgggaacgccaaaaccctaaggaacgataatagctctcggtttggaaagtacatggacgtgcagtttgattttaaaggcgcaccggtgggcggacatatcctctcctacttgttggaaaagtcccgcgtagttcatcaaaaccacggagagcggaacttccacatcttctatcagctgctggagggtggcgaagaggaaactcttcgcagactcggcctggagaggaacccacagagctatctatacctggttaagggccagtgcgccaaagtcagctctattaatgacaaatccgattggaaggttgtgcgcaaggcactgacagttattgactttactgaagatgaggtggaggacttactctctatcgtcgctagtgtgctgcatcttggcaatatacactttgcagccaatgaagaatctaacgcacaggtgactacagagaaccagcttaagtatctgacacgtctcttaagcgtggaaggtagcaccctgagggaggctctgacccatcgcaagatcattgccaaaggagaagagctgctgtcacccctaaacctggagcaagccgcttatgccagagacgcgctggcaaaagccgtgtactccaggactttcacatggctggttggcaagatcaaccggtctctggcctctaaagatgtggaaagtccctcttggaggagtacaactgtactcggcctacttgacatttatgggtttgaagtgttccaacataacagcttcgaacagttctgcatcaactactgcaatgagaagctgcagcagcttttcattgagcttaccctgaagagcgagcaggaggagtacgaggccgaaggcattgcatgggagcctgtgcagtattttaacaacaagattatttgcgatttagtggaagaaaagttcaaggggattatttcaatcctggacgaggaatgcttgcgtcccggagaagccactgatcttacttttctggagaagcttgaggataccgtgaagcaccacccacacttcctgacacacaaactggcagatcagcgcactaggaagagcttaggtcgcggtgagtttaggctgctgcactacgccggtgaggtgacctactccgtcacgggttttctggacaagaacaatgacctgctctttcggaacctaaaggagacaatgtgttcatccaaaaacccaataatgagtcagtgttttgatcgctcggagctctctgataaaaagcgacctgaaaccgttgctacgcaatttaaaatgtcattgctgcagctggtggagatcctccaatcaaaggagcctgcatacgtgaggtgcattaaaccaaatgacgctaagcagcctgggcgttttgacgaggtgcttattaggcaccaagtcaaatacctgggactattggagaacctgcgtgtacggagagcgggttttgcgtaccgcaggaagtacgaagcatttctgcagcggtataagagtctgtgccccgagacatggcccacttgggcaggaagacctcaggatggtgtagcggtactggttcgccatctaggctataagcctgaagagtataaaatgggacgaacaaaaatctttatacgctttcccaaaacattatttgctacagaggatgctctggaagtacggaggcaatcactggctacaaaaatccaggcggcatggcggggattccattggcgccagaagttcctgagagttaagagatctgccatatgcatacagagctggtggagggggaccctcggtagaagaaaggctgccaagagaaagtgggccgcacaaacgatccgtcggctcatccggggatttgttcttaggcatgcaccaagatgccctgaaaacgcctttttcctggatcacgtgcgtacctcctttttgctgaatttgcgccgacagttgccccaaaatgttctcgatacctcatggccgaccccacctcctgccctgagagaggcttcagagctgcttcgggaactgtgcattaaaaatatggtgtggaaatattgcaggtctatcagtcctgagtggaagcagcagctacagcagaaagctgtcgcctcagaaatcttcaaaggaaagaaagacaattatccacagtcagtgccgagactgtttatttcaacaaggctgggcacagatgagattagtcccagggtccttcaagcactgggttcagaacctatacagtacgctgtccccgtcgtcaaatacgacaggaaggggtataaacccagatccaggcaacttctcctcaccccaaatgccgtagtaatagtcgaggacgccaaagttaagcagagaatcgattatgccaacctgaccggcatatcagtctcctcgctctctgattccctattcgtcttacatgtccagagagccgacaacaaacagaagggggacgtcgtgctgcagagcgatcatgtgatagagaccctgaccaagactgccctttcagccaacagggtcaactcgattaacattaatcaggggtctattacgtttgccggagggccaggacgggacggaactatagacttcactccgggttccgagctgctcattacaaaagccaagaacggacacctcgctgtggtggcgcctagacttaattcccgctag

SEQ ID NO: 231583 - DNA, 3135 bp, synthetic construct
  misc_feature 1..3135: note = Description of Artificial Sequence: Synthetic coding sequence
  source 1..3135: mol_type = other DNA
atgcggtatagggcttccgcactgggaagcgatggcgttagagtcactatggaaagcgctctcaccgcacgcgaccgcgtgggcgtccaggactttgtgctgctcgagaactttacctcagaggccgcttttatcgaaaatctccgacggagattcagagagaaccttatttatacctatattgggcctgtgctggtgagcgtaaatccctatcgcgatctgcagatttattctaggcagcacatggagcggtacaggggcgtgagcttctacgaagtcccccctcatcttttcgccgtggcagacaccgtttaccgcgctcttcggaccgagcggagggaccaggcagtgatgatctccggagagtccggtgccggtaagaccgaagccactaagcgactgcttcaattttacgctgagacgtgtcccgctcccgaacggggaggggctgtacgagatagattactccagtctaatccggtactggaagcctttgggaatgcaaaaacattgagaaacgataactcgtccagatttggaaagtacatggatgtccaattcgacttcaagggagctccagtgggaggccacattttaagttatctcctagagaaaagcagggtggtgcaccagaatcacggtgaacgcaactttcacatattctaccagttgctggagggaggcgaggaagaaacgctgcgccgattgggcctcgagcgtaaccctcaaagctacttatatctggtcaagggccagtgtgctaaggtcagtagcatcaatgataaatcagattggaaggtggtgaggaaagccctgacagtgatcgactttactgaggacgaggttgaagatctgttatcaatcgttgcatcagtgctccatctcggcaatatccacttcgctgctaatgaagagagcaatgcacaggttacaacggagaatcagctcaagtatttgacaagactactttcagtcgaaggctcaacactgagggaagctctgacacatcgcaagatcattgccaagggcgaggagctcctgtccccccttaatctggagcaggcagcatatgcccgtgacgccctcgccaaagccgtttattcccgtaccttcacctggttggtcggaaaaattaatcgcagtcttgcgtccaaggatgtcgaatctcccagttggcggagtaccacagtattggggctcttggacatctacgggtttgaagttttccagcacaactccttcgagcagttctgtatcaactactgcaacgagaagctccaacaacttttcatcgaactgactttaaagtcggaacaggaagaatacgaggctgaggggatagcatgggagccagtccagtatttcaataataagattatttgcgatctggtagaggagaagttcaagggaatcatttcaattttggatgaggagtgtctccggccaggtgaggccacagacctgacttttctggagaaacttgaggacactgtgaaacaccaccctcattttcttactcacaagcttgctgaccaaagaacccggaaatccctgggaagaggagaatttcggctgctgcattacgcgggtgaagtgacctattcagtgaccggttttctggacaagaacaacgacctcctgttccggaatctgaaggaaaccatgtgctcgtctaagaaccccatcatgtcccagtgtttcgaccgcagcgagctgagcgataagaaaagacctgagaccgtggcaactcaatttaagatgtcattgctgcagctggtcgaaatcctccaatcaaaagaacccgcttacgtgagatgtatcaaacccaatgacgcgaaacagcccggaaggtttgatgaagttcttatacgccaccaagtgaagtacctgggcctgttggaaaatctcagagtgagacgggcaggctttgcttatcgccgtaaatacgaggcattcttacaaaggtataagagcctctgccctgaaacttggcctacatgggcaggtagaccccaggacggggtggccgtgctggttaggcacttgggctataagcccgaggaatataaaatgggtaggactaaaattttcatcaggttccctaagaccttattcgccactgaggatgctttggaagtgaggcgacaatccctggccaccaagattcaagctgcctggaggggctttcattggcgtcagaagttcctcagggttaagcggagcgctatatgcattcagagctggtggcgcggtacgctaggtagaaggaaagccgcaaagaggaagtgggccgcacagacaatacgacgactcattcgcggttttgtgctccggcacgcccctaggtgccctgagaatgctttctttctcgaccatgtgaggacaagctttctccttaacctccgcagacagctcccgcagaatgtgctcgataccagctggcctacaccccctcctgcgctccgggaggccagtgagctgctacgtgaactctgtataaagaacatggtctggaaatactgtcgtagcatctcccccgagtggaaacagcagctgcagcagaaagccgtcgccagcgagatttttaaagggaaaaaggacaactatcctcagagtgtgccgcgtcttttcatctctactaggctggggacagacgagatttcccccagagtgctccaggcccttgggtctgaacctatccagtatgccgtgcccgtcgtgaagtatgacagaaagggctataagcctaggagccgacagctcctgctgacccccaacgccgtcgtgatagtggaagacgccaaggtgaaacagcgaattgattacgccaatctgaccgggatctccgtctccagccttagcgattcattatttgttcttcacgtccagcgagcggataataaacaaaagggcgacgtcgtcctgcagtctgaccatgtgattgaaacactgacgaagaccgcactgtctgccaatagagttaatagtattaacattaaccagggctccatcacattcgcaggtggcccagggagggacgggactatagacttcacccccggttctgagctgttaattacgaaggctaagaacggccatctcgccgttgtagcaccacgactgaactcacgatag

SEQ ID NO: 231584 - DNA, 2418 bp, synthetic construct
  misc_feature 1..2418: note = Description of Artificial Sequence: Synthetic coding sequence
  source 1..2418: mol_type = other DNA
atggaatccgctctgacagccagggatagggtaggggtgcaggacttcgtattgttagaaaactttacatctgaagcagccttcattgaaaatctccggaggaggtttcgcgaaaacctcatctacacatacataggccctgtcctcgtgagcgtgaatccctacagggatcttcagatctactccaggcagcacatggaaagataccggggtgtgagcttctacgaggtccctccccatctttttgccgtggctgatacagtttatcgcgctcttcggaccgagagaagagatcaagcagtcatgatatctggagaatcaggggctggtaagacagaagccactaagcgcctgctgcaattttacgccgagacctgccctgcacctgagagaggcggagcagtcagagatagactcttgcagtccaaccctgtgctggaagcctttggaaatgccaagacactcaggaacgataactccagcagatttggcaaatacatggatgtccagtttgatttcaagggggctcccgttggcggacatattctctcgtatctgctggagaaatcaagggttgttcatcagaaccacggggaaaggaacttccatatattttaccagcttctggaaggaggagaagaagagacgctgagaaggcttggattagagcgtaacccacagtcttatttatatctcgtgaaggggcagtgcgcaaaggtttcatccattaacgataagagcgactggaaggtcgtgcgtaaagccctaacagtcattgactttaccgaagatgaggttgaagacctgttgtcaatcgttgcctctgtgctgcacctcgggaacatccattttgcggctaatgaagagtccaacgcccaggttacaacagaaaaccagctaaagtacttgaccaggctgctgtcggtcgaaggttctaccttgagggaggctctgacccaccggaagatcatcgccaaaggcgaagaactgctttcacccctgaacctggagcaggctgcctacgccagggacgccctcgctaaggctgtttatagcagaaccttcacttggctcgtgggcaagataaatagaagcctggcatcaaaagatgtagaatctccatcttggcgttccaccacagtgctggggttactggatatttacggctttgaggtgtttcaacataattctttcgaacagttttgtatcaactattgtaacgaaaagcttcaacagctgttcattgaacttactcttaagtcagagcaggaggaatacgaggcggaggggattgcctgggaacctgtgcagtatttcaataataaaatcatctgtgacctggtcgaggagaagtttaagggcattatcagtatcctggacgaggaatgcttgcggcctggtgaggccacagatttaacattcttggaaaagcttgaagataccgtgaaacaccacccccactttttgactcacaagctcgctgaccagagaacccgcaaatctctgggacgcggagagtttcgcttgctgcactatgccggagaggtcacctattcagtcactggttttttggacaagaacaacgacctactgttccgtaatctgaaggaaaccatgtgctccagcaagaacccaatcatgagccagtgcttcgaccgcagcgaactgtctgacaagaagaggcctgagacggtagctactcagttcaaaatgtctctgctgcaactggtggagattctacagtctaaggagcccgcatatgtgcgctgcatcaagcctaatgatgccaagcagcctggcagattcgacgaggtactcattcggcaccaggtgaaatacttgggactgctggagaaccttcgcgtcaggagggccggatttgcataccgtaggaaatacgaggcatttcttcaaagatataaatcactgtgccctgagacatggcccacctgggccggtaggcctcaggatggcgtggccgtactggtgcgacatctgggatacaaaccagaggaatataagatggggagaaccaaaatatttattagattcccaaaaacccttttcgcaactgaggatgctctggaggtacgccgacaaagtttagctactaagattcaggccgcttggcgcggtttccactggaggcaaaaattcctacgggtgaaacggtctgccatctgcatccagtcgtggtggagaggtacactgggacggagaaaagcagcaaaggaggtcggaggtacggatcaccccgcagcccatccaagattgcggccagcgcctcgaccccctctgcctcgggagcgattactgcccggaccctgcgctcacctctttttcgctaaacccgaggccgcagccgctcctgagtgtcccggtcaccttgttgcgcatgcgcctacttgccccgcatag

SEQ ID NO: 231585 - DNA, 3135 bp, synthetic construct
  misc_feature 1..3135: note = Description of Artificial Sequence: Synthetic coding sequence
  source 1..3135: mol_type = other DNA
atgcgtgggagggcgagtgctttggggtcagacggagtccgcgtgaccatggaaagcgcactgactgctcgcgatcgtgtcggggtacaggactttgtgctcctggagaactttactagcgaagcggctttcatagagaacctgaggagaaggtttagagagaacttaatttacacatatatcggtccagtcctggtgtcagtaaatccataccgcgatctgcagatttactcaagacaacatatggagaggtaccgcggagtgagcttttacgaggtaccacctcacctctttgctgtagcagacaccgtctatcgggcactgcggacggagaggcgggaccaagctgtgatgatatctggcgagagcggagcgggtaagactgaagctactaagaggctcctccaattctacgctgagacttgccccgctcctgaacggggaggggctgtcagggatagattattgcagtccaatcctgtcctagaagcttttggtaatgcaaagacacttcggaacgacaatagctctagattcggaaagtacatggatgtgcaatttgatttcaaaggcgctccggtgggtggacacatcttgagctatttgctggaaaagagcagagttgtgcatcaaaatcacggagaaaggaactttcacatcttctaccagttacttgaagggggagaggaggagaccctccggaggctagggctggaaaggaatccccagtcctacttatacttagtcaaaggacagtgcgcaaaagtctcaagtattaatgacaaaagcgattggaaggtggtgcgaaaagccctcaccgtcatagatttcacagaagacgaggttgaggatcttttgagcatcgtagcgtccgtgcttcatttggggaatatccactttgctgcgaacgaggagtccaacgcgcaggtcacaacagagaaccaacttaagtacctgaccagattgctaagcgtcgaagggagtacattgagggaagcgttgacacacaggaagattatcgccaagggtgaggaacttctgtctcctctcaacctggagcaggccgcatacgctcgggatgccttggccaaagcagtttactccaggactttcacatggctggttggcaagattaaccgatccctggcctccaaggatgtggaatcgccctcttggcggagtaccaccgtgctgggcctgttggatatttacggcttcgaggtgttccagcacaatagttttgaacagttttgcatcaattactgtaatgaaaagctgcagcagctgtttatcgagctgaccttgaagtctgaacaggaggagtacgaagctgaaggtatagcatgggagccagtccagtattttaacaacaagattatctgcgacttagtagaggaaaaattcaagggtattatcagtatcctcgacgaggagtgcctcaggccaggagaggccacagacctcaccttcttagagaagcttgaagacactgttaagcaccacccccactttttgactcacaaactggccgaccagcgtactcggaagagccttgggagaggcgaatttaggctgctccactatgctggagaagtcacctactccgtgacaggatttctggataagaataacgacctgttgttcaggaatctcaaagaaactatgtgttccagtaaaaatccaatcatgtcccagtgttttgatcgcagcgagctgagcgacaaaaagcgtcccgagacggtggcgactcagttcaagatgtccttactccagctggttgaaatactccagagtaaagaaccggcatatgtgaggtgtataaagccgaacgacgcaaagcagcctggcaggtttgacgaagtgcttatcaggcaccaagtcaagtacctcggcttgctggagaatctaagggtgcggagagctggctttgcatacagacgtaagtatgaagcttttctgcaacgctataagagcctgtgtcctgaaacctggcccacatgggcgggtcgtcctcaagacggagtagcagtgttggtgagacaccttggctacaagccagaagagtacaaaatgggtcgcacaaaaatcttcattcgattccccaaaacgttatttgcaaccgaggacgccctggaagtgagaagacagtcacttgccaccaagatccaggccgcttggcgagggttccactggagacaaaagttcctgcgggtcaaacggtcagcaatttgcattcagtcatggtggagaggcacccttggcagacgcaaggccgctaaaaggaagtgggctgctcagacaataaggcgcctcatacgcggtttcgtgctgagacacgcaccgcgatgtcccgagaatgctttcttcctcgatcatgtccggacatccttcctgctcaacttgagaagacagcttcctcagaacgtgctagatacatcttggcctacacctccgccagctttgcgtgaagcctccgagcttctgcgggagctgtgcatcaagaatatggtgtggaagtattgtcggagcatttctcccgaatggaagcagcaacttcaacaaaaggctgtggcgagcgagatcttcaaggggaagaaagataactatcctcagtcagttcctagactgttcatttccactagactgggaaccgacgaaatctccccccgagtgttgcaggccctgggctccgagccaattcagtacgcagtgcccgtggtgaagtacgacagaaagggttacaaaccgaggagcaggcagctacttctcaccccaaacgctgttgtgattgtggaggacgctaaagtcaagcaaagaatcgattatgcaaacctgacaggcatcagtgtttccagtctgtccgactctttatttgtcctccacgtgcagcgagccgataataagcagaagggtgacgttgtgctgcagtcggaccatgttattgagactctgactaagactgcgttaagcgctaaccgggtgaattcaatcaatatcaaccagggcagcatcaccttcgcaggcggacctggacgcgacggcacaatcgattttacaccgggaagcgagttgctaataaccaaagcgaaaaacgggcatctcgcggtggttgccccaagattaaactccagatag

SEQ ID NO: 231586 - DNA, 3120 bp, synthetic construct
  misc_feature 1..3120: note = Description of Artificial Sequence: Synthetic coding sequence
  source 1..3120: mol_type = other DNA
atggccctaggctccgacggggtaagggtgacaatggaaagcgccctcacagcgcgagacagggttggggttcaggattttgtcctgctggagaacttcacttctgaggccgcattcattgaaaatctgcggaggcgatttcgcgagaacttgatctacacctacatcggcccagtgctcgtgtctgtcaacccctatcgggatcttcagatctatagccggcagcatatggaacggtaccggggtgtctcattctacgaggttcctccgcacctttttgcagttgctgacaccgtataccgggcactgaggactgaaagaagggaccaggccgtaatgatctcaggagagtccggagccggtaaaaccgaggccacgaaacggttactgcagttctacgcagagacctgtcccgcacctgagaggggaggtgccgttcgggacagattgctgcaaagtaacccagtcctggaggcttttggcaatgccaagaccctgagaaacgacaacagctcacggtttggaaagtatatggatgtgcaattcgactttaaaggggctccggtgggcggacacatcttaagctaccttctcgagaaatcccgggtcgtgcatcagaaccatggagagaggaactttcatatcttttaccagctgctagaaggaggcgaggaggagaccttaaggcgcctgggcctagagcggaacccccaatcatatttgtatcttgtgaagggccagtgtgccaaagtgtcgtccataaacgataaatcagactggaaggtcgttcggaaagcactgaccgtgatagacttcaccgaggacgaggtagaagatttgctctccatcgtcgcatccgtgctgcatctggggaacatccactttgctgcaaatgaggagtcaaatgcacaagtgacaacagagaaccagcttaaatacctgacccggctccttagcgttgagggatctacgctccgcgaagcactgacacaccgaaagatcattgcgaagggggaggagctgctgtctccattgaaccttgagcaggctgcctacgctcgcgatgctctggcaaaggctgtgtactctagaacctttacctggttggtgggaaagattaaccgaagtcttgcatctaaagacgtagaaagtcctagttggcgctcaacaacggtgctgggactgctggatatttatgggttcgaggtgtttcagcataactcattcgagcagttctgcattaactattgcaatgaaaagctccagcagttgttcatcgaactgacgttgaagagtgagcaggaggaatatgaggcagagggcattgcctgggaacctgtgcagtacttcaacaataaaatcatctgcgaccttgttgaggaaaagtttaagggcatcatcagcatcctggacgaagagtgtctcaggccaggagaggccaccgatctgacatttttggagaaactagaggatactgtgaagcaccaccctcattttttgacacacaagctggcagaccaacggacaagaaaaagcctcggtcggggagaattccggctgctgcattacgctggagaggttacttatagcgtaacgggattcctcgacaaaaacaacgatctactgtttagaaacctgaaagagaccatgtgctcatccaagaacccgatcatgtctcagtgctttgaccgttcggaactgagcgataagaaaaggcccgagaccgtcgctactcagtttaagatgagtctgctgcagcttgtagagatactgcagagcaaggaaccggcttatgtgaggtgtataaagcctaacgacgccaaacaaccaggtcggttcgatgaggtactgattcgccatcaggtcaaataccttggattactcgagaacctgcgggtgagaagggctggctttgcatacaggaggaaatacgaagccttcctgcagcgctataagtctctatgccctgagacctggcccacttgggcaggcaggccacaagacggagtggcagtgctggtgagacacttaggttacaaacccgaggagtataaaatgggacggacgaagatcttcatcagatttcctaaaactttgtttgctactgaggacgcactggaagtgcgaaggcagtcattagccactaaaattcaggcggcatggagggggttccactggagacagaaattcctccgtgtgaagcggtctgcaatttgtatccagtcctggtggcgcggaaccctgggtaggcgaaaggccgcaaaaagaaagtgggcggctcaaaccatcagacgtttaattcggggattcgtccttcggcacgcccctcggtgccccgagaacgcctttttcttagatcatgtcagaacctccttcctgctgaatttgcgtcgccaattaccgcaaaacgttttggacacctcttggcccacaccccctccagccctgagggaagctagtgagctacttcgcgagctgtgcatcaagaacatggtgtggaagtactgcagaagcatttctcctgaatggaaacagcagctccagcagaaggcggttgcttcagaaatctttaaaggtaagaaggataattatccccagagcgtccctcggttatttatcagcaccagacttgggactgacgagataagtcccagggtgctgcaggcacttggtagcgagcccatccagtatgcggttccagtcgtgaaatacgataggaagggttataagccgcgttctcgacaactcctactgactcctaacgctgtggtgatcgtggaagacgctaaggtgaagcaacgcatagactacgctaacttgactggaattagcgtgtccagtctgtcagactctctgtttgtgttgcacgtgcagcgcgctgataacaaacagaaaggcgacgtggttttacaatctgatcatgtcattgagacattgacaaagacagcactctccgctaatcgagtcaacagcattaacattaatcaaggatctatcacgtttgctggcggacccggaagagacgggaccatcgatttcacgccaggcagcgagcttttgatcaccaaagctaagaacgggcacctggccgtcgtggcccctcggctcaactcccgctag

SEQ ID NO: 231587 - DNA, 3021 bp, synthetic construct
  misc_feature 1..3021: note = Description of Artificial Sequence: Synthetic coding sequence
  source 1..3021: mol_type = other DNA
atggccgaacaagagtccctggagttcggcaaagctgactttgttttgatggatacagttagtatgccagaatttatggcaaacctccgattgcggttcgagaagggacgtatctacaccttcatcggggaagtagtcgtttctgtgaatccctacaagctcctcaacatctatgggagagacaccatcgaacagtacaagggtcgtgaactgtacgaacgcccaccacatcttttcgcaatcgcagacgctgcttataaggccatgaagcgcagatctaaggatacctgcatcgttataagtggcgaatctggcgctggaaaaacagaagcatcaaagtatataatgcagtatatcgctgccattacaaatccaagccagcgggcagaggtggaaagggttaaaaatatgcttctgaagagcaactgcgtgctggaggcattcggtaacgcaaaaactaaccgcaacgacaattcaagtcggttcggcaaatacatggatattaactttgatttcaaaggcgatccgatagggggacacatcaataattatctgctggagaaatcaagagttatcgtgcagcagcccggtgaacggtctttccactcattttaccagctgctgcaaggcggatcagaacaaatgctgcgatcccttcatttgcaaaagagcctctcaagctataactacatccacgtcggtgcgcaactgaagagctctattaatgatgctgccgagttccgcgttgttgccgacgctatgaaggttataggtttcaagccagaagagatccaaacagtgtataagatcctcgcagccatacttcacctaggtaatcttaagtttgtggtcgatggagacaccccactgatcgagaacggaaaagtcgtctccattatagcggagctgttgtcaactaaaactgacatggtggagaaagctttgctctatcgcacagtcgctactgggagggacatcatagacaagcagcacactgaacaggaagcatcatacgggagggacgccttcgctaaagctatctacgaaaggctcttctgttggatcgtgacacgaattaacgatataattgaggtcaagaactacgacaccaccatccatggaaagaacactgtgattggtgtgttggatatctacgggttcgaaatctttgacaacaacagcttcgagcagttttgtattaattattgcaatgagaaactccagcaattgtttatccaactggtgttgaaacaggagcaggaagaatatcaaagggaaggcataccttggaaacacattgattatttcaataaccagattatcgtggacctggttgagcagcagcacaaggggattatcgccatcctagatgatgcttgcatgaacgtggggaaggtcactgacgagatgttcttggaggccctgaattcaaagttagggaaacacgctcacttcagttcacgcaaactctgcgcttcggataagatcctggagttcgatcgagacttcagaatccgccattacgccggagacgtcgtgtacagtgtgatagggttcatcgacaaaaacaaggatacattgttccaggactttaaaagactaatgtacaactccagcaatccagtgttgaagaatatgtggcccgaggggaaactgtccatcaccgaggtgaccaagaggcccttaacagccgctactctctttaagaacagtatgatagctctcgtggacaatctcgcgtctaaagagccttactatgtgcgctgcataaagcctaacgacaagaaatccccacaaatctttgacgatgagcggtgtaggcaccaagtcgagtatttagggttactcgagaatgttcgagttagaagagccggttttgcgttccggcagacctatgaaaagttcctccatcgttataagatgatcagtgagttcacgtggcccaaccacgatctgccgtcagataaggaggccgtgaagaaactgatcgaacgttgtggctttcaggatgacgttgcctacggaaagacgaaaatattcatcagaacaccccgaacactgttcaccctggaggagctgcgggctcagatgttgatcaggattgtattattcctccagaaggtgtggagaggcacgcttgcacgaatgcggtacaagagaacgaaagcggctctcaccatcatcaggtactacagaagatataaagtgaagtcctatatccatgaagttgcacgaaggttccacggggtcaagaccatgcgggattacgggaagcacgtcaaatggccatcccccccaaaggtgttacgaagatttgaggaggcacttcaaaccatttttaatcgttggcgggcatcacagttaattaagtctatccccgcatccgatctgcctcaggtccgggcaaaagtggcggcagttgagatgttgaaaggccagagggcagacctcggcctccaaagggcttgggaggggaattatctggcttccaaacctgataccccacagacaagcgggacctttgtgcctgtggccaacgagcttaaacgcaaggataagtatatgaacgtgctgttctcctgccatgttagaaaagtgaacaggttttcgaaggtggaagatcgcgctatcttcgtgactgaccgccatttatacaaaatggatccaaccaaacagtacaaggtaatgaaaacaatacccctgtacaaccttactgggctatcagtatctaatggcaaagaccagctcgttgtttttcacaccaaggataacaaagacttaatcgtgtgtctgttctctaaacagccgactcacgagtcccgcattggagaactcgttggcgtcctggtaaaccattttaagtccgagaaaaggcatctgcaggtcaacgttactaatccagttcaatgtagtttacacggaaagaagtgcacggtgagtgtggagacccgactcaatcaacctcagcccgactttacaaagaatcgttccggatttattctgagcgtcccagggaactag

SEQ ID NO: 231588 - DNA, 597 bp, synthetic construct
  misc_feature 1..597: note = Description of Artificial Sequence: Synthetic coding sequence
  source 1..597: mol_type = other DNA
atgctgaaaggacagcgagctgacctcggactacagcgtgcctgggaaggaaactatctagcaagcaaacctgatacgccccagaccagcgggacattcgttcctgtagcaaacgaactgaagaggaaggataaatatatgaacgtcctgttctcatgccacgtcagaaaagtgaaccgcttctctaaagtcgaagatcgtgcaatttttgtgacagatcgtcatctttacaagatggacccaacgaagcagtacaaggtaatgaagaccattccactttacaacctaaccggcttgagcgtcagcaacgggaaggatcagctagtggtgttccataccaaggataacaaggacctgatcgtctgcttattcagcaagcagcctactcatgagagtaggatcggcgagctcgtgggcgtcctggtgaatcacttcaagtccgaaaagcgccatctccaggtgaatgtaacaaatcctgtccagtgcagcctacatgggaagaaatgcacagtatccgtggaaacacgactgaaccaaccacagcccgacttcaccaaaaatagaagcggattcatccttagtgtgcccggtaactag

SEQ ID NO: 231589 - DNA, 3327 bp, synthetic construct
  misc_feature 1..3327: note = Description of Artificial Sequence: Synthetic coding sequence
  source 1..3327: mol_type = other DNA
atggggagtaaaggggtgtatcagtatcactggcagagtcacaacgtcaagcacagtggagtcgatgatatggttctgcttagcaagatcactgagaattctatagtggagaatctgaagaaaagatatatggatgattatattttcacctacattggaagcgtcctgatcagcgtcaatcctttcaaacagatgccatacttcggggaaaaagagatagaaatgtaccaaggcgctgcccaatatgaaaacccaccacacatctatgctctggcagataatatgtatagaaatatgatcatagatcgcgaaaatcagtgtgttattatcagcggagaatcaggcgctggcaaaacagtggccgcaaagtatatcatgagctatatttccagagtaagcggtggcggaacaaaggtgcagcatgttaaggatattattcttcagtccaaccccctcctcgaagcctttggaaacgcaaagactgtgaggaacaataactccagccgtttcgggaagtatttcgaaatccagttttctcccggaggagagccagatgggggaaaaatatcgaacttcctactggaaaagagtagagttgttatgcggaaccctggcgagcgcagcttccacatcttttatcaactgattgagggcgcatcagccgagcagaagcattcattgggcatcactagtatggactattactactacctgtctctgagcggaagctacaaggtcgacgatatcgatgaccgccgtgagttccaggaaactctccacgccatgaatgtgatcggaatattcgccgaagaacagacgttagtgcttcagatcgtggccggaattttgcacctcggaaacatctcctttaaggaggtcggcaactacgccgcagtggaatccgaggagttcctggctttccccgcttatttgctcgggattaatcaggataggttgaaagaaaagctaactagccggcaaatggattccaagtgggggggaaaatcagagtcaatccatgtgacactcaacgtggagcaggcgtgttacactcgcgacgcattggctaaagccttacacgcacgcgtctttgacttcttggttgattcaataaacaaggccatggaaaaggatcatgaggagtataatatcggtgtactggatatctatggtttcgaaatcttccagaagaatggattcgaacagttctgcatcaatttcgtgaatgagaagcttcagcagatcttcatcgagcttaccctgaaggcggagcaggaagagtatgtgcaggaaggaattaggtggacacctatagagtacttcaataacaagattgtttgcgatttaatcgagaacaaggtcaatcctcctggcatcatgtcaatcctcgacgatgtgtgcgctaccatgcacgccgtcggagagggcgctgatcaaaccctcctccagaagctgcagatgcagattgggtcccacgaacacttcaacagctggaatcagggtttcatcatacaccattacgcgggtaaggtgagctatgatatggacggcttctgtgaaagaaatcgagacgtgctttttatggatctaatcgaacttatgcagtctagtgaactgcctttcataaaaagcctgtttcctgaaaatctgcaggcagacaaaaaagggcgtccgacaaccgcgggaagcaaaatcaagaaacaggcaaacgacctggtgtccacacttatgaagtgtaccccccattacatccggtgcattaagcctaacgaaactaagaagccaagggattgggaagagtcgagagtgaaacaccaggtggaatatctggggctgaaagaaaacatacgcgtgagacgggcaggatatgcctacagacgtattttccagaagttccttcagcgatatgccattctcaccaaagcaacctggccaagctggcaaggggaggaaaaacaaggggtgctacacctcttgcaatccgtgaacatggatagcgaccaatttcagttgggcagatccaaggtgttcatcaaggcacctgagtctctcttcctgttggaagaaatgagggaacgcaagtatgacggctacgcaagggtgattcagaagagttggcgcaagttcgtggctcgtaaaaagtacgtgcagatgcgtgaggaagcctccgacttactgcttaacaaaaaagagcgtcggcgaaattctatcaaccgcaatttcatcggtgactacattggcatggaagagcaccctgagctgcagcaattcgtaggaaagcgcgagaagatcgactttgccgacactgtgacgaagtacgaccgacgcttcaagggagtgaagagggatcttttattgacccccaagtgcctgtacctgatcgggagagagaaagtcaagcagggccctgataaagggctggtcaaagaggtgttgaagaggaagattgagattgaacgaatcctgagtgtctccctttcaaccatgcaggacgatatctttatcctccacgaacaggagtatgacagcctgctggaatctgtattcaaaaccgagttcttatccctgctcgctaagcgctatgaagaaaagacgcagaaacagcttcccctaaaattctccaacactctagaactgaaattgaagaaggaaaattggggtccgtggtctgcaggaggttcacgtcaggtccagtttcaccaaggctttggagatcttgcagttctgaagcccagcaataaggtgcttcaggtctcgataggccctggactgcccaaaaactccagaccaacacggagaaatacgacccagaacaccgggtacagcagtggcactcagaacgcaaattatccagtcagagccgctcctcccccacctggatatcatcagaacggagtgatcagaaatcagtacgtgccgtacccccacgccccaggcagccagcgtagcaatcagaagagcttgtacacctcaatggccaggccccctctgcccaggcagcagtcgacttcctctgaccgcgtttcccaaacacctgaaagtctcgattttctcaaggttcctgatcaaggggcagctggggtcagaagacaaaccacatctcgccctccaccagcaggaggtaggcccaaaccccagcctaagcctaaaccccaggtcccccaatgcaaagctctgtacgcttatgatgcccaagatactgacgagctgtcattcaacgccaacgacattatcgatataatcaaagaggatccaagcggatggtggactggacggcttcgagggaagcagggcctctttcctaataactatgtcacgaagatctag

SEQ ID NO: 231590 - DNA, 3312 bp, synthetic construct
  misc_feature 1..3312: note = Description of Artificial Sequence: Synthetic coding sequence
  source 1..3312: mol_type = other DNA
ggtactaaagctggaagccctgtcaatggacagaagcagggccatgcacaggccacccctaaaattccattgaacctacatctgcatcatgatcccttccgcagtttgcaggagccaaggcaccaaccgccaacgatgggaagcaaggagcggtttcactggcagtcccataacgtcaagcagagcggcgtggatgacatggtgcttctgcctcagatcactgaggacgccatagcagcaaatctgaggaaacgtttcatggatgactacatattcacctacataggtagtgtcttgattagcgttaatcctttcaagcaaatgccatatttcaccgaccgggaaatagatttataccagggggctgcacaatacgaaaatccccctcacatctacgccctgacagataacatgtaccggaatatgctgatcgactgtgagaatcaatgtgtgatcattagcggcgagagcggggctggtaaaacggtggccgctaaatatattatgggttacatcagcaaagtgagtgggggaggagagaaagtgcagcacgtgaaggacatcatcttgcagtccaatcctctgctcgaggcgtttggtaacgccaagactgtccgaaataacaatagctcgaggttcgggaagtatttcgagatccagttcagtcggggaggggagcccgacgggggaaagatatcaaattttctgctggaaaagtctagagtggtgatgcaaaatgaaaacgagcggaatttccacatatactatcagttactggaaggtgcaagtcaagaacagcggcagaatttgggcttgatgacccccgattactactattatctgaatcaaagcgacacataccaggtggatggaactgatgaccggtcggacttcggagagaccttaagcgctatgcaagtaatcggaatacccccatctatacagcagttagtgcttcaacttgtggctggcattctgcatcttggcaacatatctttttgcgaagatgggaattacgccagagtcgaatctgtcgatctactggcctttccagcgtacctccttggaatcgattccggccgtctgcaggagaagctcacctcccgtaagatggattctcgttggggaggacgctccgaaagtattaacgttaccctgaatgttgaacaagcagcttacacccgcgacgcgcttgctaagggtttgtacgcgaggctgtttgacttcctggtggaagccattaaccgggctatgcagaaaccgcaggaggagtattcaatcggagtcctggacatttacggctttgaaattttccagaagaacggcttcgaacaattctgtattaatttcgtaaacgaaaagctccaacagatatttattgaattgactcttaaggcagagcaggaagaatacgtgcaggaaggcatccggtggacgcccattcaatattttaacaataaggttgtatgtgacctaattgagaataaactcagcccacctgggataatgtccgtcctagacgatgtgtgtgcgacaatgcatgccactggaggaggcgctgaccagacactgctgcagaaactccaggccgcagtagggacccacgagcattttaactcttggtccgccggttttgtaattcaccactatgccggtaaagtatcatacgacgtttcgggtttttgcgagcgcaatcgggatgtgctcttttccgacctgatcgagctcatgcagacgagtgaacaagccttcctacgaatgctatttccggaaaaattggacggcgataagaaggggagacctagcacagcagggtccaaaataaagaagcaagcaaacgatcttgtggccactctgatgaggtgcactccccactatatcagatgcattaagcccaacgaaactaaacgacctagagattgggaagagaatcgggtgaagcaccaggtggagtacctcggcctcaaggaaaatatcagagtgcgtcgagccggtttcgcctatcgcaggcagttcgcgaagtttctgcagcggtatgctatactcacccctgagacctggccacgctggcgaggggacgaacgccagggtgtgcagcacctactccgagcggttaatatggaaccagaccagtatcagatggggtcaaccaaagtctttgttaagaaccctgaatccttgtttctactagaagaagtgagagagcggaaattcgacggctttgccaggactatccagaaggcatggcggcgacatgtcgccgtaagaaagtatgaagagatgagagaagaagcgtccaacatcctgctcaacaaaaaggagagacgtcgcaattcaattaaccgcaatttcgtgggcgattatctcggcctagaagaacggcctgagctgagacagtttctgggaaagagggagagagtggatttcgccgactcagtcactaagtacgacagacgatttaaacctattaagcgcgacctgatcttgaccccgaaatgcgtctatgtgattggacgcgaaaaagtgaagaagggtccggaaaaaggccaggtttgcgaggtgctcaaaaaaaaagttgatatccaggctctgcggggtgttagcttgtcaacccgccaggacgactttttcattttacaagaggatgctgcagacagctttctggagtcagttttcaaaaccgaatttgtgtctttgctatgcaaaagattcgaggaggctacccgtagacccttgcccctcaccttctccgataccctgcagtttcgggtcaagaaagaaggctggggcggagggggaacccgttcagtgaccttctcacggggttttggcgacttagcggtgctgaaagtcgggggaaggaccctgacagtatctgtcggtgatggactgccaaagtcatccaagccaactagaaagggcatggctaaaggaaagccccgacgcagcagccaggcacctacccgcgctgctccagccccaccaagagggatggacagaaacggcgtccctcctagtgctcgcggtggcccacttcctggcgatcacgtttggcggggtcatccacaagcctcacccggactcaggcctcatccctgggaacctgctgacgatccaggacacgtgaggccccagtctacgacacaaaactcatccacatgtctgacaagagcttggccagcctgcagagggagcgccgcatggggaaacggacaatgccttgtgtgggctgaccctagcccttcactaggacatatggtgcccggtgcgggaccttacactagtacctgggcaaagatgtggacttcttag

SEQ ID NO: 231591 - DNA, 3297 bp, synthetic construct
  misc_feature 1..3297: note = Description of Artificial Sequence: Synthetic coding sequence
  source 1..3297: mol_type = other DNA
atgggctccaaggaacgcttccattggcagtctcacaatgtgaaacagagcggagtcgatgacatggtgctgctcccccagattacggaagatgccattgctgcaaacctgaggaagaggttcatggatgactacattttcacctacatagggagtgtgcttatctccgttaacccttttaaacagatgccgtatttcaccgatcgggagattgacctctatcagggcgctgcgcaatacgagaatccgccacatatatacgcactcacagataatatgtatcgcaacatgctcatcgactgtgagaaccagtgcgtcatcatctccggcgagtcaggagccggtaagaccgtcgctgccaaatacattatgggctacattagtaaggtgagtggtggcggtgaaaaggtgcagcatgtgaaggacatcatactgcagtcaaaccctctcctggaggcattcggcaatgccaaaacagtgaggaataataactctagccgattcggtaagtattttgaaattcagttctccagaggtggagaaccagatggcggaaaaatttctaacttcttacttgaaaagtctagagtcgtcatgcaaaacgaaaatgaacgcaatttccacatctactaccaactgctggagggcgctagccaggaacaaaggcagaacctgggacttatgacccctgattattactactatttgaaccagtctgatacctatcaagtcgatggcactgatgatcgctcagacttcggagagacactctctgccatgcaagtgatcggcatccccccatccatccagcagttggtcctgcagctggtggccggaatccttcacctcggcaacatcagtttttgcgaggacggcaattacgcccgagtggagtccgttgacctccttgccttccctgcctatctattggggattgatagtggacgattgcaggagaaactgaccagtagaaagatggattcgaggtgggggggacgcagcgagagtatcaatgtcaccctgaacgtggagcaggccgcatacacacgagacgctttagccaagggcttatatgcgagactgtttgactttcttgtggaagcgatcaaccgtgcaatgcaaaagccgcaggaggagtactctatcggcgtactggatatctatggtttcgaaatcttccaaaagaacggcttcgaacaattttgcatcaacttcgtgaacgagaaacttcaacagatcttcatcgagcttaccctgaaggctgagcaagaggagtatgtccaggagggtattcgatggactcccatacagtactttaataataaagtggtgtgcgacctgatagagaacaaactcagtccccctggtattatgtccgtgctagacgatgtctgcgctactatgcacgcaactggtggtggcgctgaccagaccttattgcagaagctgcaggccgctgttggtacgcatgaacacttcaactcgtggtccgcagggttcgtcatacaccattatgctggaaaagtcagctacgacgtctccggcttctgcgaacggaaccgcgacgttctgttttccgacctgatcgaactaatgcagacaagtgagcaggccttcctcaggatgctgtttcctgagaagcttgatggtgataagaaagggaggcctagcacggcgggatccaaaataaaaaagcaggcaaacgacctggttgcaactctcatgcgctgcaccccacactacatccgctgtataaagcccaacgaaactaagagaccacgggactgggaagaaaaccgggtgaagcaccaggtggagtatctgggccttaaagaaaacatacgtgttaggcgcgcaggcttcgcttataggcgtcagttcgccaagttcttgcagaggtatgccattctcactcctgaaacgtggccgaggtggaggggcgatgaacgccagggcgttcagcacctcctgcgcgcagtgaatatggaacctgaccagtaccagatgggatcaacgaaagtgtttgtaaagaaccctgagagcctgtttttgttggaggaggtaagggagcggaagttcgatggctttgccaggaccatccaaaaggcctggcggaggcatgtggccgtccggaaatacgaagaaatgagggaggaggcatctaacatactactaaataaaaaagagagacgtaggaattccataaatcggaactttgtgggcgactacctgggcttagaagagcggcctgaactcagacagtttttgggcaaacgcgaaagagtggattttgccgatagcgtgacgaaatatgataggaggttcaaaccaattaaaagagacctcattctgacaccaaaatgcgtttacgtaatcggcagggagaaggtgaaaaaggggccagagaaaggccaggtttgtgaggtgcttaagaagaaagtcgatattcaggccctcaggggggtgtccctctccaccagacaagatgacttctttatactgcaggaggacgcagccgattcttttttagaatccgtgtttaaaaccgaattcgtgagcctgctgtgcaaacggttcgaagaggcaacccgtcgtccgcttccactcaccttttctgacaccctgcagttccgagttaagaaagaaggatggggaggtggaggaaccaggagcgtgaccttttctcgtggttttggcgacttagccgtgctcaaggtggggggtcgtacgcttaccgtttccgtgggggatggactgcctaagagctccaagccgacccgcaaaggcatggcaaaggggaagccgaggcgcagttcccaggcccctacccgtgccgctcccgctcccccacggggtatggatcggaacggtgtgcctccgagcgcacgaggaggcccactgccactggaaatcatgagtgggggaggcacccacagacccccacggggaccaccatccacaagcctgggtgcttcccggcgacctagagcccgtcccccatctgaacataacacggaattcttgaatgtgccggatcagggaatggctggcatgcagagaaagaggtcagtcggacagcgccctgtgcccggagtgggcaggcccaaaccacagcctcgcacgcatggtcctaggtgtcgggctctttaccagtacgtcggacaggacgttgacgagctgtctttcaatgttaacgaagtcatcgaaattttaatggaagacccctcaggctggtggaagggccgtctgcatggacaggagggtcttttcccagggaactacgtggagaagatttag

SEQ ID NO: 231592 - DNA, 3057 bp, synthetic construct
  misc_feature 1..3057: note = Description of Artificial Sequence: Synthetic coding sequence
  source 1..3057: mol_type = other DNA
atggaagatgaggagggcccagagtacggaaaacctgacttcgttctgctagatcaagtgactatggaggactttatgaggaacctgcagctgcggtttgagaagggcaggatttatacctatattggagaggtactggtatccgtcaacccttaccaggaacttcctctgtacggccctgaggccatcgcacgatatcagggtcgcgaactgtatgaaagaccccctcacttatatgccgtcgcaaatgcagcatataaggccatgaaacacagatcccgtgatacctgtattgttattagtggtgaatccggtgctggaaagaccgaggcaagcaagcatatcatgcagtatatagctgccgtgactaacccaagccagagggccgaagtagagcgggtcaaggatgtgctgctgaaatcaacgtgtgtgttggaagccttcggcaacgcccgtaccaataggaatcataactcctcgaggtttggcaagtacatggacattaattttgatttcaagggggaccctatagggggacacatccacagttacttgctagagaagagtcgggtgctaaagcagcatgtgggggagaggaatttccacgctttctatcaacttttaagggggtctgaagataaacagcttcacgagctccacctggagcgcaatccagccgtgtataacttcacacaccagggagccggattgaatatgactgttcactccgctctggacagcgacgaacagtctcaccaagcagtgacagaggccatgagagttattggattctcacctgaagaagttgaatcagtccaccgaatcttggccgcaatcctgcatttggggaatatcgagttcgtggaaaccgaggaaggtggcctgcagaaggagggccttgcagtcgctgaggaagctttggtcgaccacgtggcggaactcactgccacaccaagagatctcgtgctcagaagcctgctggccagaacagtcgcatccggagggagagagttgattgagaagggacacacagccgctgaggccagttatgctagagacgcctgcgccaaggccgtataccaacgattgtttgaatgggtggtcaaccgcattaactcggtcatggaaccaagagggagggatcccagacgggacggcaaagacaccgtgatcggagttctggacatttacggtttcgaagttttccccgtgaatagtttcgagcagttttgtatcaactactgcaacgagaagctgcagcagctgtttatccagttaatactcaagcaggaacaggaggagtacgaacgggaagggatcacttggcagagtgtggaatatttcaacaacgctacaatcgtcgacctcgttgagagaccccaccgagggatactcgccgtcctagacgaggcctgtagctctgcagggaccattactgatagaatctttctccagactctggatatgcaccaccggcatcacctccattacaccagccgccaactgtgcccaacagacaagaccatggagttcggcagagacttcaggatcaagcactacgccggtgacgtgacatactctgtggagggctttatcgacaaaaaccgggatttcctatttcaggatttcaaacgtctcctgtacaactcgacagaccccacactaagagccatgtggcctgacgggcaacaggacatcaccgaggttaccaaacggcctctcactgctggcaccctcttcaaaaattccatggtggccctggtggagaacctggctagcaaagaaccattttatgttagatgcatcaaacccaacgaggataaggttgctggcaaacttgacgagaaccattgccgtcaccaagtggcgtatctgggcctcctggagaatgtccgcgtaagaagagccggttttgccagtcggcagccatactcaagatttctgttgaggtataagatgacgtgtgaatacacatggcctaatcacttgcttggttcagataaagcggcagttagcgcactcctagagcaacatggtttacaaggagacgtggcttttggacactccaagttatttatcagatcaccacgcaccctggtcactctggaacagagtagagctaggctcatccctattattgttttactacttcagaaggcttggcggggaactttagccaggtggcgctgccgacggctacgcgctatatatacaatcatgcgttggttcaggcggcacaaggtccgagcccacctagctgagttacagcgtagattccaggctgcaagacaaccacccctgtacggaagagatttagtgtggccactccccccagccgtgctgcaaccattccaagacacctgtcatgcacttttctgtcggtggagggcaaggcaattagtcaagaatatccccccatctgacatgcctcagattaaagccaaagtcgctgctatgggtgctctgcagggcctccggcaggactggggatgtaggagggcctgggcccgagactacttgagttcagccacggacaacccaaccgcatccagcctttttgcacaaaggctgaaaactttgcaggacaaagacggtttcggcgctgttctattcagtagtcacgtgcggaaggtaaaccgcttccataaaatccgcaaccgtgccctgctgctgacagatcagcatctctataaactggatccagacagacaatatcgcgttatgagggccgtcccgctggaggcagtgactggactgagcgtcacaagtggcggagatcagttggtcgtgcttcacgcccgaggtcaggatgatctcgttgtctgcctacatcgcagccggccaccattggataacagggtgggcgaactcgtaggcgtgctcgcagcccactgtcagggcgagggcagaacactggaggtgcgggtctctgactgtatccccttgagccaccgcggtgtacgacgcctgattagtgtcgaaccacggcctgaacagcccgagccggattttcggtgcgctcgaggctcttttacattgctgtggccctcccgttag

SEQ ID NO: 231593 - DNA, 4851 bp, synthetic construct
  misc_feature 1..4851: note = Description of Artificial Sequence: Synthetic coding sequence
  source 1..4851: mol_type = other DNA
atgttcccactcattggtaaaactataatctttgataattttccggaccccagtgacacttgggaaataaccgagacaatcgggaaaggcacctacgggaaggtgtttaaagtgttaaacaaaaaaaacgggcagaaggcggcagtgaagatcttggaccctatccatgatatagatgaagagatcgaagctgagtacaacattctgaaagcgctctctgaccacccaaacgtcgtcagattttacggaatctactttaagaaagacaaagtaaatggcgataagctgtggcttgttctggaactgtgctctgggggatcggttacagatttggtgaaaggcttccttaagaggggagagaggatgtctgaacctctcatagcttatatactccacgaagcactcatggggctccagcacctgcataataacaaaacaatccatcgggatgtgaagggcaataatattctgctgacaactgaggggggagtaaagctagtggatttcggcgtgtctgcccagctgacaagcaccaggcaccgacggaatacatctgtggggacacccttctggatggctccggaggtgatcgcatgtgagcagcagctagataccacatacgatgccagatgtgatacctggtctctcggtattactgccatagagttgggagatggagaccctcctctcgccgatttacatccgatgcgagcgctctttaagataccccgtaacccacctccaaaattacgccaacccgaactgtggagtgcagagtttaatgactttatctcgaaatgcctcaccaaggattacgagaaacggccaaccgtctctgagctgctgcagcataaattcataacgcaaattgaggggaaggacgtcatgttgcagaagcagctgacagagttcatcggtatacatcagtgcatgggcggaactgagaaggccaggcgggagagaatccacaccaagaagggcaacttcaatcgtccgctaatctctaaccttaaagacgtcgatgacttagcgacacttgagatccttgacgaaaatactgtatctgaacagctggagaagtgttattctagagatcagatctatgtttatgtgggtgatattttaattgcccttaatccctttcaatccctgggactgtacagcacaaagcacagcaagctgtacattggctctaagcggacggctagtccaccccacatctttgcaatggctgacctggggtatcagtctatgatcacttacaattccgaccagtgcatcgttatttccggggaaagcggggctggaaagacagagaacgcacacctcctggtgcagcaactgacggttctgggcaaagcaaataacagaaccctccaagagaagattcttcaagtgaacaatctggtggaagccttcgggaatgcatgcacaattataaatgataattcttctcgatttggtaagtacttggagatgaagtttacctccagtggagccgtagtgggcgcacagatttccgaatacctgttagagaaaagtagagtcatacaccaggccatcggagagaaaaactttcacatattttattacatctatgccggactcgcggagaagaaaaaactggctcactataagttgcctgagaataagcccccacgctacctccagaatgaccacttgagaaccgtccaggacatcatgaacaattcattttacaaaagccagtatgagctcatcgaacagtgcttcaaagtcatcgggtttactatggaacagctaggcagcatttattccatcctcgctgccatcttaaacgtcgggaatatagaattcagttccgtagccacagaacatcagatcgataaatcgcatattagcaatcacacggccctggagaactgcgctagcctgctctgcattcgtgctgatgagctccaggaagccctaacgtctcactgtgttgtgacgagaggagaaacgatcattagacccaatacggtcgagaaagccaccgacgtacgagatgccatggccaagacactctacggacgtctgtttagttggattgtgaactgcataaactccctcctgaagcatgacagctcaccctcaggcaatggggatgagcttagcatcgggatccttgacatttttggatttgagaacttcaaaaagaattcttttgagcaattatgcataaacatcgcaaatgagcagatccagtattactacaaccaacacgtgttcgcctgggaacagaatgagtacctgaatgaggacgtcgatgcccgagttatcgaatatgaggacaactggcccttgctggatatgtttctgcaaaagccaatgggactgttaagcctattggacgaggaaagccgatttcctaaagccacagatcagaccctggttgagaagtttgagggaaacctgaagagtcagtatttttggcgaccaaagagaatggagttaagtttcgggattcatcactacgcagggaaggttctgtacaacgctagcgggttcctggccaagaaccgggatactctcccaaccgatattgtactgcttctgaggtcgagcgataacagtgtcattcggcagcttgtcaaccatccgctaaccaagactgggaatctgccccattcgaaaactaaaaacgtgatcaactatcagatgcgaacatccgaaaagctgatcaacctggccaaaggggacactggagaagctacccgacatgcaagggaaacaacgaacatgaagacccaaaccgtcgcaagctatttcagatactccttaatggacctactttctaagatggtcgtggggcagccccattttgtgagatgtattaagccaaactccgagcggcaggcacggaaatatgataaggagaaggtgctgcttcaactgcgctacacgggaatattagagaccgctaggatacgacgtctgggcttcagtcacaggatcttattcgcaaactttataaagcgatattatctgctatgctacaagagtagcgaggagccgagaatgagcccagatacctgcgccaccatcctggaaaaggcaggtctagacaattgggctctgggtaaaactaaagtgttcctgaaatactatcatgtcgaacagttaaatctgatgcgaaaagaggccatcgacaagctcatcctcatacaggcttgcgtgcgagctttcctgtgctctagaaggtatcagaagattcaagaaaaacggaaggagtcggcaatcattattcaaagcgcagctagaggacacttggtgaggaaacagcgcaaggaaatcgtggatatgaaaaacaccgccgtgacaacaatccagaccagcgatcaggaattcgactataagaaaaatttcgagaatactcgagaaagcttcgttaagaagcaggccgagaatgccatttccgcgaatgaacggtttatttctgccccaaataacaagggctctgtgtctgtggttaagacgagtactttcaagccagaagaagagacgaccaatgccgttgaaagcaataaccgggtctaccagactcctaaaaagatgaataacgtctacgaggaagaagtgaagcaggagttctacctggtggggcctgaggtgtctcctaagcaaaagtcagtgaaggatctcgaggagaactctaatctgcggaaagttgagaaagaggaagcaatgatccaatcgtactaccagcgctacaccgaagagagaaactgcgaggaatccaaggctgcatacttggaacggaaggccatatccgagaggccgtcttatccagtgccctggctggctgagaacgaaaccagtttcaagaagactcttgaaccaactctatcccagcggtccatttatcagaatgctaattcaatggagaaagagaagaagacttctgtcgtgacgcagagggccccaatatgctcccaagaagaggggagaggacggctgcggcacgaaactgtgaaggaacgccaagttgagccagtgacccaggcccaagaagaggaagataaggctgcagtttttatccagagcaaataccggggatataaacgcagacagcagctgagaaaggataagatgagttcgtttaaacatcagcggattgtaactaccccaacagaggtggcacgtaacacccacaacctttatagttacccaacaaagcacgaagagattaacaatattaaaaagaaggataacaaggattctaaagccacaagtgagcgggaggcgtgcggcctggctatcttctcaaagcaaatttcaaaactctcagaggagtactttattctccaaaaaaagctgaatgagatgattctgagccagcagctcaagtcactctatcttggtgtgagtcatcataaaccaattaatcgacgagtatcttctcagcagtgcttatcgggcgtttgcaaaggtgaagagcccaagatcttaaggccaccccgtcgcccacgcaagccaaaaactttgaataacccagaagactccacctattactatttactgcataagagtatacaagaggaaaagaggagaccccgtaaggattcacagggaaagctcctggatctcgaggatttttattacaaagagtttctcccctcacgatctggcccaaaggaacatagtccctccttgcgcgagcggaggccacaacaggaacttcaaaaccagtgcataaaggctaatgagagatgttgggcagcggagtcccccgaaaaagaagaagaaagagaacctgccgctaatccttacgatttcaggcgactgctgaggaagacatcccagcggaggcgattagtgcagcagagttag

SEQ ID NO: 231594 - DNA, 594 bp, synthetic construct
  misc_feature 1..594: note = Description of Artificial Sequence: Synthetic coding sequence
  source 1..594: mol_type = other DNA
atgtttcctctgatcgggaagaccattattttcgacaattttcctgaccccagtgatacgtgggagattacggagacaatcgggaagggtacatacggaaaagtgtttaaggttctgaacaagaagaatgggcagaaagctgcggtaaagatacttgatcccattcatgatatagacgaagagatagaggcagaatataatattttaaaggctctgagtgatcacccgaatgtggtgcgattttatggtatctattttaaaaaggataaggttaacggagacaaattatggctcgtgctcgaactgtgtagcgggggaagtgtgaccgacctcgtcaagggtttcctgaagcgcggagagaggatgtctgaaccactcatcgcctacattctccatgaagctctgatgggcctgcagcacctccacaataacaaaaccattcaccgcgacgtcaaaggtaataacattctccttacaacagaagggggtgtcaaactcgtggatttcggcgtaagtgcccagctgacctcgactaggcacaggagaaacacatccgttggaacccctttttggatggcccctgaggtccggtag

SEQ ID NO: 231595 - DNA, 744 bp, synthetic construct
  misc_feature 1..744: note = Description of Artificial Sequence: Synthetic coding sequence
  source 1..744: mol_type = other DNA
atgttcccattaattggcaagaccattatcttcgataatttcccagacccgtctgatacttgggaaattaccgaaaccatcggcaaagggacttacgggaaagtgtttaaggtcctgaacaagaaaaacgggcaaaaggccgctgtcaagattctcgacccaatacatgacatcgacgaagagattgaggcagagtataatatcctgaaggcattgagtgaccaccccaatgtggtgcgattctatgggatttactttaaaaaggacaaagtgaatggagataaactgtggctagttttagaactttgttccggagggagcgtcaccgatctggttaagggctttctcaagcggggagagcgcatgtctgagccactcattgcctacatcctacatgaggcattgatgggacttcagcacctgcataacaataaaacaattcacagagatgtcaaagggaacaatatacttctgactaccgaaggcggtgttaaactggtagactttggagtgagcgcacaacttaccagtacaaggcacagacggaacacgagcgttggcacccccttctggatggcaccggaggtcatcgcatgcgagcagcaactagacactacctatgatgcccgttgcgacacatggtctctgggcattactgctattgagctgggagacggggatcctcccctggctgacttgcaccccatgcgagctctctttaagattccccgtagcgacgactag

SEQ ID NO: 231596 - DNA, 1995 bp, synthetic construct
  misc_feature 1..1995: note = Description of Artificial Sequence: Synthetic coding sequence
  source 1..1995: mol_type = other DNA
atgtttccccttataggtaaaacaattatttttgacaactttccggatccaagtgatacatgggagattacagagaccataggcaaaggaacgtacggaaaggtcttcaaggtactgaataagaagaatggacagaaagcggctgtgaaaatactggatcccatccacgacatcgatgaagagatcgaagccgagtacaacatactcaaggcacttagcgaccatccaaacgtcgtcaggttttacgggatatattttaagaaggacaaggttaatggcgataaactctggctggtgctggagctgtgttcgggtggctcagtgacagatcttgtgaaagggttcctgaagcggggagaaaggatgtctgagccattaatcgcctatattctgcatgaagctctgatggggctccaacatcttcataataataaaaccattcatcgcgacgtgaaaggaaacaatattctactcaccaccgaagggggagtgaagcttgtggactttggcgtttccgcacaactgacttctactagacataggaggaatacgagtgtgggaactccattttggatggccccagaggtcattgcctgtgaacagcagctcgacacgacttatgatgcaaggtgtgatacctggtcgttaggcatcacggctatcgagctgggtgacggggatccacctctggcagatctgcacccaatgcgcgcactctttaaaattccccgaaacccaccgccaaagcttaggcagcctgaactgtggtctgctgagttcaacgactttatttctaaatgtcttactaaagactacgagaagcggcctactgtgtccgagctgttgcaacataagtttatcacccaaatcgaagggaaggatgtcatgctgcagaaacaactgactgagttcatcggaatacaccagtgcatgggcggaacagagaaagccagacgcgagagaattcacactaaaaaaggtaactttaataggccactgatcagcaacctgaaagatgtggacgacctagcgacactagagatccttgacgaaaacaccgttagcgagcagttggaaaagtgctattctcgggatcagatctatgtctacgtgggagacattctgattgcattaaacccttttcaatctctgggcttgtattccaccaagcacagtaaactttatatcggaagcaaaaggaccgcgagtcccccacacatcttcgccatggccgatctaggctatcaaagcatgatcacgtacaacagcgatcagtgcatcgtaataagtggtgagtctggggctggaaagaccgagaacgctcatctgttagtgcagcagttgacagtactcggcaaagccaacaaccggactcttcaggagaagatcctgcaggtgaataacctggttgaagctttcgggaatgcctgtacgattataaacgataacagctccagattcggcaaatatctggagatgaaattcaccagcagcggggctgtcgttggggcacaaattagtgagtatcttctggaaaagtctagggtcatccaccaggcgatcggtgaaaaaaactttcatatcttttactacatttacgctgggttggccgagaaaaagaagcttgcccattataagctgcctgaaaataagcctcccaggtacctgcagaatgatcacttacgtactgtgcaggacattatgaataacagtttctacaaaagccagtatgaactgatagagcagtgtttcaaggtgattggtttcaccatggaggtgctcggtggaggagaaccccgagaggggggaggtgagagggcgtcatcacagccattacgtcttcaagaagctccagctcagaatcttccagccccagctcctaggcccgcagtgctgactgttcaacgtgggtcacaccggcgacggaaagcattggagccagcgggacagcagggtccctcaagacatagcggggcaggcaccagccgacattag

SEQ ID NO: 231597 - DNA, 3834 bp, synthetic construct
  misc_feature 1..3834: note = Description of Artificial Sequence: Synthetic coding sequence
  source 1..3834: mol_type = other DNA
aaacacctgtatggactgttccactacaatcccatgatgctggggttagagtccctgcctgatcctacggacacctgggaaatcatcgagacgataggaaaagggacctacggaaaagtctataaagtgactaacaaacgagatggatctttggctgcagtgaagattctcgatccggtatctgatatggacgaagaaattgaggcagaatataacatcctgcagttcttgcccaatcatcctaatgtggtcaaattctacggcatgttttataaggctgatcactgcgtggggggtcaattgtggttggttcttgagctgtgtaacggcggttccgtcaccgagcttgtgaaggggctattgaggtgcgggcaacgactggacgaagccatgatcagttatatcctctatggcgcactcctaggactgcagcatcttcataacaatagaattattcatagagacgtgaaaggtaataacatcttactgacaaccgaagggggagttaagttggtagatttcggtgtgtcagcccagctcaccagcaccagattgagacgaaatacgtctgtggggactcctttctggatggctccagaagtaatcgcctgtgagcagcagtacgacagttcctacgacgccaggtgtgacgtctggtccctgggtatcaccgccatcgaacttggagacggtgatcctcccctcttcgatatgcatccagtgaaaacgctgttcaaaattcccagaaatccccctccgactctgttgcatcccgagaagtggtgtgaggagttcaatcatttcatcagccaatgcctcattaaagacttcgaacggaggccaagtgtcacacatttgctggaccaccctttcataaaaggtgttcacgggaaagtgcttttcctgcagaagcagcttgccaaggtcctgcaagatcaaaagcatcagaatcccgtcgccaaaaccaggcacgaaagaatgcatactcgcaggccttatcatgtagaggatgctgaaaaatactgcctggaagacgacttggtcaatttggaggtgcttgatgaagataccatcattcatcagctgcagaaacgctacgccgatttgctcatctacacttacgtgggggatattctcatcgccttgaatcctttccaaaacctgagcatctatagtcctcaattctcccgtctatatcatggtgtcaagagagctagcaatccccctcacatcttcgcatcagcggatgcggcttatcagtgcatggtcactctgtccaaagatcagtgtatagttatttcgggcgagtccggatctggcaaaactgaatctgcccatctgattgtacagcatctgacatttctaggaaaagcaaataatcaaacgctgcgggagaagatcctgcaggtcaactcactcgtcgaagctttcggaaatagctgtactgctattaacgacaactcttctcgatttgggaagtatttagaaatgatgtttaccccaaccggcgtggttatgggggcacggattagcgaatacctgttagagaagagtcgggtgataaaacaggcagccagagagaagaactttcacatcttttattatatttatgccggacttcatcatcaaaaaaagctgtctgatttccgattgcccgaggagaagcctcccagatacattgccgacgaaacgggtcgcgtaatgcacgatatcacaagtaaggaatcttaccggagacaattcgaagcaatccaacactgcttccgcattattggcttcaccgataaggaggtccattcagtgtacaggattctggccggaatcctcaatatcggcaacatcgagttcgccgctataagtagccaacaccagaccgataaatccgaagtcccaaatgctgaagcgctgcagaacgctgccagcgtgctgtgtatttcacccgaagaactgcaggaggccttgacatcgcactgcgttgtcaccaggggcgagaccataatccgggcaaatacggtagaccgcgctgccgacgtgcgtgacgccatgtcaaaggcgctctacggtcgactcttttcttggattgtgaataggatcaacactctgctacagcctgacgagaacatatgttctgcgggaggcggaatgaatgtgggaatcctggatatttttggctttgaaaacttccaaagaaactcatttgaacaactgtgcataaacatagctaacgagcaaatccaatattattttaatcagcatgtcttcgcgcttgagcagatggaataccaaaacgagggtatagacgcagttcctgttgagtacgaagacaatcgccctctgctggatatgttccttcagaagccccttggcctactagcccttctagacgaagaatctcggttcccacaggccactgatcagacactggtcgataagtttgaggacaatctgcgctgcaagtacttctggagacctaagggcgtggaactttgtttcgggatccaacactatgcaggaaaggtgttatatgacgcgtctggcgtcctggagaagaacagggataccttgccagccgacgtcgttgtcgtcctgcggacatcagaaaataaactgcttcaacaattattttcaattccgcttaccaagacaggcaacctggcccagacccgcgctaggatcactgtggcctcctcttcacttccccctcacttctctgcaggtaaagctaaggttgacaccctcgaagttattcggcacccggaggagactaccaatatgaaacgccagacggtggcaagttattttaggtattcattgatggaccttctgtccaaaatggtggtgggacagcctcacttcgtcaggtgtattaagcctaatgacgatcgcgaggcgctgcagttctccagggaaagggtcctggctcagctccgcagtactgggatcctggaaacagtgtctattcgcaggcagggctactcgcatagaattctgtttgaggagttcgttaagcggtactattatttggcattcaccgcccaccagacgccccttgccagtaaggaatcatgcgtggccattttagagaagagcagactggaccattgggtgctgggcaagaccaaagtttttcttaagtattatcatgtcgagcagcttaatctgctactccgcgaggtcatcggacgcgtcgttgtgcttcaggcttacacaaaaggctggctgggcgctcggaggtacaaacgagtgagagagaaacgtgaaaaaggcgcaattgccattcaatctgcgtggcgtgggtacgacgcaagacggaagtttaaaaagatttctaacagacgaaatgaatctgctgcccacaatcaagcaggggacacatccaatcaatcaagtggccctcacagccccgtcgctgccggaacaaggggcagtgccgaagtgcaagattgctccgagcctggcgaccacaaagtgttgcgcggatctgtacataggaggtctcacagtcaggccgaatcaaacaatgggcgaactcagacatcatcaaactccccggcagttacagaaaaaaatggacactcccaagcgcaatcttccccgaagggttgcgatatattcgccggacatgctaataaacatagcgtgtcgggtactgacctgctgagctcgcgaatctgccacccagcccctgaccagcaaggcctgagtctgtggggcgcaccacaaaagcctgcgtttccccactacggttgtaatttctacggttttagaaaatggtcgtgcaccgaagccagcaatacatccccaaccatgagcgctgctcagaacgccgagtag

SEQ ID NO: 231598 - DNA, 4053 bp, synthetic construct
  misc_feature 1..4053: note = Description of Artificial Sequence: Synthetic coding sequence
  source 1..4053: mol_type = other DNA
atgctacagtcagctttactctccaccagaaaacacctgtacggcttattccactacaatcctatgatgttagggttggagtcccttcctgacccaaccgacacatgggaaattattgaaacaatcgggaagggtacttatggaaaggtgtacaaagtgactaataagagggacgggagcttggccgcagtcaagatattagatcccgtaagtgatatggatgaggaaatagaagctgagtacaacattttgcagtttcttcctaaccatcctaatgtggtcaagttctatgggatgttctacaaagcagaccattgtgtagggggacagctgtggctggtgctggaactgtgtaacggaggctcagtaaccgagctggtgaaagggcttctgcgctgtggacagcgtctggacgaagccatgatttcctatatcctgtatggggctttactgggcttgcaacatctgcataataaccggattatccatcgggacgttaaaggaaataacatcctgctgaccacagaagggggagtcaaactggtcgactttggtgtgtccgcacaactcacatcgacgagactgagaaggaacacatcggtcggtacaccgttctggatggctcccgaggttattgcatgcgagcagcagtacgattcatcatacgatgcgagatgcgacgtttggtcactggggatcaccgccatcgagttgggtgacggcgaccccccactttttgatatgcaccccgtgaaaactttattcaagatacccaggaacccgccaccaaccttgttacatcccgagaagtggtgcgaagagttcaaccattttattagtcagtgcttgattaaagatttcgagcggaggccctctgtcacacacctgctggaccaccccttcattaaaggagtgcacggcaaagtgctgttcctccagaaacaacttgccaaagttctgcaggaccagaaacaccaaaaccctgtggctaaaacgcgccatgagaggatgcacacccggcgaccttaccacgtggaggatgccgagaaatattgtctcgaagatgacctggtgaacctcgaagtcttggatgaagatacaatcatccaccagctgcagaagagatatgctgatctcctgatttatacatatgtcggggacatcctgatagccttgaatccatttcaaaatctctcaatttatagccctcagttttcacgcctgtatcatggcgtgaagagagcaagcaatccaccccatatttttgcatcagccgacgccgcttaccagtgcatggtgaccctgtccaaagatcagtgcatcgttatcagcggtgagtccgggagcggtaagacggagagcgctcatttgatcgtccagcatctgacatttcttggcaaggctaataatcagacgttgagagagaaaattctgcaggtaaattccttagtcgaggccttcggcaatagctgcactgctatcaatgacaactcgtctcgattcggaaagtacctggagatgatgtttacaccaacaggcgtggtcatgggtgctcgtatttcagagtatctgctggagaagtcaagggtcataaagcaggcggctcgggagaagaattttcacatattttactatatctatgccggactgcaccatcaaaaaaagttgtcagatttcagactaccagaggagaagcccccacgatacatcgccgatgaaactggacgagtgatgcacgacatcacctctaaagaatcctataggagacagttcgaggcaattcagcactgttttaggatcatagggttcactgacaaagaagttcactctgtgtatcgcatattggccggtatcctcaatattggtaatattgagttcgcggcaatcagctcccagcaccagacagacaaaagcgaggtcccaaatgctgaggctctccagaacgccgcaagcgtattgtgtatttcacctgaggaactccaggaggcgcttacctctcactgcgtggtaactcgaggggaaactatcatcagggcaaacaccgttgaccgcgcagccgacgtacgggacgccatgtcgaaagcactgtacggtcggttattttcatggatcgtcaacagaatcaacactctattgcagccagatgaaaacatctgctctgccggtgggggtatgaatgtcggtatactggatatcttcggcttcgaaaacttccagcggaatagctttgagcaactgtgtatcaatattgccaacgagcagattcagtattactttaatcagcacgtatttgccctggaacagatggagtatcagaatgaagggatcgacgctgtccccgttgagtatgaggataatcggcctctgcttgacatgtttctgcagaaaccactcgggttgttggcgttactggatgaagagtctagatttccccaggctacagaccagactctagtggataaattcgaagataatcttcgctgcaaatacttttggcgacccaagggggtcgaattatgcttcggaatacagcactatgccggtaaggtgctgtatgacgcaagcggcgttctggagaagaacagagataccctaccagccgacgtggtcgtcgtcctgcgaactagtgaaaataagcttctacagcagcttttttctattcccctcactaagacaggcaatctcgcacaaacccgggctcgaattacggtcgcctcttcttcacttccaccacacttttcagctggcaaggcgaaggtagacacactcgaagtgatacgacaccctgaagagacaaccaacatgaagcgacaaaccgttgccagctatttcaggtactcgctgatggacctcctgtcaaaaatggtggtgggacagccccattttgtgcgatgtatcaaacccaatgacgacagggaagcgctgcagttctccagagagagggtcctcgcccagttgcggagcacaggtatccttgagactgtttcaattcggagacaaggatactcccacagaatcctttttgaagaattcgtgaagcgctactactacctggccttcacagctcaccagacaccactggcctccaaagagagctgcgtggctatactagagaagtccagactggatcactgggtcctgggcaagactaaagtattcttgaaatactaccatgtagaacagttaaatctgttgctgcgggaagtgatcggtagggtcgtggtgctgcaggcttataccaaaggatggttgggggctagaagatacaagagggtcagagaaaaaagggaaaaaggagctattgccattcagagcgcctggcggggatacgatgccaggagaaagttcaagaagattagtaatagaaggaatgaatctgctgctcacaatcaggctggagacacctcgaatcagtcaagtggaccgcactctcccgttgccgcagggactcgcggaagtgcagaagtgcaggactgttccgagcccggtgatcataaagtgctgcgcggtagcgtgcacaggcgcagtcatagccaggcggagagcaataatggcagaacccagacttcaagtaattcccccgcagtaactgaaaagaacgggcatagtcaagcccagtcaagccccaagggttgcgacattttcgccggacacgccaacaaacatagcgtttccggaaccgacctgctgtcttctaggatctgtcatcctgcacctgatcagcaaggcctgagtctgtggggggctccccagaagcccggttctgagaatggcttggctcaaaagcacagaacacctcggcgaagatgccagcaacctaaaatgctgagcagtccagaagataccatgtactataatcagctgaacggcacgctggagtaccagggcagcaagcggaaacctcgaaagctaggccaaataaaggttctggatggagaagacgaatattataagagtttaagcccagttgactgtatacctgaggaaaacaattcagcacatccatccttcttctcttccagttctaaaggggactcattcgcccagcactag

SEQ ID NO: 231599 - DNA, 4026 bp, synthetic construct
  misc_feature 1..4026: note = Description of Artificial Sequence: Synthetic coding sequence
  source 1..4026: mol_type = other DNA
atgaaacatctctatggtttgtttcattacaacccaatgatgctcggcttggagtcgctacccgatccaacagacacgtgggagataatcgaaactataggaaaggggacatatggaaaggtctacaaggtgaccaataagcgggacggcagccttgctgcagtcaagattctggatccggtctccgatatggacgaggaaattgaggctgagtacaacattcttcagtttctgcctaaccatcccaatgtggtgaagttctacgggatgttctacaaggccgatcactgcgtggggggacaactgtggctggtcttggaactttgtaatggcggatccgttaccgagctggttaagggtctgctccgttgcggacagagactggatgaagctatgatctcatatattctgtacggcgcattgctaggcctacaacatctgcataacaacaggatcatccaccgcgacgtcaaggggaataacatcttgctgaccacagaaggtggagtaaaacttgtcgatttcggcgtgtccgctcagctgacctcaacgcggttacgcagaaatacttctgtaggaacgccattctggatggcacctgaggtgatcgcatgtgaacagcagtacgattcttcctacgatgcgaggtgtgacgtctggagcttaggcattacagctatcgaactgggtgacggcgatcccccattgttcgacatgcatcccgtgaaaaccttatttaaaatccctcgcaacccacctcccaccctgctgcatccggaaaaatggtgtgaggaattcaaccattttatctcacagtgtttgattaaggatttcgagcgccgtccgagtgtgacccacctgcttgatcatcccttcatcaagggagtgcatggtaaggtcctcttcttgcagaagcagctggctaaagttctgcaggaccagaagcaccagaatccagtggcgaagacaagacacgaacggatgcatacaagacggccttaccacgtggaagatgctgagaagtactgcctggaagacgatcttgttaacctggaggttctggacgaggataccatcatccaccaactccagaagcgctatgccgacctgttgatctatacttacgtgggggacatcctcatagcactgaaccctttccagaacctttctatatactccccccaattttccagactctaccatggcgtaaagagggcctccaatccccctcacatatttgcgagtgccgacgccgcataccaatgtatggtgaccttatctaaagaccagtgcatcgtgatatctggcgagtcagggtctggcaagaccgaaagcgcacacctgatcgtgcagcatttgacattcctgggcaaggcaaacaatcagacattacgcgagaagattctgcaggtgaactcactcgtggaggccttcgggaacagttgcacagctatcaatgataactcatcccgatttggtaagtatttagagatgatgtttaccccgactggagtggtcatgggcgctcggataagcgagtatctcctcgagaaatcccgagttatcaagcaggctgcacgggagaaaaattttcacatcttctattatatttacgcgggacttcaccaccaaaagaaactctcagacttccggctgccagaggaaaaaccacccaggtatattgctgacgagactgggagagtgatgcacgatattacatctaaagaaagttatcgacggcagttcgaggccattcagcactgcttcagaatcataggcttcactgacaaggaagtgcattcagtctacaggatcctagccggaattcttaacatcggcaatatcgagttcgccgctatcagttctcaacaccagacagataaatccgaggtgccaaatgctgaggcactacagaacgctgcttctgtcctttgcatttcccctgaagaactccaggaggcgttgacttctcactgtgtggttacaagaggagagaccatcatccgtgcgaatactgtcgaccgtgctgccgatgtacgcgacgcaatgagcaaagcactatacgggagactcttttcctggatcgtgaacaggatcaatacgctcctgcaaccggacgagaacatctgttctgctggcggaggcatgaacgtcggcatcctggacatattcgggtttgaaaattttcagcgaaatagcttcgagcagctatgcatcaacattgctaacgaacagatacagtattatttcaatcagcatgtgttcgcactagaacagatggagtatcagaacgaaggcatcgacgccgtgccagtcgagtacgaagacaatcgcccactcctcgacatgttcctgcagaagcctctgggcctgctggctctgcttgatgaagagtcccgcttcccacaggcaactgatcagaccctggtggacaaatttgaagataacctgaggtgcaagtatttctggcgccctaagggagttgagttgtgcttcggcattcagcattacgccggtaaggtgctgtatgacgcatccggggtgttagaaaaaaatcgggatactctcccagccgacgtggttgtggttctccggacctcagagaataagctgcttcagcagctattctcgattcctttgaccaagacggggaaccttgcccaaaccagagcacgcattaccgttgcttccagttcccttccgccacactttagtgcgggaaaggcaaaggtggatacgctagaggttataaggcacccagaagagaccacaaacatgaagcgccagaccgtcgcctcatacttccgctattctctcatggacctgctgagtaagatggtcgtggggcaaccccactttgtgaggtgtattaagccgaatgacgatagagaagcattgcagttttcacgagagcgcgtcctcgcccagctgaggagtaccggcatcttggaaactgttagcatccgaaggcagggctacagtcacagaatcctatttgaagaattcgttaaaaggtattattacctcgctttcactgctcatcaaactccccttgccagcaaagagtcgtgtgtggcaatccttgagaagagtcgtctggaccactgggtgttagggaaaactaaagttttccttaagtactaccatgtagagcaactcaatctgctactgcgggaagtcattgggagggtcgtcgtgcttcaggcctacacaaagggatggctcggggctcgcagatacaaaagggtgagagagaaaagggagaaaggagcaatcgcaatccagtccgcatggaggggttatgacgctcggagaaagttcaagaaaatcagtaacaggcgaaacgagtctgcggcacacaatcaggctggggataccagtaatcagtcgtcaggccctcactcaccagtggcagccggtactagaggaagcgccgaggttcaggattgctctgagcccggtgaccataaagtgctccgtggttcagtgcaccgcaggtcacacagccaagctgagtccaataacggaagaacgcagacatcttccaattctccggcagttacagaaaagaacggacactcacaggcccaatcatcccccaagggctgcgacattttcgccggacacgcaaataaacactccgtgagcggcaccgacctcctctccagtcgcatttgccatcctgcaccagatcagcagggactctcactgtggggggctccacagaaacctggctccgagaatgggttggctcaaaaacaccgaacccctcgcagaaggtgccagcagcccaagatgctgagtagccccgaagacactatgtactataatcagctgaatggcacactcgaataccagggatcgaagagaaagccccgaaaattaggccagattaaagttctggacggggaggacgagtactataagtcactgagtcccgtcgactgcattccagaagagaataactccgctcatccatcctttttttcctcttcctctaagggggactccttcgcgcaacactag

SEQ ID NO: 231600 - DNA, 3945 bp, synthetic construct
  misc_feature 1..3945: note = Description of Artificial Sequence: Synthetic coding sequence
  source 1..3945: mol_type = other DNA
atgaagcacctgtacggtttgttccactacaacccaatgatgttaggactcgagtccctgccagacccaaccgacacctgggaaattatagagaccatagggaaggggacctacgggaaggtttacaaggtgactaataagagggacggctccctggcagccgtgaaaattctggatcccgtctccgacatggacgaggagatcgaggctgagtacaatatcctccagttcttgcccaatcaccccaacgtggtgaaattctacggaatgttctacaaagcagatcactgtgtcggcggacagctttggctagttctggaactgtgtaatggcggatcagtgactgaactggtgaagggcctgctgcggtgcgggcagcggttagacgaagcgatgatcagctacatcctgtatggggcactgctggggctccaacacctccacaataaccgtataatacacagggacgtaaagggaaataacattttgcttaccactgaaggaggcgttaagctggttgacttcggtgtctctgcccaactcacatccactcgacttaggagaaatacaagcgtgggaacacccttttggatggcccctgaggtaattgcctgcgaacagcagtatgactcctcgtacgatgctaggtgtgatgtttggtccttggggataacagcaatagaactgggcgacggagacccgcctctgttcgacatgcacccggtcaagaccctgttcaaaatcccaagaaaccctccgcctacacttttgcacccagagaaatggtgtgaagaattcaaccatttcattagccagtgcctgataaaagattttgagagacgcccttctgtaacgcacctgctggaccatccgtttataaaaggggtccacggcaaagttctctttcttcaaaaacaactggctaaggtgctgcaggaccagaaacatcaaaacccagtggcaaaaacccgccacgagaggatgcataccagacgcccttaccatgtagaggacgccgagaagtattgcttggaggacgacctagtgaacttagaggttctcgacgaagataccatcattcatcagctccagaaacgctatgccgacctcctgatctacacgtatgtgggcgacatccttattgcactcaatccattccagaatctgtccatctactctccgcagttcagccgcttataccatggggtaaagagggcatccaacccaccccacatcttcgcatccgctgatgctgcataccaatgcatggtcacgctctctaaagaccagtgtatcgtgatcagcggcgagtccggatccggaaaaactgagagcgcacatttaattgtccagcatcttactttccttgggaaagctaacaatcagacattgcgggaaaaaatcttgcaggtcaacagccttgtcgaagctttcggcaattcttgcacagctatcaatgacaacagttcacggttcggaaagtacttggagatgatgttcacacctaccggagtggtgatgggcgctcgcattagcgagtatttactggagaagtcccgcgttattaagcaggcagcgagagagaagaattttcacatattctactacatctatgccggacttcaccatcaaaaaaagctgtcggatttccggcttccagaggagaaaccccctcggtatatcgccgacgagaccggtagggttatgcatgacattaccagcaaagaaagttaccgacggcagttcgaagccatccagcattgctttcgtattatcggattcactgacaaggaagtacactccgtttaccggatcttagcaggaattctcaatataggtaacatcgagtttgccgctatcagcagccagcaccagactgacaaatctgaagtgccaaatgctgaggcactgcagaatgcagcctccgtactctgtatctctccagaggagctgcaggaagccctgacttctcactgcgtggtgacaagaggagaaacaatcatccgggcaaataccgtggacagagctgctgacgtaagggacgccatgagtaaggcgctgtatggaagactcttctcctggatcgtaaatcgaataaacaccctgctccagcctgacgaaaatatttgctccgcaggaggcggaatgaatgtgggcattctcgatattttcgggtttgagaatttccaaagaaattcatttgaacagttgtgcatcaatatcgccaacgagcaaatccagtattattttaaccagcatgtttttgccttggagcagatggagtaccagaatgaggggattgacgctgttccagtggagtacgaggacaacagacctctgttagacatgtttcttcagaagccactgggtttattagcgctgctcgacgaggagtcacggttcccgcaagccaccgatcagacgctggtcgacaaatttgaagacaacctgcggtgcaaatatttttggagaccaaagggggtggaactatgtttcggcattcagcattacgccggaaaggtcctctacgacgccagcggtgttctggagaagaatcgtgacacgctgcctgccgatgtcgtcgtggttctacgcactagcgaaaataagctgctccagcagctgttttcaataccactgactaagactggcaacttagcccagacacgagcacgaatcaccgtcgccagcagtagcttacctccacatttcagcgcaggaaaagccaaagtcgacaccttggaggtgattcggcaccctgaggagactaccaatatgaagcggcagacagttgcatcctacttccgatattctttaatggacctcctttcaaagatggttgttggccagcctcattttgtccgttgtattaagccaaatgacgatcgagaggccctgcaatttagtagggagcgcgttttagctcagctgcggagcactgggatcctggagaccgtgagcattaggcgccaggggtactcacaccgtattctattcgaggagtttgtaaagcggtactattacttggcctttaccgcgcaccagaccccgcttgcgtccaaagagtcttgcgtggctatcctagagaagtccaggctcgatcattgggttctaggcaagaccaaggtattcctgaaatactaccatgtcgaacagcttaacctgttgctgcgtgaggttattggacgggtagtggttctccaggcctacaccaagggctggttgggcgctcggagatataaaagagttcgggagaagagggagaagggggctatcgccatccaatcaggggacactagcaaccagtccagcggacctcatagtccggtcgctgctggaacccgcggaagcgctgaagttcaggactgttcagagcccggagatcacaaagttttgagagggagtgtgcatcgaagaagtcactcccaggccgagtcgaacaacggacgcacccagacatcttctaattctccagccgtcaccgagaaaaatggccatagccaggctcagtcaagccccaagggttgtgatatcttcgcaggccacgctaacaaacactcagtgtctggcacggatttgctgagttcaagaatctgtcaccctgccccagaccagcagggcttgagcctttggggtgctcctcagaagccgggaagtgagaacgggctggcacagaaacatcggacccctcgccgacgctgccagcagcctaagatgcttagttcccctgaagataccatgtattataaccagctgaacggtaccctggaatatcaaggttctaagagaaaacccagaaaactgggccagataaaagtcctggatggcgaagatgaatattataagtcgttatcccccgtagactgcattcctgaggagaataattcggcccaccctagcttcttctcaagttcatctaagggagattcattcgctcagcactag

SEQ ID NO: 231601 - DNA, 3390 bp, synthetic construct
  misc_feature 1..3390: note = Description of Artificial Sequence: Synthetic coding sequence
  source 1..3390: mol_type = other DNA
atgaatattaacgacggtggaagacgtcgattcgaggataacgagcacacattgaggatttacccaggagccatctccgaaggcacgatctattgtcctatcccagctcgaaagaactcgactgccgctgaggtcattgagtcactgataaataagctacacctggataaaacgaaatgttacgtccttgcagaggtcaaagagttcgggggagaagaatggatcctcaacccgacagactgccccgtgcagcgtatgatgctgtggcccaggatggccctcgagaatcgcctcagcggcgaggattaccggtttctgttacgtgagaagaatctggatggctcaatccactatggctcactgcaatcctggcttagagtgacagaggaaagaagacggatgatggagcgaggcttccttccacagccccagcagaaggacttcgacgatctgtgtagcctacctgaccttaacgaaaagacactgctcgagaatctgcggaaccggttcaagcatgagaaaatatacacgtacgtcggatctattctcattgtaatcaaccctttcaagttcttgccaatttacaaccctaaatacgtaaagatgtatgacaaccaccagttgggcaaactggaaccacatatctacgctgtcgctgatgttgcctaccatgctatgctgcagaggaaaaaaaaccagtgcatagttatttccggcgagagtggctccggcaagacacagagcacgaatttcctgatccatcatctgacggccttgtcacaaaagggtttcgcatcgggagtggagcagataatcctaggagccggacctgtgctagaagcctttgggaacgcaaagaccgcccacaacaacaattccagccgttttggaaagtttatccaagtgaactaccaggaaacagggacagtactgggagcatacgtggagaaatacttactagagaagagcagattggtataccaagagcataacgaacgtaactaccatgtcttctactatttactggctggcgctagtgaggacgagcgcagcgccttccacctgaagcagccggaagagtaccactacctgaaccaggattgttttacggtggagggagaagacttgaggcacgatttcgagagattgcagttggccatggaaatggtcgggttccttccaaagactcgcaggcagatattttcattattgagtgccatcttgcacctgggtaacatctgctacaagaaaaagacttaccgcgatgacagcatcgacatatgcaaccccgaagtgctgcctatcgtttcagagctcctagaagtcaaagaggagatgctcttcgaagcactcgtcacacgaaaaactgtgacggtgggcgagaagctgatactgccatacaagttagcggaggcagtgaccgtgcgaaacagcatggcaaaatccttgtatagtgcgctgttcgattggattgtctttcggataaatcacgccctgctaaattcaaaggatctggagcacaacaccaaaaccctttccatcggtgtactagatatttttggcttcgaagattacgagaacaactcgtttgagcaattttgcataaacttcgccaacgaacgactccagcactatttcaatcagcacatttttaagttagaacaggaagagtatagaaccgagggaatctcatggcataatatagactatatcgataatacatgctgcattaacctcatctccaagaaacccactgggctgcttcaccttctagatgaagagagcaatttcccacaggccaccaaccagacgctgctggataagttcaagcatcagcatgaggataatagctacatcgagttcccagcagtgatggagccggcattcataattaagcactacgctggaaaggtgaagtacggggtcaaggattttcgagaaaagaacacggaccacatgaggccagacatcgttgccctcttacgttccagcaaaaatgcctttatctcaggcatgatcggtatcgaccccgtcgccgtttttcggtgggccatcctgcgggcttttttccgggcaatggtggcattccgcgaggctggcaagaggaatatccatcgtaagaccggccacgatgacacagcaccttgcgctatcctaaaatcaatggattcattctctttcttgcaacacccagttcaccagcgcagcctcgaaatcctgcaacggtgtaaagaagaaaaatactcaatcacccgcaaaaatcctcggaccccgctgtcggacttgcaagggatgaacgccttgaatgagaaaaaccaacatgatacctttgatattgcatggaacggcaggacagggatcaggcagtctaggctctccagcggaaccagcttgctggataaggatggaatcttcgctaattctactagcagtaagctcttggaacgcgcacacggcatcctgacacgcaataaaaatttcaaaagcaagccagccttgccaaaacatctgttggaagttaactccctgaagcacctgactcggttgactctccaagatagaatcactaagagcctcctgcatttgcacaaaaagaaaaagccgcctagcatctcagcgcagttccaggccagtctgagtaagctcatggagactctgggccaggccgagccgtatttcgtgaaatgcatacgctcgaacgctgagaaactccccctccggttcagcgatgtcctcgtgttgaggcagctgcgatataccgggatgctggagacagtgcgcattcggcaatctggctattcatcaaaatacagttttcaagactttgtgagccacttccatgtgctgctgcccagaaacatcataccatcaaagtttaatatccaggatttttttcgaaagatcaatcttaatccagataactatcaggtcggaaagactatggtgttcctgaaagagcaagagaggcagcaccttcaggatctgcttcaccaggaggtgttgcgcaggataatcctgctccagaggtggttcagggtactgctgtgcagacagcatttcttgcatctgcgccaggcgtcagttattatccagcgcttctggaggaactacctgaatcaaaaacaagtgagagatgccgctgttcagaaagacgcctttgtcatggctagtgccgctgcattactgcaagcctcctggcgtgcacatttagaaaggcaaagatatctggaactcagggctgctgctatcgtcattcagcaaaagtggcgggattattacagacgccgacacatggcggctatatgtatccaggctcgatggaaggcttaccgggagtccaaaagatatcaggagcagagaaaaaattatcccttcgctataaacatgtag

SEQ ID NO: 231602 - DNA, 7646 bp, synthetic construct
  misc_feature 1..7646: note = Description of Artificial Sequence: Synthetic coding sequence
  source 1..7646: mol_type = other DNA
atgaatattaatgatggtggccgacggaggtttgaagacaatgaacatacattgaggatctaccctggggcaattagcgagggcactatctattgccccatcccggctagaaaaaattcaacagccgctgaagtgatcgaaagcctgataaataaattacacctggacaaaactaaatgttatgtcttagcagaggtcaaagagttcggcggagaagaatggatcctgaaccccacagactgtcctgtgcagagaatgatgttatggccaaggatggcgcttgagaacaggctctctggcgaagactacagattcctcctgagagaaaaaaatctggacgggagcattcattatggttcacttcagtcgtggttgagggtgacggaggagcgtaggcggatgatggaacgtgggttcctgccccagccccagcagaaggacttcgatgatctatgctcactccccgacctcaatgaaaaaacactgttggagaatctgcgcaaccgttttaagcacgagaaaatttacacgtacgtcggatctatcttgattgtaattaacccattcaaatttctgcccatctacaatcccaaatacgtgaaaatgtacgataatcaccaactcggcaagctggagccgcacatctacgcagtcgcggacgtggcctatcacgccatgctgcagaggaaaaaaaatcaatgcattgtgatatccggtgagagcgggtctgggaagacccagtctacaaacttcctgattcaccatttaaccgctctttcgcaaaaaggattcgcctccggtgtcgagcaaattatactcggggcaggtccagtactggaagcattcggaaatgcaaagactgctcataataataactcaagcaggtttggcaagtttatccaagtgaactaccaggaaacaggtaccgtgctaggagcatatgtggaaaagtatctcctggagaagtcccgactcgtttatcaggaacataacgagcgaaactatcacgttttctattacctgttagccggtgcttcagaagacgagaggtccgcctttcatctgaagcaacctgaagagtaccactatcttaatcagattaccaaaaaaccactgcggcagagctgggatgactactgttacgattcagagcctgactgtttcactgtggaaggcgaggatctgagacatgactttgagaggctgcaattggccatggagatggttggtttcctgccaaaaacacgcaggcagatcttttccctgctaagtgctatccttcacttgggcaacatctgttataaaaaaaagacctatcgtgacgacagcattgatatttgtaaccctgaggtgctgcctatcgtatcggaactcctagaagtcaaagaggagatgctcttcgaagcgttagtgacacgtaagacggtgacagtcggcgaaaagctgatattgccatacaaactcgccgaggccgtgacagttcgaaactcaatggccaagtctctctacagcgcattgttcgattggattgtgttcagaatcaatcacgcactgttgaattcaaaggaccttgagcacaacaccaagactctgtcgataggagtactcgacatcttcggattcgaggactatgagaacaattcctttgagcaattctgtattaatttcgccaatgaacgcctgcaacattatttcaatcagcacatattcaaactcgagcaggaggaataccggactgaggggatcagctggcacaatatcgactacattgacaacacttgttgtatcaacttaatcagtaagaaacctaccggccttttacacctcctggacgaagaatccaacttcccccaggccacaaaccagactctgcttgacaaattcaaacaccagcatgaggataattcatacatcgagtttccagctgtgatggaaccggcattcattatcaaacactatgccggaaaggtgaaatacggggtgaaggatttccgggaaaagaacaccgatcatatgcgtccagatattgtcgctctcctacgctcatccaagaatgcgtttataagcgggatgataggaatcgacccagttgcggtctttcggtgggctatactgcgggctttcttccgcgcaatggtggcctttcgggaagccggaaaaagaaatatccatcggaagaccggccatgacgacaccgctccctgcgccatcctgaaatcgatggactcattcagttttctgcagcatcctgtccatcaacgttccctagagatactccagcggtgtaaggaggaaaaatattccattacccggaagaacccaagaacaccactcagcgatctgcagggtatgaatgccctcaacgaaaagaatcaacacgacacttttgatattgcctggaatggcagaacaggcattaggcagtccaggctctcctcgggcacgtcactcttagacaaggatggtatctttgccaattccacctcatcgaagttactggaaagagcacacgggattctgacaaggaataaaaactttaagagtaaaccagctctgccgaagcacctgttggaagtgaatagtctgaagcatctgacgcgtctgacactgcaggatcgcatcaccaaatctctcctacatctccacaagaagaagaagcctcccagcattagtgcccagtttcaagccagcctttcgaagctgatggagaccctcggccaggcggagccctatttcgtgaagtgtattaggagtaatgctgaaaagctccctctccggttttctgacgtgctcgtcctgagacaacttagatatactggaatgttggaaaccgttagaatcagacagtccggctacagttctaaatactcgtttcaagatttcgttagtcatttccacgtgctgttacccaggaacattattccgtcaaagtttaatatccaggatttctttaggaagattaacctgaatcctgacaattaccaggtcggaaagaccatggtgtttctcaaagaacaggaacgacagcacctccaggatcttctacaccaggaagtgctccgtcgaatcattctgctccagcggtggtttcgtgtactgctctgccgtcagcactttcttcaccttcgacaggcgtctgtgatcatccagaggttctggcgcaattatttgaatcagaaacaagtgcgagatgcagcggtacagaaagacgcttttgtgatggccagcgcagcggctctgctgcaggcttcctggcgtgcccacctggagagacagaggtacctggaactcagggccgctgctatcgtcatccagcaaaaatggcgggattattatcgcagacgccatatggcggctatatgtatccaagcaagatggaaagcgtatagggaatcaaagcgctatcaagagcagagaaagaagatcattctgctgcagtcgacttgccggggattccgcgctcggcagcgatttaaggctttaaaagaacaacggctgagagagacaaagcctgaagtgggcttagtgaatattaaaggctatggaagcctggaaattcaagggtcagacccttctggctgggaagactgttcgttcgataatagaatcaaggccatcgaggaatgcaaaagtgtcatcgagtcaaatcggatcagcagggaaagctcagtagattgcctgaaggagtctcccaacaaacaacaggagcgcgctcagtctcagtccggcgtggacctgcaggaggacgtgttggtgcgcgagagacccaggtcactcgaggacctgcatcagaagaaagttgggagggcgaagcgggagagccgaaggatgcgagaactcgaacaggctattttttccctggagttgctgaaggtcaggagcctcggcggaatttcaccatctgaggatagacgatggtctactgagctggtgccggagggattgcagtctccacgaggtacgccagatagtgaaagtagccagggcagtcttgaactgctgtcctacgaggagagccagaagagcaaactggaatcagttatctctgatgagggcgacctccagttccctagcccaaagatttcctcctcccctaagtttgactctagggacaatgcactatccgctagcaacgagacctcaagtgcagaacatctgaaggatggcacgatgaaagaaatggttgtgtgctctagtgagagcatcacttgtaagccgcagctcaaggactcctttatcagcaattctctgcctacctttttctatatcccacagcaggaccccctgaaaacaaatagccaactggacacctcaattcagcgcaacaaacttctcgagaacgaggatacagccggagaagccctgacgctggacatcaatcgggagacaaggagatatcattgtagcggcaaggaccagattgtacctagtttaaataccgagtcctctaacccagtgctaaagaagctggagaagctcaacaccgaaaaggaagaaaggcagaaacagctccagcagcagaatgagaaggagatgatggagcagatcaggcaacagacagacatacttgaaaaggagagaaaggcattcaagacaatcgaaaagccacgcatcggtgagtgtttggtggcgcctagctcctaccaatccaaacagagagttgagagaccatcgtccctgctgtcactgaacacatcgaacaagggagaattgaatgtgctcggctctttgagtctgaaagacgcagccctcgcacagaaggactctagcagtgcccacctgcccccaaaggatagacctgttactgtgttctttgaacgcaagggctcaccatgccagtcaagtacagtgaaagaattatccaagacagatcgtatgggcacccagcttaacgtagcttgcaagttgtcaaacaacagaatctcaaaacgggaacattttcgacccacacaatcctacagccataacagcgatgacctgtcgagggagggaaacgcaaggccaatcttctttacgcccaaagataacatgtcaattcccctcgtgtctaaagaggctctcaatagcaagaacccccagctgcacaaagaggatgaaccggcttggaagccggttaagctggccggaccaggtcaaagggaaactagccagcggttttcaagcgtagatgagcaggccaagctgcataagaccatgagtcaaggagagatcacaaaactggcagtccggcagaaggcatctgacagcgatataaggccccagcgcgcaaaaatgagattttgggccaagggaaagcaaggcgagaaaaaaaccacaagggtgaaaccaacaacacaatccgaggtcagccctttgtttgcaggcacggatgtgatacccgctcaccaattcccagacgaattggctgcctaccatcccaccccccctctgtctcctgaattgcccggtagttgtcggaaagagttcaaagaaaataaagaacctagcccaaaagctaagagaaagcgctctgtgaaaatcagcaatgttgcgctggactctatgcactggcagaacgacagcgtgcaaattattgcttcagtctccgatctgaaaagcatggacgaattcttgttgaaaaaagttaacgacttagataatgaggatagcaagaaagacaccctcgttgacgttgtttttaagaaggccctcaaggaattccggcaaaacatcttttctttttactcgtcagcactcgccatggacgacggtaagagcattcgctataaagacctctacgcacttttcgagcagatcctggagaagacaatgagattagagcaaagagatagcttgggagagagccctgtgagggtctgggtgaacacattcaaggtgttcttagatgaatatatgaatgagttcaagacaagtgactgtaccgctactaaggtccctaaaacagagcggaaaaaacgcagaaaaaaagagactgaccttgtcgaagagcacaacggtcatatctttaaagccacccagtacagcatccctacctactgcgaatattgttcgtctttgatttggattatggatagggcaagtgtctgtaagctctgcaagtatgcctgtcataagaaatgctgtctaaagactacggcaaaatgtagcaagaagtacgatcctgagctttcttctcggcaattcggagtggaattgtctcgtctaacatcagaggataggacggtccccctggtcgtcgagaagctcatcaattacatcgagatgcatggcctatacaccgagggaatatatagaaagtccggcagcaccaacaagattaaggagctacggcagggactggacactgacgccgagagtgtgaacctggacgattataacattcatgtaattgcctctgtatttaaacagtggttacgcgacttgccgaaccctctgatgacattcgaactgtatgaggagttcctaagggccatgggcttacaggagcggaaggaaacaattaggggcgtatactcagtcatcgatcagttgtccagaacacatttgaatacactggagcgtcttatctttcatctggtcaggatcgctctccaggaggacaccaaccggatgtcggcgaatgccctcgcaatcgttttcgctccctgcatcctcaggtgtcctgatacaacagatcccctgcaatcagtgcaagacatcagtaagacaacaacttgtgtggaactgattgtggttgagcagatgaataaatataaggccaggctgaaagatattagttccttagagtttgctgaaaataaagctaaaacacgcctcagcctcataagaaggagtatgggcaaagggaggatcagacgcggaaactatcccggaccctcatctccagtggtggtgcgcctcccgtcagtttccgatgtttcagaggaaacactcaccagcgaggcagctatggaaacagacatcaccgagcagcagcaggccgctatgcaacaggaggaacgcgtgttgactgaacagatcgagaatctgcagaaggagaaagaggagctgacatttgagatgctcgtgctggaacccagagcaagtgacgatgaaacgcttgagtcagaagcaagcataggcacagctgactccagcgagaacttgaatatggagagcgaatacgccatatctgaaaaatccgaaagatccctcgccctgtcttctcttaaaaccgctggaaagagcgagccatccagtaagcttaggaaacaactgaaaaagcagcaggactcactggacgttgtcgacagctcagtgagcagcctgtgtctgtcaaacacagcctctagccatggtacgagaaagctctttcagatttacagcaaaagtcccttttatagagctgcatcaggcaacgaggctctagggatggaagggccactagggcagacgaagtttctggaagacaagcctcaattcatttccagggggacatttaatcctgaaaaaggaaagcaaaagttaaaaaatgtgaagaacagcccccagaagacaaaggagactccagaagggactgtgatgtcaggcagacgaaaaactgtggacccggattgcacatctaatcaacagcttgcattgtttggcaataatgaattcatggttta

SEQ ID NO: 231603 - DNA, 7859 bp, synthetic construct
  misc_feature 1..7859: note = Description of Artificial Sequence: Synthetic coding sequence
  source 1..7859: mol_type = other DNA
atgaatattaacgacggtgggaggcgtagatttgaagataatgagcatactctgagaatataccccggagcaatcagtgaagggactatctattgtccaattccagcacgaaaaaactccactgccgcagaggtgatcgagagcctgattaataagttgcatctggacaagaccaaatgctacgtgttagcagaggtcaaagagtttgggggagaagagtggatcttgaacccgaccgactgtccagtccagcgtatgatgctctggcccaggatggctcttgagaataggttgtccggagaagactatagattcctgctgcgagaaaagaacctggatggttccatccattacggcagcttgcagtcctggctcagggtcactgaggagaggagaagaatgatggagcgagggtttctgccacagccccagcagaaagatttcgacgatctttgtagcctcccagatcttaacgaaaaaacactgctcgaaaatctgaggaatagatttaaacatgagaagatctacacatacgttggcagcatcctaattgtgattaatccgtttaagtttctgcccatatacaacccgaagtacgttaagatgtatgataaccatcagttaggcaagctggagccccacatctacgccgtggcggatgtcgcataccacgccatgcttcagagaaaaaagaaccaatgtatcgtcatctccggcgagagcggatccggcaagacacagagtaccaattttcttatccaccacctgactgcactctctcagaaggggttcgcttccggtgtggaacaaattattctgggcgctgggcctgttcttgaggcatttgggaatgcaaagacggcacacaacaataatagttcgagattcggaaagtttattcaggttaactaccaagaaactggaactgttctgggcgcttacgtggagaaatacctgttggagaagtcccgactcgtttaccaggagcacaacgaacggaattaccatgtgttctattacctcctggcaggcgcttctgaagatgagcggagtgcatttcacctgaaacagcccgaggagtaccattatttgaaccaaatcactaaaaaaccgctgcgacagtcctgggacgactactgctatgacagcgaacccgattgctttactgtagagggagaggacctgcggcatgattttgagaggctgcagctcgccatggagatggtcggatttctgccaaagacacgtcgacagatctttagcctgctctctgcaattcttcacctaggcaatatctgctacaaaaaaaaaacataccgtgacgactccatcgacatctgcaatcccgaagtcctgcccattgttagtgagttactggaagttaaggaagagatgctgttcgaggctctagtaacaaggaagactgtgaccgtgggagaaaagttgatactaccatataaactcgcggaagctgttacggtgcgcaactcaatggcaaaaagcttatatagcgccctcttcgattggatagttttccggatcaaccatgctcttctgaactctaaggaccttgagcacaacacaaaaacccttagtattggcgtcttggacatctttggttttgaagactatgagaataattccttcgagcagttctgcataaattttgctaacgagagattgcaacattactttaaccagcatatcttcaagttggaacaggaagaatacaggacggagggaatatcctggcacaatattgactacattgataacacgtgttgtatcaacctcatctccaagaaacctactgggctcttacatctgctcgacgaggaaagcaattttcctcaggctaccaaccaaaccctcctcgacaagttcaaacaccagcatgaggacaatagctacattgaattccccgcagttatggaaccagcctttatcatcaaacactatgccggaaaggtaaaatacggggtgaaagatttccgcgaaaagaataccgatcacatgcggccagatatagtggctttactcaggtcatcgaagaacgctttcatttcaggaatgattgggattgaccctgtggctgtgtttaggtgggcgattctccgagcattctttcgggcaatggtcgcattccgcgaggccggaaaacggaatatccataggaagacagggcatgatgataccgccccatgcgcaatcctaaagagcatggattctttttctttcctacagcatcctgtccatcagagatccctggagattcttcagcgatgcaaagaagaaaaatattccatcacccgcaagaaccctcgcacaccccttagcgacctacaggggatgaacgccttgaacgaaaagaaccagcatgacacgttcgacatagcctggaatggccgaaccgggatccgacaaagccggctgtccagtggaaccagtctgctggacaaggacggtatattcgccaactctacctcctcaaaactgttagaacgggctcacggtattctgaccagaaacaaaaatttcaaaagcaaaccggcactcccaaaacatctgttagaggttaatagcctgaaacatttgacaagactgacacttcaggaccgtatcactaaaagcctcctccacctacataagaagaagaaaccaccgtccatctcggctcaatttcaggcttctttgtcaaaattaatggaaaccctgggccaggcagaaccttattttgtgaagtgtatcaggtccaatgccgagaagttgccgctgcggtttagcgatgtcctggttctgagacagttaaggtataccggaatgctggagaccgttcggatacggcagtccgggtacagtagcaaatattcctttcaggatttcgtgagccacttccacgtgctgctgccacgcaatatcatcccatctaagtttaacattcaggacttcttcaggaaaatcaacctaaatcctgataattaccaagttggcaagacaatggtgttcctaaaagagcaggaacgccagcatcttcaggatctgctgcaccaggaagtgctgcgcagaattatactccttcagcgatggtttagagtattgctatgtagacagcactttttgcacctgagacaggcatcggtgattattcagaggttttggagaaactacctcaaccagaaacaggtgagagatgctgccgtccaaaaggatgcttttgttatggcctccgccgcagcactcctccaggcgagctggcgcgctcatttggaaagacagcggtacttggaactcagagctgctgcgatcgtgatccagcagaaatggcgagattattaccgaagacggcatatggcagcaatatgcattcaggccaggtggaaagcctaccgggaatcaaagagatatcaggaacagcggaaaaaaattatcctcctccagtctacttgcagggggttccgcgcacgccagaggtttaaggctctgaaggagcagagactgcgggaaaccaaacctgaggtcggcctggtgaatatcaagggatatggctccttggagattcagggcagcgatccaagcggatgggaagactgctcattcgataacagaataaaggcgatcgaggagtgcaagagcgtcatcgagagcaaccgcatctctcgtgaatccagcgtggactgccttaaagaatcccctaataaacagcaggaaagagctcagagccagtccggagtcgacctccaagaggacgtactggtcagggagcgtcctaggtctcttgaagatttgcatcagaagaaggtcggacgagcaaagagagagagccgtcggatgcgcgagctggaacaggcaatctttagtctggaactgctgaaggtgcggtccctgggcggaatctccccttcggaagatagaaggtggtccacagagctggtgcctgaggggcttcagtccccccgtggaactcctgactctgaaagcagccagggatcccttgaattgctgtcctatgaggagtctcagaagagtaagctggagagcgtgattagcgatgaaggtgacttgcagtttccctctcccaagattagctcctctccaaaatttgactcacgggacaatgccctgtctgcatccaacgaaacctcaagcgctgaacacctgaaggacggtaccatgaaggaaatggtggtttgcagttctgagagcatcacatgcaagccccaactgaaggactcctttattagcaacagcctgcccacattcttctacatcccccagcaggatccactcaagacgaactcgcagctcgatacaagcattcaaaggaataaactgctggaaaatgaggacaccgctggtgaggccctgactctggacattaaccgagaaacaagacgataccactgtagcggcaaagatcagatcgtgccatctttaaataccgaaagctcaaaccccgtgcttaagaaactcgagaaactgaataccgagaaagaagagagacagaagcaactccaacagcaaaatgagaaggagatgatggaacaaatccgacagcagaccgacatcctagaaaaggaacgcaaagccttcaaaacgattgagaaacccagaattggggagtgcttggtcgcgccaagttcttaccaatctaagcaaagagtagaacgaccatcttccctcctgtccctcaacactagcaataagggcgagctgaacgtgctgggctctctatcgctgaaggacgccgctctggcccagaaggactctagctctgcccacttgcccccaaaggatagaccagtgactgtcttttttgagcggaaaggatcaccttgtcagtctagtacggtaaaagaattgtccaagactgacaggatgggtactcagttaaatgtagcttgcaagctttccaacaaccgcatctctaaaagggagcacttccggccaacccagtcctattcacacaattctgatgatttatccagggaaggaaatgccagacccattttcttcacacctaaagacaatatgagcatcccccttgtttcaaaagaagccctgaatagtaagaatcctcagctgcataaggaggatgagcccgcatggaagccggttaagcttgccggaccaggacagagggaagtcgcacgacctgcccacaagaaaaaggcgcgaatggccaggaccaggtccgactttcttacacggggtacctttgcggatggggagggggatactgaagaggatgactacgacgatataattgaaccattgttgtccctggaccaggcatcgcattgcgagctcggccctgcccctagcttaggacaggcttcccattcggatagcgagatgaccagtcagaggttcagtagtgtggatgagcaggccaagcttcacaagacaatgagccagggcgaaatcactaagctggcagtccggcagaaggccagtgacagcgacattcgccctcagagggctaagatgagattctgggccaaggggaagcagggggaaaagaaaaccactcgtgttaagcctactacccagtctgaagtgtctccattattcgcaggaactgacgtgattcccgctcaccagttcccagacgagctcgcagcttatcacccgactccccctctgtcacctgagctaccagggtcctgcagaaaagagtttaaggagaataaggaaccatcccccaaagcaaaaagaaaaaggagcgtgaagattagcaacgtagccttggatagcatgcattggcagaacgatagcgtgcagatcatcgcctccgtgtctgacctgaagtctatggacgagttcctgctcaaaaaggtgaatgatcttgacaacgaggactcgaaaaaggacaccctcgtggacgttgtcttcaaaaaggccctaaaggagtttcgacagaacattttctctttctattcatctgctcttgcaatggacgatgggaaatcgattagatataaagacctgtacgccctgttcgagcaaatcctggagaaaaccatgagacttgaacagcgtgattctctgggggaatcacctgtgcgcgtctgggtgaatacatttaaggtgttcctggacgaatatatgaatgaatttaagaccagtgactgcaccgctactaaggttcccaaaacagagcgaaagaagcggaggaagaaagaaaccgaccttgtggaagagcataatggccatatctttaaagccacacagtacagcatacctacgtactgcgaatattgctcatcgttgatttggataatggatcgggcatcagtgtgtaaactatgtaaatacgcttgtcacaagaaatgttgtctcaagacaactgcaaagtgctcaaaaaaatatgacccggagttatcctctagacagtttggtgtcgaattgtctcggctcaccagcgaagatcgaaccgtgcctttggtcgtggagaagctcatcaactacatcgagatgcatgggttgtataccgagggaatctaccggaagtcaggtagcacaaataagattaaggagcttcgtcaagggctggacaccgacgctgaaagcgtgaatttagacgattacaatatccacgtgatagctagtgtgtttaagcagtggctccgggatctgcctaaccctctgatgaccttcgagctgtacgaagaattcctgagagctatgggactgcaagagagaaaggaaacgattaggggggtgtactccgttatcgatcagctgagccgaactcatctcaataccctcgagcgtctcatcttccacctggtgaggatcgctttgcaggaagacactaaccggatgtccgcaaacgccttggccattgtttttgctccctgtatcctgagatgcccggatacaactgacccccttcagtccgtacaagatatttccaaaacaacaacctgcgtggagctgatcgtggtggagcagatgaataagtacaaggccaggctcaaggatatctcctccctggaatttgcagaaaacaaggctaagacgagactgagtctgataagacgatctatgggcaaaggtaggattagacgtggtaactaccccggaccatcgtcgcccgtggtagtccgtctgccttccgtgtcggacgtgagcgaagaaacgcttacgagcgaggccgctatggagactgacattacggaacagcagcaagctgccatgcagcaggaggaacgggtactgactgaacagatcgaaaacctgcagaaagaaaaagaggagctgacttttgaaatgcttgtgctggagcccagggccagtgatgacgaaaccctggagtccgaggccagcatagggactgccgacagttctgagaaccttaacatggaaagtgagtatgccatcagcgagaagtcggaacggtcacttgccctgagcagtctgaagacagctggcaagtcagagccatcttctaagctacgaaagcagctgaaaaaacagcaggactcgctggatgtagtggatagttccgtgtcctccctctgcttgtctaatactgcatcctcacacggcaccaggaagctgtttcagatctactccaagagcccgttctatcgcgctgcgagtgggaacgaggcactcggaatggaagggccacttggtcaaaccaaattcctggaggacaagccacagttcatttcccgtgggacctttaacccagagaaggggaagcaaaagttgaagaatgtcaagaattctcctcagaaaactaaggaaaccccggagggaactgtcatgtccggtagaaggaagaccgtggatcctgactgcaccagtaaccaacagctggcactgtttgggaataacgaatttatggtcta

SEQ ID NO: 231604 - DNA, 7589 bp, synthetic construct
  misc_feature 1..7589: note = Description of Artificial Sequence: Synthetic coding sequence
  source 1..7589: mol_type = other DNA
atgaatataaatgatgggggacgtcgcaggttcgaagacaacgaacacacattgcgaatatacccaggcgcaataagcgagggcaccatctactgtccaatccctgctagaaaaaactccacagccgctgaggtaatagaatctttgattaataagctgcacctcgacaagacaaagtgttatgtgctggccgaggtaaaagagtttggaggtgaggaatggatcctgaatccgaccgactgtccagttcagcgaatgatgctgtggccccgaatggccctggagaatagactcagtggcgaggactaccgattcttgctaagggagaaaaacctggatggcagcatccactacggatcactccagtcttggctgagggtgacggaagagcgcagacggatgatggagcgcggattcctcccccaaccccagcagaaggatttcgacgacctgtgctcactgccagatcttaatgaaaaaacactgctcgagaatctacgaaacagatttaaacatgagaagatttacacctacgtggggtctatcttgattgtgataaacccatttaagtttttgcctatctataatccgaagtacgtgaaaatgtacgataaccatcagcttggaaagctcgagccacacatatatgccgtcgctgacgtggcgtaccacgccatgctccagcgcaaaaaaaatcagtgtatcgtaatatcgggggagagcggttccggaaagacccaaagtaccaattttcttatccatcatctgaccgccctttcccagaagggcttcgcttcaggagtggagcagattatcctgggggctgggccagttctggaggcttttggcaatgctaagacagcccataataacaactccagtagattcgggaagtttatccaggttaactaccaagaaaccggtacagtcctgggcgcatacgtcgaaaaatacttgttagagaagtcccggttagtgtaccaagaacataacgagcgcaactatcacgttttctattatctgctggcaggggctagcgaagacgagaggtccgcttttcacctgaagcagcctgaggaataccactatctcaatcaggattgtttcaccgtcgaaggagaagatctgaggcacgacttcgagaggctccagctcgccatggagatggttggctttctgcctaagactaggagacagatcttcagtctgctttcggctatcctccacctagggaatatctgctataagaaaaagacataccgagatgattctatcgatatctgtaatcccgaagtgctccccatagtatccgagctccttgaagtgaaggaggaaatgctcttcgaagctctcgtgacgcggaaaacggtgacggtgggggagaaattgattcttccctacaagttggccgaagccgtcaccgtgcgcaatagcatggccaagtccctgtacagcgctctcttcgattggatcgtcttcagaataaaccatgcactcctgaattctaaagatctcgagcacaatactaagaccctcagtatcggggtcctggatatctttggttttgaagactacgagaacaattctttcgagcaattttgtatcaactttgccaacgagagactccagcattactttaatcaacacatctttaagttagaacaggaggaatatagaacggagggaatctcttggcacaatatagattacattgacaacacctgttgtatcaacctgatcagcaagaaacctactgggctactgcacctgctggacgaggagagcaattttcctcaagccacaaatcagaccctcctcgacaaattcaagcaccagcatgaggataacagctacatagaatttcccgcagtgatggagcccgcttttattatcaaacactacgctggaaaggtcaagtatggggtaaaagattttagagagaagaacactgatcatatgaggcccgatatcgtggctctattaaggagcagcaaaaacgcattcatcagcggaatgattggaatcgatcctgtggcagtgttccgctgggcaatccttcgtgcctttttccgggctatggtcgcattccgggaagccggaaaacggaacatccaccgcaagactggacacgatgacacggccccatgtgcaattttgaaaagcatggattccttcagttttctccagcaccctgttcatcaaaggagtttggagatcctgcagcgctgcaaggaagaaaaatacagcatcactagaaaaaatcctaggaccccacttagcgacctgcagggcatgaatgccttaaacgagaaaaatcaacacgacacttttgatatcgcgtggaacggcaggaccggaatccggcagagccgcctgagttcgggcacgagtctgctggacaaggacggaatctttgcaaattcaacatcatcaaagctcctggagcgcgcacacggcatcttgacccgcaataaaaatttcaagtccaagccagccctgcccaagcacttgctggaggtgaactcgttaaaacaccttacacgtctgaccctacaggataggatcaccaagtcactgctgcatctacataagaagaagaagcctccctcaattagtgctcagttccaagccagtctgtcaaagctgatggagactctgggccaggccgagccttacttcgttaagtgcattcgaagcaatgctgagaaactgcctcttcgcttctccgacgtactggtcctgaggcagctgcgatacacgggtatgctggagaccgttagaatcaggcagtcaggatacagcagcaaatatagcttccaggactttgtgagtcattttcacgtgttgcttcccaggaacataatccccagcaagttcaatatacaggacttcttccggaaaattaacctgaatccagacaactatcaggttggcaaaaccatggtgtttctgaaggaacaggagcgccaacacctccaggaccttttacatcaggaggtgcttcgcaggatcatcctccttcagcgctggtttagagtgttactctgtcggcagcactttcttcacttacgccaggcatcagtgattatccagaggttttggcgcaattatttgaaccagaaacaggtgagagacgccgctgttcagaaagatgcctttgtcatggctagcgctgccgctctgctgcaagcaagctggcgggctcatttagagcggcagaggtatctggaactgcgagcggcagctattgtgatccagcagaaatggcgcgattactacagacgccgacacatggctgccatctgtatccaggcgaggtggaaggcataccgagaaagcaagaggtaccaagaacagaggaaaaaaataattctgcttcaatcaacttgtagaggatttagagctagacagcgattcaaagcactgaaagaacagcgtctgagggagacaaagccagaggtgggactagttaacataaaaggatatgggagtctggaaattcagggctctgatccttcgggttgggaagattgctcattcgataatcgtattaaagccattgaagaatgtaaatcagtgatagaatccaacaggatttccagggaatcctctgtggactgtcttaaagagagtccaaataagcagcaggagcgtgctcagtctcaatcaggggtcgatctgcaggaggacgtactggtgagagagagaccccgttcgcttgaggatctgcaccagaaaaaggtggggagggcgaagcgcgaaagtagacgtatgcgagaactagaacaagcaatcttctccctagagctcctaaaggttcggtcattaggcggaatctccccctccgaggacagacgctggtcaaccgaactggtgcctgagggactgcaaagccccaggggcacgcccgacagcgagtcaagtcagggatcgctggagctcctctcttacgaggaatctcagaagtctaagttagaatcagtgatttcagatgaaggagatctacagttcccttcaccaaagattagcagcagcccgaagttcgatagccgagataacgctctgtcagcgtcgaatgagacaagttctgccgaacaccttaaggacggcactatgaaagaaatggtcgtgtgctccagcgaaagcatcacctgcaagccccagttgaaggattcctttatctcaaactccttaccaacattcttctacattccacagcaggacccactgaagacaaactctcagctggacaccagcatacaacgtaacaagcttctcgagaatgaggacacggctggggaggctcttacacttgacattaaccgtgagactcgaaggtatcactgcagtggcaaggatcagatcgtaccatccctgaacacagagtcgagcaatccggttcttaagaagttggagaaattgaataccgaaaaggaagagcgacagaaacagctacagcagcagaacgagaaggagatgatggagcaaattcggcagcagacagatattctcgaaaaggagaggaaagccttcaagacgatcgagaaaccgcgtataggcgagtgcttagtcgctcctagcagctatcagagtaagcaaagggtcgaaagaccaagttctctactgtcactgaatacttcaaacaaaggcgaattgaacgtgctcgggtcactctccctaaaggacgctgcactggctcaaaaggactctagctctgcccacttgccccctaaagatcggcctgtgacagttttcttcgagaggaaggggtcaccttgtcaaagttctaccgtgaaggagctgagtaagactgatcgcatgggaacacaacttaacgtggcatgcaagctgagcaacaaccgcattagcaaaagggaacattttcggcctacccaatcctactcccacaattctgacgacctgagcagagaaggaaatgcgagacccatatttttcacccccaaggacaatatgagcatccctcttgtttctaaggaagctctgaattcaaaaaatccacagttgcataaagaagatgaaccggcatggaagccagtgaagctggccggaccgggtcaaagggagactagccagcggttttcctctgtggacgagcaggctaaactgcacaagacgatgtcacaaggcgaaattactaaactggccgtacgccagaaagccagcgatagcgatatccgccctcaacgggcaaaaatgagattttgggccaagggtaaacaaggtgagaagaagaccacgagagtgaaacccactactcagagcgaggtgagcccactcttcgctgggactgacgtaattccagctcatcagttcccagatgaacttgctgcctaccacccaacgcctcctctgtcacctgaactgccaggttcgtgccgaaaagaatttaaagagaataaagagccttcacccaaagcaaagcggaagagatccgtcaaaatctcaaacgtagctctagattcaatgcactggcagaatgactcggtccaaattatagcctctgttagcgaccttaaaagcatggacgaattcctgttgaaaaaagtcaacgatctggacaatgaggattcaaagaaggacactttggttgatgtcgtctttaaaaaagccttaaaagagttccgccagaatatcttttccttttacagttctgcactggcaatggatgatgggaagtccattcggtacaaagacctgtacgcgctgtttgagcagatattggagaagaccatgcgcctggagcaaagggactcgctcggtgaatccccggtcagggtatgggtgaacacgtttaaggtcttcctggacgaatatatgaatgaatttaagacttccgactgtaccgccacaaaggttcccaaaacagagcgcaagaagagacgcaaaaaagagacagacttggttgaggagcataacggccatatctttaaggctacccaatactccatcccgacatattgtgaatactgttcttccttaatctggataatggacagggcgtccgtctgcaaactgtgcaagtacgcctgccacaaaaagtgttgcctcaagacgactgccaagtgctccaagaagtacgacccggagctgtcgtcccggcagttcggggtggagttgtctaggctgacctctgaagacaggacagtcccgctggttgtggagaaactaatcaactacatagagatgcacggcctgtacactgagggcatttataggaagtccggatccactaataaaattaaggaactgcggcagggcctggacacagacgcagagagtgtaaacctcgacgattataacatccacgtcattgcctctgttttcaagcagtggctccgggatctacctaaccccctgatgacctttgaactctacgaggagtttctgagagccatggggctccaggagcggaaagagactatcagaggagtctacagtgttattgatcaactttcccgaacccacctgaatacactcgagcggctgatatttcaccttgtgagaatcgccctccaggaggacacgaatcgcatgtcagcgaatgcgcttgccatcgtttttgcgccatgcatactcaggtgcccagacacaacagatcccctgcagtccgtgcaggacatctccaaaaccacaacttgtgttgagctgatcgttgtcgaacagatgaataagtataaggctcggctgaaggacataagcagtctggagttcgcagagaacaaggccaaaaccaggctgtccctgatcaggcgcagcatgggaaaaggaaggatcaggaggggcaactatccaggcccatctagccctgtggtggtgcgactgccgtcagtaagtgacgtgagcgaggagaccttgacttccgaggctgctatggaaaccgacataactgagcaacagcaagcagccatgcaacaggaggagagagtcctgacagaacagatcgagaacctccagaaagagaaggaggaactgacgtttgagatgcttgtgctggagcccagagcaagcgatgacgagacccttgagtccgaagcatccatagggactgcagactcttcggagaacctgaacatggaatccgaatacgccattagcgagaagtccgaacggagtctggcgctgtcctccttaaagactgcaggcaaatcagaaccctctagcaaattacgcaagcagctgaagaaacagcaggactccctggatgtggttgattcaagtgtgtcatcgctgtgtctgagtaacacggccagcagtcacggaactaggaagctttttcagatctacagcaaatccccattttaccgcgctgcgtctggaaacgaagccctggggatggaggggcctctgggtcaaacgaaatttctggaagataaaccccaattcatcagcaggggcaccttcaaccctgagaaagggaagcagaaactgaagaatgtgaagaatagcccacagaagactaaagaaactcctgaggggaccgtgatgtccggtcgcaggaagaccgtcgacccagattgtaccagcaatcagcaactagcccttttcggcaataatgagtttatggtgta

SEQ ID NO: 231605 - DNA, 2190 bp, synthetic construct
  misc_feature 1..2190: note = Description of Artificial Sequence: Synthetic coding sequence
  source 1..2190: mol_type = other DNA
atgaacatcaacgatgggggacgcaggcgcttcgaagacaatgagcacactcttagaatttaccccggagcaatctcagagggcactatctactgccccatcccagccaggaaaaacagtactgccgctgaggtcatcgagtctctgattaacaagctgcatctggacaagactaagtgttacgtgctcgctgaagtgaaagaatttggaggggaggagtggattctcaatcctactgattgccctgtgcagaggatgatgttgtggccacggatggccctcgagaaccggttgagcggggaggactatagatttctccttcgggaaaagaacctcgatggctcgatacattatggctccctgcagtcatggcttagagtgactgaggagcgaaggagaatgatggaacgtggatttttgccccaaccgcagcagaaggactttgatgatctctgtagcctacccgacctcaatgagaagacactgttagaaaacctccggaatcggtttaagcatgagaagatctatacctacgtggggtctatcctgatagttataaatcccttcaaattcttgcccatttacaatcctaaatatgtcaaaatgtatgacaaccaccagctgggcaagctggagccacacatttacgccgtagccgatgtggcttaccacgccatgctgcagcgcaaaaagaaccaatgcatagtgatcagcggcgagtcggggtccggaaaaacgcagagcacgaacttcctgatacaccacctcacagctctgtcccagaagggcttcgcttccggcgtagagcagatcatcctgggagctggtcctgtactcgaggcattcggcaacgccaagaccgcacacaacaataacagtagtcgctttggcaagttcatccaggttaactaccaggagaccggaaccgtactaggtgcgtacgtggaaaaatacttgctggagaagagccgcctggtgtatcaggagcacaacgagagaaactatcatgtgttttactatctgctggccggagcatctgaagacgaacgatccgccttccacttgaaacaaccagaggaatatcactatcttaaccagattactaaaaagccattgaggcaatcttgggatgactattgctacgactctgaacccgactgctttaccgtagagggcgaggatttacgacatgactttgagcgcctgcagcttgcaatggagatggtgggattcctgcccaaaactcggagacagatcttttccctgctgtcagccatcttacacctcggcaatatctgttacaaaaagaagacgtatagggacgatagcattgacatttgtaacccagaagtcctcccaattgtgtccgaacttctggaggtcaaggaggaaatgctcttcgaggccttggttacgcggaagacggtcactgtgggtgagaaactcattctgccatacaaactggccgaagccgttacagtgcggaactccatggctaagtccctctattctgcactgtttgactggatcgtcttccgcattaaccatgcattactgaattctaaggacctcgagcacaacactaagacactgtcaattggcgttctggacatttttggcttcgaagattacgagaataattctttcgagcagttctgtatcaactttgccaatgagcggcttcagcattacttcaaccagcatatttttaaattagaacaagaggagtatcgcacggaaggaatcagttggcacaatatagattacattgataacacgtgctgcatcaatctgattagcaagaaacccactggactactgcacctcttagatgaagagtccaacttcccccaggccaccaatcaaaccctgctagataaattcaagcatcaacacgaagacaattcttatattgagtttccagccgttatggagccagcttttatcatcaaacattacgcaggtaaagtcaaatacggcgtgaaagattttagagagaagaatacagatcacatgcgcccagatatcgtggctctgttgcggagcagcaagaatgcctttattagcgggatgatcggcatcgatcccgtggccgtgtttcggtgggcgattcttagggcattttttagagcaatggtggcatttcgggaggctggcaaacgtaatatacaccgcaaaacaggtaagtag

SEQ ID NO: 231606 - DNA, 1509 bp, synthetic construct
  misc_feature 1..1509: note = Description of Artificial Sequence: Synthetic coding sequence
  source 1..1509: mol_type = other DNA
atggacaaggctcttctctgtagtgtgtgcaaaatgacatgccacaaaaaatgcgtccacaagatccagtctcattgttcctatacctatggcagaaagggagagccaggtgttgagccagggcattttggagtctgcgttgattctcttacctcagataaggcatccgttccgattgtgttagaaaagttactggagcatgtggaaatgcacgggctgtacaccgaggggttgtacaggaaatcgggggcagcgaacaggacccgggagctccggcaggcgctgcagacagacccggctgctgtgaaactcgaaaattttccaattcatgccatcactggggtcctgaaacaatggcttagggaactcccggaaccattgatgacgttcgctcagtatggtgattttttgcgcgctgtggagctccccgagaagcaagagcagctggctgctatttatgctgtgctcgaacatctgcctgaagccaatcacaactcgcttgaacggctaattttccacctcctggccgtggccctgctggaggatgtgaataggatgagccccggagcgctcgctatcatatttgccccatgcctgttaaggtgcccagacaactccgacccgctgacctctatgaaagatgtgttaaaaattaccacatgtgtggagatgttgataaaggagcagatgcggaaatacaaagtgaagatggaagaaatcagtcagttagaggccgcagagagtatcgcatttcggaggctcagtctgcttcgacagaacgccccatggccactcaagcttggcttttcttcaccttacgaaggagtcctaaataaatcacccaaaacccgggatattcaggaagaagagcttgaggtgctgcttgaggaggaggcggcagggggtgatgaggatcgcgagaaagagattctgatagaacggatacagtcgattaaggaagaaaagcaggacatcacttatcggctccccgagttggacccgcgtgggtcagacgaagagaacctcgacagcgaaaccagcgccagtacggaaagcctcctggaagaacgggctggtaggggcgctagcgagggccctcccgcacccgcactcccctgccccggagccccaacaccttcccctctgcccaccgttgccgctcctcccaggagacgccctagctcgtttgtcactgtgcgagttaaaacacctcgaagaacccccatcatgccaaccgctaatatcaaattacccccaggccttccttcacatcttccacgatgggcacccggtgctagagaagccgctgcgcctgtgaggaggagagaaccaccagcccgtcgccctgaccagatccactcggtgtatataactccgggtgccgatctccctgtgcagggcgcactggagccattggaggaggatgggcagccacccggagccaagaggcggtactctgacccacctacttattgtctccccccagcgtccgggcagactaatggctag

SEQ ID NO: 231607 - DNA, 6068 bp, synthetic construct
  misc_feature 1..6068: note = Description of Artificial Sequence: Synthetic coding sequence
  source 1..6068: mol_type = other DNA
atgtctgtgaaggaggccggatcctctggccgtagagagcaggccgcttatcatctccatatttaccctcaactgagcaccacggagtctcaagcctcttgccgtgttaccgctaccaaggatagcacaacaagtgacgtcattaaggatgcaatagcctccttacgcctggatggaaccaagtgctatgtgctggtggaggtaaaggagagcggaggggaggagtgggtgctggatgccaatgatagccctgtgcaccgtgtgcttctgtggccgcgacgtgcacaagacgaacaccctcaggaagacggctactacttcctgctccaagagcgaaacgccgacgggacaattaaatatgtacatatgcagctcgtggctcaggctactgctacacgccgtctagtcgagcggggattattacctcgccagcaagccgactttgacgacctgtgtaatctaccagagctgacagaggggaatctgctgaagaacctaaagcatcgatttcttcagcagaagatttacacatacgcaggctccattctggtagccatcaatcctttcaagtttctccccatatacaatcctaagtacgtgaagatgtacgaaaatcagcaattaggcaagctcgaaccccatgtgttcgctctggccgacgtcgcctattatactatgctgaggaaacgcgtaaaccagtgtattgtaatctccggtgagagtggcagcggtaagactcagtctacaaatttcctgattcattgtttgacggcactatctcagaaaggctacgcatccggggtggagagaactatcctcggcgctgggccagtgcttgaagccttcggcaatgccaaaacagctcacaacaacaactcctcaaggttcgggaaatttattcaagtctcatatttagagtctgggatcgtgcgcggagcagtggtggagaagtacctcttggaaaaaagtcgtctggtaagtcaggaaaaggacgagcgaaattatcacgtcttttactatcttctccttggtgtcagtgaggaggagcgacaagagtttcagttgaagcagccagaggactatttctatttgaatcaacataaccttaaaattgaagatggggaggatttgaagcacgacttcgaaagactcaagcaggccatggagatggtaggttttctccccgcaacaaaaaagcagatcttcgcagttctttcggcaattctgtatcttggaaatgtgacatataaaaagcgggcaacaggacgcgaggagggcttagaggtgggccctcccgaagttctggataccctgagtcaacttctaaaggtgaagagggagattcttgtggaagtgttgacgaaaagaaaaactgtgacagtgaatgataagctgattcttccttatagtctctctgaggcgattactgctcgagactcaatggccaagtcactgtactccgcactgttcgactggatagtgttgcgcatcaatcatgctttgctgaacaaaaaagatgtcgaagaggccgtgagttgccttagcatcggggtgctggatatattcggtttcgaagattttgaaagaaacagttttgaacagttctgcataaattatgccaatgaacagctgcagtattatttcaatcaacacatctttaaactggagcaggaagaatatcagggcgagggaatcacctggcacaatatcggctatacggataacgtcggctgtatccatctgatctctaagaaaccaacgggactgttctatttactcgacgaggaaagtaacttccctcatgccacctcacagacattattagctaagttcaagcagcagcacgaagacaacaagtattttttgggcacgcccgtcatggaacctgcttttattattcaacattttgcagggaaggtgaagtatcagatcaaagactttcgcgaaaaaaatatggactatatgagacctgacatcgtagcgctccttagaggatcggacagctcctatgtacgtgagctcataggcatggatcccgtagccgtctttcgatgggcggtgcttcgggctgccattagagcgatggctgtcttgagggaggccggacgactgcgcgcagagcgtgcagagaaggctgcaggcatgtcgtcccctggtgcccagagccacccggaagaactcccccgtggtgccagcaccccaagcgaaaaactgtacagagacctgcataatcagatgattaaatctatcaaaggtcttccctggcaaggggaggatcccaggagtcttctccagtccttgagtagactgcagaagccaagagccttcattttgaaatcaaaaggaatcaaacaaaaacagatcattcccaagaatctgctggattcgaaatcactgaaacttataatctcgatgacgcttcatgataggactaccaagtctctgctgcatcttcacaagaaaaagaaacccccatcaatttctgcacagtttcagacaagtcttaacaagctgttggaagctttaggcaaggcagagcctttctttatcagatgcatcagatccaacgctgagaaaaaagaactttgttttgacgatgaattggttttacagcagttgcgttacaccgggatgcttgaaactgttagaatcagacgctcggggtattccgcaaaatataccttccaagatttcactgagcagttccaggtcctcctccctaaggatgctcagccctgccgagaggtgataagcaccctgctggaaaagatgaagattgacaaaagaaactatcaaatcggcaaaaccaaggtgttcttgaaggaaacggaacgacaggctctccaggaaacgttgcacagagaggtggtacgaaaaatactgctcctacagtcttggtttaggatggtgcttgagcggaggcactttctgcagatgaaacgggctgcagtaaccatccaggcctgttggcgctcctaccgggtgagacgagccctggaacggacacaagccgcagtctatctccaggcctcttggcgcggatattggcaacgaaaactgtataggcatcaaaagcaatctataatccggctacaaagcctctgccgcggtcatcttcagagaaaaagcttcagtcagatgatatccgagaagcagaaggccgaagaaaaagagcgggaggctctggaggcggcacgcgctggcgctgaagaggggggacagggccaggctgccggaggtcagcaggtggctgaacagggccctgagccagccgaggacggcggacacctggcctctgaaccagaggtgcagccctctgaccggagtcctcttgaacactcctctccagagaaagaggctcccagtcccgagaagaccttgcctccacagaagacagtggccgcagagtcccatgagaaagttccctcttctcgcgagaagcgtgaatctaggcggcagaggggccttgaacacgtgaagtttcagaataagcatatccaatcgtgcaaggaggagagcgctcttagagaaccaagcagacgcgtgacacaggagcagggggtgagcttacttgaggataagaaagagagccgcgaggacgaaaccttactggtagtggagacagaggcagagaatacatctcaaaaacagcctactgaacagcctcaagcaatggctgtgggaaaggtgagtgaggagacagaaaagacgctcccgagcggcagcccacgcccagggcagcttgaacggccaacatctctggccctcgatagccgagtcagccctcctgcgccagggtcggctccagagacacccgaggacaagagcaagccatgtgggtctccacgggtacaagagaagccagactcccccggaggatccacacagattcagagatatcttgatgctgagcgcttggccagcgccgtcgaactctggcgtggaaaaaagctggtggctgcagcttctccttctgctatgctgagccaatccctggatttgagtgacagacatcgggcaacaggcgctgcacttacgcctacagaggagcggcgtacatcctttagcacttctgatgtgtccaaactgctgcccagcctcgctaaagcccagcctgccgctgagaccaccgatggggaacgcagtgctaagaagccggctgtgcagaagaaaaaaccaggagatgcctcatctttgcccgacgccggtctctctcctgggtcgcaggtcgactctaagtccaccttcaagcgcttattcctgcacaaaaccaaagataagaagtacagcctcgaaggcgcagaagagttggagaacgctgtctcgggtcacgttgtgctggaggctactaccatgaagaagggtctggaggctcccagcggacagcagcaccgacacgccgctggtgaaaaacgcacaaaagagccgggtggaaagggcaagaagaacagaaacgttaaaatagggaaaatcacggtgtccgagaaatggcgcgaaagtgtgtttagacagattaccaacgctaatgagttgaaataccttgatgaatttcttctcaacaaaattaacgatcttagaagtcagaagactcccatcgagtcgctgtttatcgaggccactgagaagtttaggagcaatatcaagactatgtattccgtgccaaatggcaagatccacgtcgggtacaaagacttaatggaaaattaccagatcgtagtcagtaatctggccactgaacggggacagaaagacactaacctagtgctcaatttgttccaaagtctactggatgagtttacaaggggttacactaagaatgattttgagccagtgaagcaatccaaagcccaaaaaaaaaagcggaagcaggaaagagctgtccaagaacacaatggacacgtttttgcctcttaccaagtgagcatcccccagagttgcgagcaatgcctgtcatatatctggttgatggacaaagcccttttgtgtagcgtctgtaaaatgacttgccacaagaagtgtgtacataaaatacagtcccactgtagttatacttacggccgaaagggcgaacctggggtcgaacccggtcactttggggtgtgcgttgactccttgacctcagataaggccagcgttccaatcgtgctcgagaagctgctcgagcacgtggaaatgcacggcctgtacacagaaggattataccggaagtcaggagccgcaaacagaactcgggagttgagacaggccctgcaaaccgacccagccgcagtgaaactagagaattttcctattcacgctattaccggcgtactcaagcagtggctgcgggaactccccgagccccttatgactttcgcccagtacggcgacttcctgagagccgtggagttaccggagaagcaggaacagctcgccgcaatctacgccgtgctggagcatcttccagaagcaaatcataatagtctagagcgtctaatcttccacctggtgaaagtggcactccttgaggatgtaaatcgaatgagtccaggagccctagccattatctttgctccctgcctgcttagatgtcctgacaattctgaccctttgacttcaatgaaagatgtcctgaaaatcaccacatgcgttgagatgctcatcaaggagcagatgcggaagtataaggttaagatggaggaaatctcgcagttggaggcggctgagagtatcgccttcagaaggctttctctgctccgccaaaacgctccctggcctctcaagctcggtttctccagcccatatgagggcgtacttaacaaatctcctaagacccgggatatccaggaagaggagttagaggtgctactcgaggaagaggccgcagggggtgacgaggatagagagaaggaaattctgattgagcgtatacaatccataaaggaagagaaggaggacataacttatcggctgccagagctggacccccgagggtccgacgaggagaacttggattccgaaacttctgctagtacggagtctctcctggaagaaagggctggaagaggcgcttccgaagggcaatatta

SEQ ID NO: 231608 - DNA, 6068 bp, synthetic construct
  misc_feature 1..6068: note = Description of Artificial Sequence: Synthetic coding sequence
  source 1..6068: mol_type = other DNA
atgagtgtcaaggaagcgggatccagtggtaggagagaacaggcagcgtaccacctccatatctatcctcagctgagtactacagaaagccaagcatcctgtcgcgtgaccgccacaaaggatagtacaacatctgacgttattaaggatgccatcgccagtctgagattagacggaactaagtgctatgtcctggtcgaagttaaggagtccgggggagaagagtgggttctggatgccaacgacagtcccgtgcatcgggtcctgctctggcccagacgggctcaggatgagcatcctcaggaggatggctattatttcctgttgcaggagagaaacgccgacggaaccatcaaatatgtgcatatgcagctagtggcgcaagctacggcaaccaggagactcgtcgagcgaggcttgctgccaagacaacaggccgattttgacgacttgtgcaatttaccagagctaacagagggaaatctcctgaagaatcttaaacacaggttcttgcagcaaaagatctacacatatgcagggagcatcctcgtggctattaaccctttcaaatttctgcccatctacaatccaaaatacgtgaaaatgtacgaaaatcagcagctgggaaaacttgaaccccacgtgtttgcattggctgatgtagcttactatacaatgctgcgaaagcgcgtgaatcagtgcattgtcatctcaggcgagtccggcagcggaaaaactcagagcacaaattttctcatccattgtcttacggctctgtctcagaagggatatgcatcaggggttgagaggaccatcttgggcgctgggcctgtcctggaggcattcggtaacgcgaagactgctcacaacaacaattcttcgaggtttggaaagttcatccaggtttcctatcttgagagcggaatagtcagaggcgctgtggttgagaaatacttgttggagaagtctagactcgtgagccaggaaaaggacgagcgcaactaccacgtcttctactatcttttattaggcgtgtcggaagaggaaaggcaggagttccaactgaagcagcccgaagactatttttacttgaatcagcataatctcaaaatcgaagatggtgaagacctgaagcatgattttgaacgtctgaaacaggccatggaaatggtcggatttctccccgcaaccaagaagcagattttcgccgtccttagtgccatcctttatcttgggaacgtgacctacaaaaaacgagctaccgggagagaagagggtttggaggtgggcccacctgaagtattggacactctctctcagctgctgaaagtcaagagagaaatccttgtggaagtcttaacgaagcgcaaaaccgtgaccgttaacgacaagctgattcttccctactccttgtccgaggcaataactgctcgagacagcatggccaagtctctctatagtgctctcttcgattggatcgttctcagaatcaaccatgcactgctgaacaaaaaggatgtggaagaagctgtgagctgtctgagtatcggggtgctagacattttcggtttcgaggatttcgagaggaatagcttcgagcagttctgcatcaactacgccaatgaacagctccagtactatttcaaccagcacatcttcaaacttgaacaggaagagtaccagggcgagggtattacatggcacaatatcgggtatactgataacgtcgggtgcatccacctcattagtaaaaaacccacaggtcttttctatctcctcgatgaggagtccaatttccctcacgccacctcccaaacgctgctggctaagttcaaacaacaacacgaagacaataaatattttctgggcactccagtgatggagccagcctttattatccagcactttgcagggaaggtaaaatatcagattaaggattttagagaaaagaatatggactacatgaggcctgatattgttgctctgctgcggggttctgacagtagctacgtgcgggaacttatcggaatggatcctgtggctgttttccgttgggcagtgctgcgggctgcaatcagggccatggcggtgctgagggaagctgggcgtcttcgcgctgagagagcggaaaaggcagcagggatgagtagcccaggggctcagagccatcccgaagagctgcctcgcggagcatctaccccttctgagaaattatatcgcgatctgcataaccagatgataaagtcaattaaaggcctgccctggcagggcgaagaccctcggtctctgcttcagtcgttgtcccgcttacagaagcctcgcgcttttatcctgaagtcaaaggggatcaagcaaaaacaaatcattccgaaaaacctcttggacagcaaaagtcttaagcttattatctctatgactctgcatgataggaccaccaaatctctcctccatctacacaagaagaaaaagcctccaagcatctccgcccaattccagacgtccctcaacaagctattggaagccctgggtaaagccgagccgtttttcattcgctgtataagatcaaacgcggaaaagaaagagctatgttttgatgacgaactggtgttgcagcagctgcgctacaccggcatgctagaaaccgtaagaatacggcgaagtgggtacagcgcaaagtatacgtttcaagatttcactgagcagtttcaggtactcctgccaaaagacgcccagccatgcagggaggtcatatctactcttctggaaaaaatgaaaatcgataaaagaaactaccagatagggaagactaaagtcttcctgaaggaaaccgaaagacaggcactgcaagaaacattacatcgtgaagtagtcagaaagatcctgctgctccagagttggttcaggatggtcttggaacgacggcacttcctgcagatgaagcgcgctgccgtgactatccaggcctgttggaggtcgtaccgcgtgagacgcgcactggagagaacgcaggccgctgtttacctccaagcctcctggcggggatactggcaaagaaagctttaccggcaccagaagcagagcataattaggcttcagtctctgtgccgaggacatctacagcgcaagtccttctcccaaatgatctccgagaagcagaaggcagaggaaaaagagcgggaggccctggaagctgccagggccggagccgaggaggggggtcagggtcaagctgccggaggacaacaggtagcggagcagggaccagaacccgcagaggacggcggacacttagcgagcgagcctgaggtgcagccatcagatagaagtccgttggaacattcgtctccagagaaagaggccccatccccagaaaaaacgttgcctccacagaaaacagtggccgcagaaagtcacgaaaaggtaccctcttctcgtgagaagagggaatcccgccgacaaagaggtcttgaacatgtgaaatttcagaataaacacattcagtcttgcaaagaggagagcgcattgcgagagccctcgagacgggtgacacaggaacagggcgtgtctctgctggaggacaagaaagaatctagggaggacgagactctgttggtagtggagacagaagccgaaaatacctcccagaagcagcctacggagcaaccacaggctatggcagtaggcaaggtgagtgaggagaccgagaagaccctcccttctggttcccctaggccaggccagctggaacgacctacttctctggccctcgattcccgagtcagcccacctgcccctggcagcgctccagaaacgccagaggataagtcaaaaccctgtggtagtccccgagtgcaggagaaaccagactcacctggcggaagcacccaaattcagcggtacttagacgccgaacggctggctagcgcggtggaactctggaggggtaagaaactggtggctgccgcttctccctccgccatgttaagccaatccctggacttgagtgatcggcacagagcaaccggagctgcgcttaccccaaccgaggagcgcagaacatctttctctacaagtgacgtgtctaagctccttcccagcctggccaaagcgcaacccgctgctgaaactacagatggcgagaggtccgccaagaagccagctgtgcaaaaaaagaagcccggagacgcatcaagcctccctgatgccggattaagtcccggatcccaagtggactccaagtctacctttaaaagactatttcttcataaaaccaaggacaaaaaatactccctggagggcgcagaagagctggagaacgccgttagtgggcacgtagttttagaggcaactacaatgaagaagggactggaagctccatcaggccaacagcacagacatgccgctggcgaaaaaagaactaaggaacctggcggtaagggcaaaaagaatcgcaatgtcaagattggcaaaatcactgtcagcgagaagtggcgcgagtccgttttcaggcagatcacaaatgcaaacgagttaaagtatctcgacgagtttctgttaaacaagataaatgacctccgttctcaaaaaacccctatcgaaagtttgttcattgaagcgaccgagaagtttcggtcaaacataaagactatgtattccgtgccaaatggcaaaatccatgtgggctacaaagacttaatggagaactatcaaatcgtagtaagcaacttggcaaccgaaagagggcagaaggatactaatctagtcctgaacttgtttcagtccctcctggacgaatttacccggggatacacgaagaacgattttgagcctgtcaagcaaagcaaggctcagaagaaaaagaggaaacaagaaagggcggtgcaggaacacaatggccacgtgtttgccagctaccaagtttccatcccacagagttgtgagcaatgtctctcatatatctggctaatggacaaagctctcctttgttctgtctgtaagatgacatgtcacaagaagtgcgtgcataagatccaatcccactgctcttatacatatgggagaaagggcgaacctggggtcgagccgggtcacttcggcgtgtgcgtggatagcttgacatctgataaggctagcgtgcccattgtcctggagaaactgttggagcacgtcgaaatgcatggactgtacacggagggcctttatcgcaaatccggcgctgctaacagaacccgtgagctcaggcaagccctacagactgacccggcagcggtcaaactcgaaaacttcccaatacacgctattactggcgtgctgaaacaatggctgcgcgaactgccggaacctctcatgacctttgcccagtacggcgatttcctgcgcgctgtagaactaccagagaaacaagaacaactcgccgcaatctacgctgtgcttgagcacctcccagaagctaaccacaactctctcgagaggctgatattccacctcgttaaggtcgctctccttgaagacgttaacagaatgtctcccggagccctggccataatatttgcgccttgcttgttacgctgtcccgacaattctgatccactcacctcaatgaaagatgttctgaagataaccacatgcgtcgagatgctgataaaggagcaaatgagaaaatataaagtgaagatggaggagatcagccagctggaagctgcagaaagcattgcgttccgtcgtctaagtctactcagacaaaatgcaccctggcctctgaagttaggtttttctagcccgtacgaaggcgtcctcaataaaagccctaagacacgggacattcaggaggaggaactcgaggtgctcctcgaagaggaggccgctggcggtgacgaggaccgggaaaaggagatactgatcgaacggatccaatccatcaaggaggaaaaagaggacatcacttaccgtctgcccgagcttgatcccaggggctcagacgaagagaacctggactccgagacttcggcctcgacggagtcactgctagaagaacgggctggcagaggagcctccgagggccagtatta

SEQ ID NO: 231609 - DNA, 519 bp, synthetic construct
  misc_feature 1..519: note = Description of Artificial Sequence: Synthetic coding sequence
  source 1..519: mol_type = other DNA
atgagttcaaaaaaggctaaaaccaagaccaccaagaagagaccacagcgagcaacctcaaacgtgttcgcaatgtttgaccaatcgcaaattcaagagttcaaggaggcatttaatatgatcgaccagaatcgcgacggctttatcgacaaagaggatctgcacgacatgttggccagcttgggtaaaaacccaacagatgcctatttagatgccatgatgaatgaggcaccgggtcctattaacttcactatgttcctgacaatgttcggcgagaagttgaacggtaccgatcctgaagatgtcattcggaatgcatttgcttgctttgatgaggaggcaactgggactatccaagaggattacctcagagagctgctgacaactatgggagacaggttcacggatgaagaggtggatgagctgtaccgcgaagctcccatcgataagaaagggaattttaattacattgagttcactcggatccttaaacatggtgccaaggacaaagatgactag

SEQ ID NO: 231610 - DNA, 1791 bp, synthetic construct
  misc_feature 1..1791: note = Description of Artificial Sequence: Synthetic coding sequence
  source 1..1791: mol_type = other DNA
atggcaaccgagaatggagcagtcgagctggggattcaaaaccccagcacggacaaagcccctaaagggccaactggcgagaggccacttgcggcaggaaaggatccaggcccacccgaccccaagaaagctcccgacccacctaccctgaagaaagatgcgaaggctccggcttcagaaaagggcgacggcacactggcacagccgagcacctcgagtcagggtcctaagggtgagggtgatagagggggaggacccgcagagggaagtgcaggtcctcccgcagctctgcctcaacagaccgccaccccagagacaagcgtaaagaagccgaaggctgagcagggcgcaagcggctctcaagatccaggcaaacctagggtgggaaaaaaagctgcagaaggtcaggctgccgcacggaggggcagtcccgcatttctccattcaccaagctgccccgctatcatatcaagcagtgagaaactcctggcgaaaaagcccccttctgaagcttcagaactgacattcgaaggcgttccaatgactcactcccccactgacccaaggccagccaaggccgaggaaggaaaaaatatacttgctgaaagccaaaaagaagtcggggaaaagacccctggccaggcaggccaggccaaaatgcagggagacacaagtcggggaattgagtttcaggcagtgcctagtgaaaagagcgaggtgggtcaggcgctatgcttgaccgcccgagaggaagattgcttccagatactggacgactgcccccctccgcctgccccttttccccatcgaatggtagaattacgaactgggaatgtgagctcggagttctctatgaattcaaaggaggcccttggaggcggtaagttcggggcagtttgcacgtgcatggaaaaagcaacagggctcaaactggccgctaaggtgataaaaaaacagactcccaaggacaaggagatggtgctgctagaaatcgaggtcatgaaccaattgaaccatagaaacctgatccaactgtacgccgctattgagactccacacgaaatagttcttttcatggagtacattgagggcggtgagctgttcgaaaggatcgttgacgaagactatcatctgacggaggtggacacaatggtcttcgtgcgtcaaatttgcgatggaattctgttcatgcacaaaatgcgggtgctgcacttagacctgaaacccgaaaatattctgtgcgtgaacacaaccgggcacctggtgaaaattattgacttcgggttggccaggaggtacaatcctaacgaaaagctgaaggtaaattttggtaccccagaattcctgtcccctgaggtagtcaattatgatcagatctctgacaaaaccgacatgtggtccatgggggtgatcacgtacatgttattgtcaggtctaagcccattcctgggggacgacgatacggaaacattgaacaacgtcctaagcggcaactggtattttgacgaggaaacgttcgaagcagtgtccgatgaagctaaagactttgtgagcaatctgatagttaaggatcagcgagccaggatgaacgctgcacagtgcctcgcgcatccctggcttaataatctcgcagaaaaggcgaaaagatgcaaccgcagactgaagtctcagattcttctgaaaaaatacctgatgaagagaaggtggaaaaagaactttatcgccgtgagtgcagcaaacagatttaaaaagatctcgtcctccggcgctctaatggctctgggcgtatag

SEQ ID NO: 231611 - DNA, 1791 bp, synthetic construct
  misc_feature 1..1791: note = Description of Artificial Sequence: Synthetic coding sequence
  source 1..1791: mol_type = other DNA
atggccacggaaaatggcgctgtggaattggggattcagaatcctagtacagacaaagctcctaaggggcctacgggggagaggccactcgctgccggaaaagacccaggcccaccagacccaaagaaggcacctgaccctcccacgctgaagaaggatgcgaaagcccctgcctcagaaaagggagatgggactctggcccaaccctcaacatcctcacaagggcctaagggcgaaggagatagaggcggaggtcctgccgaaggcagcgctggaccccctgccgctcttcctcagcagacagccactccagaaacatctgtcaaaaagccaaaagccgagcagggcgcatcaggctctcaggaccctgggaagcccagggtaggtaagaaggccgctgagggccaggctgcagccaggcgcggatccccagccttcttacattcaccgtcatgccccgctatcatttcaagctcagagaaactacttgctaagaaacccccttccgaagcaagcgaactgacgttcgaaggggtgccgatgacccacagccccactgatcccaggcccgcaaaagccgaggaggggaaaaacattctagcagagtctcagaaggaagtcggcgaaaagactcccggacaggctggccaagccaaaatgcagggagatacttcccggggaatcgagttccaggcggtcccgtctgagaagagcgaagtagggcaggcgctctgtctgaccgccagagaggaggactgtttccagattctggacgattgtcctcctccccctgctccattcccgcatcgaatggtggagctgaggacagggaacgtgtcaagtgagttctcgatgaatagcaaggaggccctgggcggtgggaaatttggggctgtctgcacatgcatggagaaggccaccggcctcaagcttgctgccaaggtgattaagaaacaaactcctaaggataaagagatggtactgctggagattgaagtgatgaatcaactcaaccatcgcaatctgattcaattgtacgccgctatcgagacccctcacgagatcgtcctcttcatggagtacatcgagggcggagaactgtttgagaggatcgtggacgaagactatcacctcactgaggtggatacgatggtgttcgtgcgccagatatgtgacggaatcctgtttatgcataagatgcgggtgctccatcttgatctgaagccagagaacatcctctgtgtgaacacaaccggccatcttgtgaaaataatcgatttcggtttagctcgccgatataatcccaacgagaagctgaaggtcaattttggcacgccggaattcctgagtcctgaagttgtaaattatgatcagatctcagacaaaacagacatgtggagtatgggggttattacatacatgctcctgtctggtcttagccccttccttggcgacgacgacaccgagaccctcaacaacgtgttatctggcaactggtattttgatgaggagacctttgaagccgtgagtgacgaggcgaaagatttcgtttccaaccttatagtcaaggaccagcgggctagaatgaatgcagctcaatgtctggcacatccctggcttaataacctggctgagaaggcgaagcggtgcaatcgccgattgaagtcccagattctcttgaagaaatacctcatgaagcgtaggtggaagaaaaacttcattgccgtgagcgcagccaacagatttaagaaaattagtagttctggcgctttaatggcccttggcgtatag

SEQ ID NO: 231612 - DNA, 2460 bp, synthetic construct
  misc_feature 1..2460: note = Description of Artificial Sequence: Synthetic coding sequence
  source 1..2460: mol_type = other DNA
atgagcgggacgtctaaagagtctcttggccatggcggactgcctggattgggcaagacttgcctcaccacaatggacaccaagctgaacatgctgaatgagaaagttgaccagctgcttcactttcaggaagatgtgaccgagaaactccagagcatgtgccgagatatggggcatctggagcgtggcttgcatagactggaggcttcacgagcaccaggccctgggggagccgacggagtgccacacatcgacacgcaggccggatggcctgaggtgttggaacttgtaagagccatgcagcaggatgcggcacagcatggagcaagactcgaagccctgtttcgcatggtggcagcggtggaccgggcaatcgcccttgtgggagccacgtttcagaagtccaaggtggctgactttctgatgcaggggagggtgccctggagaaggggctctccaggagattctccagaggagaataaggagagggtggaagaggaaggcggtaagccaaagcatgtgctgtccacatccggggtgcagagcgatgcccgtgaaccaggggaagaatcacaaaaggctgacgtactggaaggaactgctgaacggctgccgccaattcgcgcttctggtctgggagcagatcctgctcaggccgtggtgtcccctggacagggcgatggagttcccggaccagctcaagcctttcccggtcacctcccccttccaacaaaagttgaggcaaaggcccctgagacaccaagcgagaatcttagaacagggcttgagctggctcctgcccctggcagggtgaacgtggtcagcccatctctcgaagtcgcacctggagctggacagggtgcatcatcctcccggcctgacccggagcccctggaggaaggcacaaggctcactccgggtcctggtccacagtgtccaggcccaccagggctgcccgctcaggcccgtgctacacatagcgggggagagaccccgccacggattagcatccatattcaagaaatggatacaccaggcgagatgttgatgacagggaggggatctctggggccaacactcaccaccgaggctccggcagcggcacagcccggaaagcagggaccacctgggaccgggcgatgcttacaggcacccggaaccgagcctggagaacagaccccagaaggggcacgcgagctgagccccttgcaagagagcagctcacccggaggcgtcaaagcagaagaggagcaacgcgctggggctgaaccaggcacccgcccttctctcgctaggtcagacgacaacgaccacgaggtgggagctctgggactgcagcagggcaaaagtccaggcgcaggtaatcccgaacccgaacaggactgtgccgcacgcgcacctgtgcgggcagaggcagtgagaaggatgcctcctggcgcagaggcaggatccgtggttctggacgacagcccagcaccacccgctccgttcgaacatcgcgtcgtctctgtgaaggagacctccatcagcgcagggtatgaagtgtgtcagcatgaggttcttgggggaggacgcttcggacaggttcaccgatgcacggagaagtcaacaggcctgcccctagccgctaagataataaaggtcaaatccgccaaggaccgagaagatgtgaaaaacgagatcaacattatgaaccagctgtcgcacgtcaatttgatacagctgtacgacgcctttgaaagtaaacactcatgcaccctggttatggagtatgtggacggtggcgaattattcgaccgaattactgatgaaaagtaccacttaacagagttggatgtggtcctttttacccgccagatttgcgaaggcgtgcactacctgcaccaacactacattttacaccttgatctcaagcctgagaacatactctgcgtcaatcaaaccggacatcagatcaagatcatcgacttcgggctggctcggagatataagcctcgggagaaactcaaggttaattttgggacacctgaattcttagcgccagaggttgttaattacgaatttgtgtcttttcctaccgacatgtggtctgtgggggttattacatatatgctcctctccggcctgtccccttttctcggagaaactgatgcagaaacaatgaacttcatcgtcaactgtagctgggacttcgatgccgacactttcgaaggtctgtctgaagaggctaaggattttgtgtctaggctgctggtgaaggagaaatcttgtcgaatgtccgcaacacagtgcctgaagcatgagtggctgaataacctgccggctaaagcctcacggtcaaagactaggttaaagagtcaactcttgctgcagaagtatatcgcacagagaaagtggaagaagcatttttacgtggtgaccgccgctaatagactccgaaagttcccgactagtccatag

SEQ ID NO: 231613 - DNA, 1437 bp, synthetic construct
  misc_feature 1..1437: note = Description of Artificial Sequence: Synthetic coding sequence
  source 1..1437: mol_type = other DNA
atggatacgccgggagaaatgttgatgactgggcgaggttcactaggcccaaccctcacaaccgaagctccggctgctgctcagccgggtaagcagggaccgccaggaacaggacgatgcctgcaagcacccggaacagagcctggcgagcagacccctgaaggtgccagggagctcagccccctccaagagtcttctagccctggaggggtcaaggctgaagaggagcagagggcgggagctgaacctgggacacgaccaagtcttgcacgttctgacgataatgatcatgaggttggcgctctcgggttgcagcagggcaagagccctggtgccggtaaccctgagccagagcaggactgcgctgccagggccccagtgagggccgaggccgtaaggcgtatgccacctggggctgaggccggttctgtggtgcttgacgattctcccgctcctccagctccctttgagcatcgggtggtctcagtgaaagagacttcaatctctgccggatacgaggtctgtcagcatgaagttctcggcggaggcaggtttggccaggttcacaggtgcacagaaaaatccaccggtttaccgttagcggctaaaattattaaagtgaagtcagccaaagacagagaggacgtcaagaatgagatcaacataatgaaccagctgagccacgtcaacctcattcagctgtacgacgcgttcgagtctaagcactcttgcacattggtcatggagtacgttgatggaggggaactcttcgaccgaatcacagacgagaagtaccacttaactgaactcgacgtggtgttgttcactcggcagatatgcgaaggcgtgcattacctgcatcagcattacatactccacctagacctcaagcccgagaacattctctgcgtgaaccagaccggccatcagattaagatcatcgactttggtctggccaggaggtataaacctcgggagaaattgaaagttaattttggaactcccgagttcctggctcctgaggttgtgaactacgagttcgtcagtttcccaaccgatatgtggagtgtaggcgtcattacatatatgctcttgagtggcttgagcccgttcttaggagagacagatgctgaaactatgaacttcattgttaactgttcatgggactttgacgctgacacattcgaggggctgtcagaagaggcaaaagactttgtgagccggttactcgtcaaggagaagagctgtaggatgagtgctactcagtgtctcaaacatgagtggttgaataacttgcccgctaaggcctctaggtctaagacccgcctgaaatctcagctgctcttacagaagtacattgcacaacggaaatggaaaaaacacttttacgttgttacggccgctaaccgacttcgcaaattccctacgagtccttag

SEQ ID NO: 231614 - DNA, 4212 bp, synthetic construct
  misc_feature 1..4212: note = Description of Artificial Sequence: Synthetic coding sequence
  source 1..4212: mol_type = other DNA
tgactgctgctagaaagctgtgagaaggagaagcaggcacttctgcagaatctgaaggaggtcgaggacaaagcctccgcctacgaagatcaactccagggacaagcacaacaggtcgagaccctccagaaggagaagcttagcgcaacatttgagggtagtgaacaggtgcatcagctggaggagcagctggaggcccgagaggcttccgttcgccgtctggctgaacatgtgcaatccctatgtgatgagcgagatctcctgcgccagcggttccaggagctaaccgagagggtggccacctcagacgaggatgtggctgaactgcgcgaaaagcttcggcgacgcgaggctgataaccagagcctggagcatagctaccagagagttagcagtcagctccagtcaatgcatactctcctgcgagaaaaggaggaagagttggaacgaatcaaagaagcacacgagaaggtgctggaaaaaaaggagcaagacttgaacgaggcgctggtgaagatggtggcactcggaagcagcctggaagagactgagatcaaactccaggccaaggaagaaattctgcggaagttcgccagtgaatcacccaaagacatggaggagcctcggtcaaccccggaggagactgaaagggacggtactctacttcctggacagcctgtgcaggcgacaagggctcccctcgggttaccccacactcgattggaagacgaggatgaggacctcggggcacccccaggggaagaatatggcgatggctctccgtctcgtgaggattcaatggtgccccctaagtccgtagaggtgctggaccgggagggccaccagcaggggacagcgaagctggatcagggagctcctggagtcaagcgtcagcgcatcagatttagcacgatacagtgccagcggtatatccaccccgagggctcggagaagacctggacatcatcaacatccagtgatacttcccaggaccgctctccaagcgaggagagtatgtcgagtgagccagcgccttccgtgctgccagccaccggggattctgatacctatttgtccattatacattccctggagaccaagctgtatgttactgaagagaagctgaaagatgtgaccgtgagactagagagtcagcagggtcaatccagggaggccctgcttgccctacaccatcaatgggcgggaaccgaggcccaattgcgggaacagctgcgcgcaagcctgctccaggtgggggctttggccagccagctggagcaagagagacaagaacgggctcggagagttgaaggtcacgtcggggagctgggcgatttccaggtgaaaaactctcaggctctgatgtgtctcgagaattgcagagagcaactgcgctccttgcccagagcttctcaggaagacgagcaggatgctagggcagcctctctggcctccgtggagtctgcgctggtttctgctatacaggctcttcaacactggccagctccagcccatggcggagccagggcacagctagagacaggtggcactgaggaaaatggcaagcccgcatcgttgcagcagtgttcccagtctgaactcactgaacaagaacaggtgcgtctgctctctgaccaaattgcgcttgaagcatcattaatatctcagattgctgatagcctcaaaaacacaacttcagacgtgtctaggatgcttcacgagatctcttggtctggccaacctccaatggagtccgccggtgcacctgtggacacgtgggctcgaaaggtgctcgtcgatggtgaattttggagtcaggtggagtcccttagaaagcacctgggaacattaggaggagaggcggtaggggcaagcggggatggtcagcagagtatacctcaggggctggcccctattctggctaacgccacttgggttcgcgctgaactctcctttgctacgcaaagcgttagagagtcctttcaccgacggctgcagtccatccaggaaactctgcgcggaactcagaccgcgctacgacaacacaaatgtctgttgcgggaaattctgggggcttaccaaactcctgatttcgaacgggtcatgcagcaggtgctcgaagcgctgaggttgcccgctggccatgaagatggggttcagttgagctgggacctgtcaccgttaggagaagtactggggagagattctgactccagccaggaaccctttgacgtcagcgatcagagcccgggagcattcgtagctatccaagaagagctcgctcagcagctgaaggagaaggcttccctgctggaggaaattgccgcagctctgccctccttaccccctgtggagagtctccgcgactgtcagaaactgctccaggtatcccaatcgctgagctataacacctgtctggggggtctgggtcagtacagttctttgctcgtgcaggacgccattatccaggcccaggtatgttatgctagctgcagaatcaggttggagtatgagaaggagcttcagttgtgtaaggagagttggcagaccagggagccaagctgttcggaacaagcacaagccgctcgcgcacttcgagaggagtatgaggagctgctgagaaagcaaaagtcagaatacttggatgtcatcgctatcgtggaacgcgagaatgctgagcttaaggcaaaagctgcacagttagatcaccagcagcagtgcttagaggacgccgaatcgaagcacagtatgagcatgttcaccttgcgcggtaggtacgaagaagagatacgctgtgtggttgaacaacttacccgcaccgaaagtactctacaagcggagcggagccgggtgttatcacagttggacgccagcgtccgggatcggcaggatatggaacgtcaccacggggagcagatccagactctggaggaccgctttcaacttaaagttagagaactgcagactatccatgaggaggagctgagaacccttcaggagcattattcccagtctctccgatgtctccaggacactctgtgtctccaccagggtccccaccccaaagcgcttcccgctcctgctcccaattggcaggccacacagggtgaggcagactccatgaccggcctccgggaacgcattcaggaactggaggcccagatggacgtgatgagggaagagcttggacataaagacctcgagggcgacgcagcgactttacgggaaaaatatcagcgcgacttagaatcccttaaggccacctgcgaaagaggctttgcggcaatggaggagacgcatcagaagaagatcgaggatttgcaacgccaacatcagcgggaactcgaaaaactgcgggaggagaaggatcgactccttgccgaggagacagcagcaacaatctctgccatcgaagccatgaaaaacgcacatcgggaagaaatggaaagggagctggaaaagagtcagagatctcagatcagttccgttaatagcgatgtcgaggcattgcgccgacagtatcttgaagaactgcaatcagtccagagggagctggaagtgctgtccgagcagtatagccagaaatgtttggagaacgcccacctcgcccaggccctggaggcagagaggcaggcactgaggcagtgccaacgggaaaatcaggagcttaatgctcataatcaggaacttaataaccgcctggccgcagagattacgcggctgcgtacattattaaccggcgacggcggtggcgaagctaccggttccccactcgcccagggaaaggatgcgtacgagcttgaggtcctgcttcgagtcaaggaatctgagattcagtacctcaagcaagaaatatcttcgctaaaggacgaactgcagaccgctttgagagataaaaaatatgcctctgacaagtacaaggatatatacactgagctctccatagcgaaagccaaggccgattgtgatatcagcagactgaaagagcagctgaaggctgcaacggaagccttgggcgagaagtctccagactccgcgactgtaagcggctacgacattatgaagagtaagagcaaccccgatttcctaaaaaaggaccggtcatgtgttacaagacagctgagaaatatccgctccaagtcgcttaaagaaggactgacagttcaagaacgcctgaagttgtttgagagcagggacctaaaaaaggactag

SEQ ID NO: 231615 - DNA, 3078 bp, synthetic construct
  misc_feature 1..3078: note = Description of Artificial Sequence: Synthetic coding sequence
  source 1..3078: mol_type = other DNA
atgtctgccgcaaaggaaaacccttgcagaaagtttcaggccaatattttcaataagagtaagtgtcaaaattgcttcaagccgagagagagccatctgctgaatgacgaggatctgacccaagcaaagcctatctacgggggttggctcctattggcgcctgatgggacagactttgataacccggtccacagatctcggaaatggcagcgcagattcttcatcctgtacgagcatgggctgctgaggtatgccttagacgagatgcccaccaccttaccccagggtacaatcaacatgaatcagtgtactgatgtggtggatggtgaaggtcgtaccggccagaaatttagtttatgcattctgactcctgaaaaagaacatttcattcgggctgagactaaggagattgtatcaggatggctggagatgcttatggtttacccacggactaacaagcagaatcaaaagaagaaacggaaagtggaaccacctacaccccaggagcctggcccagcaaaagtagctgttacctcaagctctagttcctctagcagctcttcttcaatcccttccgcggagaaggtgcccactactaaatctacattgtggcaggaagaaatgaggaccaaggatcaaccagatggatcgtccctgagcccagcgcagtctccttcccagagtcagcccccagccgctagttcgcttagagagcctggactggagtccaaagaagaagagagtgccatgtcatccgatagaatggactgtggaaggaaagtaagggtcgaatcaggatacttctcactcgagaagaccaagcaggatctgaaagcggaagagcagcagctgcccccaccactgtcccccccaagccccagcacccccaaccatcggagatcccaggtaattgaaaagtttgaagcattggacattgagaaggccgagcatatggagaccaatgctgttggacccagcccaagctcagatacccgacagggcaggagcgaaaaacgcgcattcccgcgaaagcgcgacttcacaaacgaagctccgcctgctcctttgccggatgcttcggcatcccctctgtcacctcacagacgagccaaaagcctggaccgcagaagcactgaaccatccgtgacccctgatctcttaaattttaagaagggatggttaacaaagcagtatgaagacggtcagtggaaaaagcactggttcgtcctcgccgatcagtcacttcggtactacagggacagcgtggcggaggaagccgcagacttggatggtgagatagatctatccgcctgttatgacgtgaccgagtaccccgtgcagcgcaattatggcttccagattcacacaaaagagggcgaattcacactgagtgctatgacctcgggcattcgccgtaattggatccagacgataatgaaacacgtacaccccacaaccgctcccgatgtgacttcctctctccccgaggaaaagaacaaatccagctgcagctttgaaacctgtcccaggccgacagagaagcaagaggcggagctgggggagcccgatcccgaacagaaacggtccagggctcgggagcgaaggcgagaaggcaggtccaaaacttttgattgggccgaattccgaccgatacagcaagctttagcacaggagagagtaggcggtgtggggcctgcagatacccacgaacccttgcggcctgaagccgagcccggtgaactggaaagggagagagcacgcaggagggaagagaggaggaaaagattcggaatgttagacgccaccgacgggccaggcaccgaggatgcggctctgcgtatggaagtcgaccgaagtcccggacttcccatgtctgacttaaagacccacaacgtccacgtggagatcgagcagcggtggcaccaggtagaaacaactcccttgagagaagaaaaacaggtgcctatagctcctgtacacctttcctcagaggacggcggagaccggctctctacccacgaactcacaagtctgttggagaaagaactggaacaatcccagaaggaggcaagtgatttattagaacaaaaccggctgcttcaggatcagctgagggtggcgctcggtcgagagcagagtgcaagggaaggatacgtgctgcaggccacatgtgaaagaggctttgcagctatggaggagacgcaccagaaaaagatcgaagaccttcagagacagcatcagcgggaactcgaaaagttgagagaggaaaaagacagactgcttgcggaggaaaccgcggctaccatctcggctatcgaggctatgaaaaacgcacatcgcgaggagatggagagagagttggagaagagtcagagatcacagatttcctccgtgaattcagacgtggaggctttacgccgtcagtatctggaggagcttcagagcgtgcagcgggaactggaggtgttgagtgaacaatatagtcagaagtgtctggagaatgcgcaccttgctcaagctctcgaggccgagcgacaggccctcagacaatgccagagggagaatcaggagctaaacgcccacaatcaggaacttaacaacaggctcgctgccgaaattactagactgcgaaccctgctcacgggggacggcggaggagaagccaccgggtccccactggctcagggtaaagacgcgtatgaactggaggttctgctgagagtcaaagagtcggaaatccagtacttaaagcaggaaattagtagcctgaaggacgagctgcaaacagcacttagggataaaaaatacgcttccgataagtacaaagatatctacacagagcttagcatcgctaaggctaaggcagattgtgacatttcccgtctgaaggagcagctgaaagcagctacggaagccctgggtgagaaaagtccagacagcgctactgtcagtggatacgatatcatgaagtccaagtctaacccagatttcctgaagaaagacaggtcatgtgtcactcggcaactaagaaacatccgtagcaagtcagttatcgaacaggtgtcgtgggacacgtag

SEQ ID NO: 231616 - DNA, 3078 bp, synthetic construct
  misc_feature 1..3078: note = Description of Artificial Sequence: Synthetic coding sequence
  source 1..3078: mol_type = other DNA
atgtctgccgctaaggaaaacccgtgccggaaattccaagcaaacatcttcaacaaaagtaagtgccagaactgtttcaaacctagagagtctcatctgctaaacgacgaggacctgactcaggcgaaacctatatacgggggttggctcctactcgccccagacggaactgatttcgacaatccggttcatcgcagtcgcaagtggcaacgcagattcttcatcctctacgaacatggtctgctgcgatatgcattggatgaaatgcccacaactctgccacagggcactatcaacatgaatcagtgcacagatgtcgtggacggagaaggacggacaggccagaaattttctctctgtatactgacaccagagaaagaacactttatccgcgctgaaaccaaagagatagtgtctggctggctcgagatgcttatggtatatcccagaacaaacaagcagaaccagaagaaaaagcgaaaggtagagccaccaaccccccaggagcctggccctgcaaaggttgccgtcactagttcctcttccagctctagcagcagttcatccattccctctgccgagaaagtccctactaccaaaagcaccctctggcaggaagagatgaggacaaaggaccagcctgacgggtctagcttaagcccagcccaatccccttcccaatcacaacctccggctgcatcttcactgagagaaccgggtctggagagcaaggaagaggagtctgcaatgtcttcagatagaatggattgcggtcgcaaagtacgtgtggaatccggctacttcagcttagagaaaacaaagcaagacttgaaagccgaagagcagcaactccctccaccgttatcccctcctagcccttccactcctaaccataggcgatctcaggtaatcgaaaagtttgaggccctggatattgaaaaagccgaacatatggaaactaacgcggtgggtccctcaccgagttccgacaccagacaagggaggtcggagaagcgcgctttccccagaaaacgggatttcacgaacgaggctcctccagctcccctcccagatgcctccgcctctccactctcccctcacaggcgggctaaaagcctggatcggaggtcaactgaaccgtccgtgactccggatctgttaaattttaagaagggctggctcacaaaacagtatgaggacgggcaatggaagaaacactggtttgtgttagccgaccaatccctgcggtattatcgagactcagtggcagaagaggcagccgatctggacggagaaatcgacctatcagcatgctatgatgtgacagaatatcccgtgcagagaaactacgggttccagattcacaccaaggagggcgaatttactctatcggccatgacgtccggcatccggaggaattggatccaaacaatcatgaaacatgttcatccaactacagcccctgatgtcactagctccctgccagaagagaagaacaagtcctcgtgctctttcgagacatgccctaggcccacggagaaacaagaggcggagcttggagaacctgacccggaacagaaacggagccgagccagagagaggcgaagggagggcaggtcaaaaactttcgattgggctgagttccgacccatccagcaggcgctggcgcaggagcgggttgggggtgtcggacctgccgatactcacgagcccttaaggcctgaggccgagccaggcgaactggaacgcgagagagctcgcaggagggaggagcggagaaaaaggttcggaatgctggatgccaccgacggccctggcactgaggacgctgctctgcggatggaggtggaccgctctccagggcttccgatgtctgacctgaagacgcacaatgtgcacgtggagattgaacaacgatggcatcaagttgagacaacccctttgagggaggagaaacaagtgcccattgctcctgtgcacctgagcagtgaagatgggggtgacagactttcaacccacgaactaacttctttactggagaaagagctcgagcagtctcagaaggaggcgagcgacttgcttgaacagaacaggctgctccaagaccaactgagagtcgccctgggcagagaacagagcgctcgggaaggctacgtgctccaggctacatgtgagcggggattcgctgcaatggaggagacccatcagaagaagatcgaggatctgcaaaggcagcaccaacgggagttggaaaaactgagggaagaaaaggacaggctcctggctgaagagactgctgctacaatttctgccatagaagcaatgaagaatgcacacagagaggaaatggaacgtgagctggaaaagtcacagaggagccagattagctctgttaatagcgatgttgaagccctgagacgacagtacctcgaagagcttcagagcgtgcagcgggagttggaggtcctgagcgaacagtattctcagaagtgtctggagaacgcacaccttgcccaagcactcgaagccgaacgccaagcattaaggcagtgccaaagggagaaccaggagttaaacgcacacaaccaggaattgaataatcggcttgctgccgagataacccggctgaggacactccttactggcgatgggggtggagaggccaccggttctcctctcgctcagggaaaagatgcctatgagttagaggtgttgttgcgagtgaaagagtccgagattcaatacctcaagcaggaaatctcgtctctaaaagatgagctgcaaaccgctctgcgagacaaaaagtacgccagcgacaaatacaaggacatctacaccgagctgtctatagccaaagccaaggccgattgcgacatctctaggttgaaggaacagctgaaggcagctaccgaagcgctcggagaaaaatcccccgatagtgcaacggtgtccggatacgatattatgaaaagcaaaagcaatccggactttctgaaaaaggacagatcctgtgtgacaaggcaactgcgcaatatccggtcgaaaagcgtcatagaacaggtgtcctgggacacctag

SEQ ID NO: 231617 - DNA, 192 bp, synthetic construct
  misc_feature 1..192: note = Description of Artificial Sequence: Synthetic coding sequence
  source 1..192: mol_type = other DNA
atgtccgcggctaaggagaatccctgtcgcaaattccaggccaacatcttcaacaagagcaagtgtcagaactgctttaagccccgagagtctcatcttcttaacgacgaggacctgactcagcagaatacccacccactggagatgaaaaggggagcacatatttacgatgcaaggatgttcagctgctag

SEQ ID NO: 231618 - DNA, 282 bp, synthetic construct
  misc_feature 1..282: note = Description of Artificial Sequence: Synthetic coding sequence
  source 1..282: mol_type = other DNA
atgtcggctgctaaggagaatccttgtaggaagttccaggccaatattttcaataagtcaaaatgtcagaactgtttcaagcccagagaatctcatctgctcaacgacgaagacctcacacaagccaagccaatctacggaggatggctgctccttgcacctgatggcaccgactttgataacccagtgcaccgatcccggaaatggcagcgcaggttcttcatcctttacgaacacggccttttgcggtacgcgctcgatgagatgatgagcagtcaatag

SEQ ID NO: 231619 - DNA, 3117 bp, synthetic construct
  misc_feature 1..3117: note = Description of Artificial Sequence: Synthetic coding sequence
  source 1..3117: mol_type = other DNA
atgagcgctgccaaggagaacccgtgcagaaagttccaagccaatattttcaataagagcaagtgccagaattgtttcaaacctcgtgaatctcacctacttaatgacgaggacctgacccaagccaagccaatatacggtggctggctgctcctggcaccagatgggacagacttcgacaatcccgtccaccggtccagaaaatggcagaggcgatttttcatcctgtacgagcacggtctacttcggtacgccctcgatgagatgccaacgacactgccacaaggcacaatcaacatgaatcagtgtactgacgtcgtggatggtgaggggcgtaccggccagaaattctccctctgcatactgacacctgagaaagagcatttcatccgggctgaaacgaaagagattgttagcggatggcttgagatgctcatggtataccctaggacaaataagcaaaatcagaaaaaaaaacggaaagtggagcccccaaccccacaagaaccgggtcctgccaaggtggccgtcacttcttcttcaagctcatcctcgtcttcaagctccattccatctgccgaaaaggtgcccacaacaaagagtacactatggcaagaggaaatgcggacaaaagatcagcccgatggtagttcccttagcccggctcagtctcctagccaaagccaaccacccgctgctagttctctgagagagcccggattagagagcaaggaggaggaatcagccatgagcagtgaccggatggactgtggtagaaaagtcagggtcgaatccgggtacttttcactggagaagaccaaacaagatttgaaggccgaggagcagcagctccctcccccactatctccgccatcgccctctacgcccaatcacaggcgcagccaggtgatcgagaaatttgaggcactcgacatcgagaaggcggaacatatggaaaccaacgcagttggtccaagcccgtcttccgacacaaggcagggcagatctgagaagagagcgttcccacgcaagagggacttcactaatgaagccccacccgctcctctgcccgacgcttctgccagtcccttatcgccacatcgccgagcaaagagtttggatagacggtccacggagcctagtgtgacaccagatttattgaacttcaagaaggggtggctcacgaagcagtacgaggatggccagtggaaaaaacactggtttgtcttggctgaccaatctctccggtactacagggacagcgtagcagaggaagctgccgatctcgatggcgagatcgacctgtctgcctgttacgacgttactgaatacccagttcaacgcaattacggctttcagatccacacaaaggaaggcgagtttaccttaagcgccatgacgtctggcattcggaggaactggattcagacgattatgaaacacgtgcatccgaccacggcgccagacgtgaccagctctctccctgaagagaaaaacaagagttcttgcagcttcgaaacttgtccccgtccaaccgaaaagcaggaggctgagctgggcgagcccgatcctgaacagaaaagaagcagggcgagagagcgcaggcgggaggggaggtctaaaacgttcgactgggccgagttccgtcctatccagcaggccctagcacaagagcgagtaggtggcgtcggcccagcagatactcacgaaccgctcaggccggaagcagagccaggcgagctggagcgggagagagccaggcggagggaagagagaaggaagcggtttggcatgctggacgcgaccgatggccctggaacggaggatgcagctttaagaatggaagtcgacagaagcccaggcctccctatgtcggaccttaagacccacaacgtgcacgtggaaattgaacagcgttggcatcaggtagagacaacccccctccgagaagaaaagcaggtgcccatagccccagtgcacctatccagtgaggatggtggggacagactttctactcacgagttgaccagcttgctcgagaaagaactagagcagagccagaaggaggcaagcgatctcctagaacagaaccgcctgcttcaggatcaactccgagtggctcttggtcgagaacaaagcgccagagagggatatgtgttgcaggcaacctgtgaaagaggattcgcagctatggaagagactcatcagaagaaaatcgaagacctacagcgacagcaccagcgggagttggaaaagctgagagaggagaaggacagactgttagctgaggagactgctgctaccatctcagcaatagaggctatgaagaacgcacatcgagaagaaatggaacgtgaactggagaaaagccagaggagccagatcagctccgtgaactctgatgtagaggccctgagaaggcagtacctcgaagagttgcagtcagtccagcgagaactcgaggtcctcagcgagcaatacagccaaaagtgcctcgaaaatgcccatcttgcccaggcactggaagccgaaaggcaggccctccgccagtgccagagggagaaccaagagctgaatgcacacaaccaggaattaaacaacaggctggcagcggagataacgaggttgcgaacccttctcacaggcgatggtggcggtgaagcaaccggcagcccattggcccagggaaaggacgcctacgaactggaggtgcttctgcgggtgaaggagtccgagattcagtatctgaaacaggagataagctcactgaaagatgagctgcagactgctctgcgagataagaaatatgccagtgacaagtataaggacatctatactgagctgtccattgcgaaggccaaagccgattgcgacataagcagattgaaagaacaattaaaggcagcgaccgaggctctcggcgagaagtccccggacagtgcaactgtgtctggttatgacattatgaagtcaaagtctaaccccgactttctcaagaaagacagatcatgtgtgacgaggcaactgcggaacatcaggtccaaatctcttaaagaggggctgactgtccaagagaggctcaagctgtttgagagtcgcgatctgaagaaagattag

SEQ ID NO: 231620 - DNA, 3276 bp, synthetic construct
  misc_feature 1..3276: note = Description of Artificial Sequence: Synthetic coding sequence
  source 1..3276: mol_type = other DNA
tagagattttccaccatccagtgtcagcgctacattcaccccgaaggcagtgagaagacgtggacatcctccacaagttcagatacctcccaggataggtcaccgagcgaagagtcgatgagttcagaacccgcacccagtgtcctcccagcaactggagattccgacacatacctatcaattatccattctttagagacaaagctttatgtgaccgaagagaaactgaaagatgttactgtccgcctcgaatctcaacagggacagagtcgcgaggccctgctagcgctccatcatcagtgggcaggcactgaagcgcagctgagagaacagctccgagctagtttactccaggtaggagctctcgccagccagttggaacaggaaagacaagagagagcccgaagagtggagggccacgtaggggagctgggcgatttccaggtgaagaacagccaagctcttatgtgtctggagaattgccgagagcagctgaggtctctccctagagcttcccaagaagatgaacaggacgcgcgagccgcttcgctggcgagtgtggagagcgcgttagtgtctgccattcaagccctccagcattggccagccccagcccatgggggagccagagcacaactagaaacagggggtacggaggagaacggcaaacctgccagtctgcagcagtgtagccagtcggaacttaccgaacaggagcaagtcaggctgctgagcgatcagatcgcactggaggcttctctgatatcccagattgccgattccctaaagaacaccacgtccgacgtgtcaaggatgctccatgagatctcatggagtgggcaaccacccatggaatcggcgggtgccccagtcgatacctgggcgagaaaagttcttgttgacggagaattttggagtcaagttgagtctctgcggaagcatctggggacccttggcggagaggccgttggcgcttcaggcgatggtcagcagagcatccctcagggccttgcgcctatcctggcaaacgcgacgtgggtaagggctgaactgagcttcgctacacaatctgtgcgggaatcctttcaccgccgtctccagtccatacaggagacacttagaggaactcagacagctctacggcagcacaaatgcctccttcgggagatactgggggcttatcagacgccggatttcgaacgggtgatgcaacaggtgcttgaagccctgcgactgccagctggacatgaagacggcgtacagctgtcttgggatctgtcgccactgggagaagttcttggacgtgactcagatagttcacaagaacccttcgacgtaagcgatcagtcaccaggcgcatttgtggcaatacaagaggaattggcgcagcagttgaaagaaaaggctagtctcctcgaggagatagccgctgccctgccgtctttacctcccgtggaaagcctacgcgattgccagaaactgctgcaggtcagtcaaagcctgagctacaatacctgcctggggggactgggccagtactcaagccttctggtgcaggatgcgattatccaagcacaggtgtgctacgcatcatgcaggataaggctagagtacgagaaagaactgcagttgtgcaaagaatcctggcagactcgagagccaagctgttccgagcaggcccaggccgctcgtgcgctgcgagaggagtatgaagagctgctccgaaagcagaaaagcgagtatctcgatgtcatcgcgattgtggagcgcgagaatgcggaattaaaggctaaagccgctcagctcgaccatcagcagcagtgtttagaagatgctgagagcaaacactccatgtccatgtttacactcagaggacggtacgaagaggaaattcgctgtgtcgtggaacaattaacccgtaccgaatctacactgcaggcagagcgatcccgcgttctcagccaactggacgcatcggtgcgagataggcaggacatggagcgccaccacggcgagcagatccaaactttagaggacaggtttcagctcaaggttcgggagcttcagaccatacacgaggaagagctgcgtactctgcaagagcactactctcagtccctacggtgcctgcaagacacgctgtgtctacaccagggaccccaccccaaggcgttacccgctcctgcaccaaattggcaggccactcagggcgaagcggattccatgacagggttacgcgagcgaatccaagaactggaggcccaaatggacgtgatgcgggaggagctgggtcacaaagaccttgagggagatgctgctactctccgcgagaaataccagcgggacctggaaagcttaaaggctacttgtgagcggggtttcgcagcaatggaggagacccatcaaaaaaaaatcgaggatctgcagcgccagcatcagcgagaactagaaaagctgagagaggaaaaggatcggctgctggcagaggagaccgctgctactattagcgccatcgaggccatgaagaacgcgcaccgggaagagatggaaagagaactcgagaagtcccagagatcccagatatccagtgtaaattctgacgtggaggccctgcgcaggcagtacctcgaagagctccagtcagttcagcgggaattggaggtgttgtccgagcagtattctcaaaagtgcctagaaaatgctcatctcgctcaggccttggaggccgaacgacaggcactgaggcagtgccaacgcgagaaccaggagctgaacgcccacaaccaagagttgaacaatcggctagcggctgaaattacacgtctccgaacactgctgactggcgacgggggtggagaggccaccggtagcccactggcgcaaggcaaagacgcctacgagctggaggtgttattaagggtgaaggagtccgagattcagtatctgaagcaggagatttctagcctcaaagatgaactgcagacagctcttcgcgataagaagtatgccagcgacaaatataaggacatttacacagagttgagtatagctaaagccaaagccgattgtgacatttcaaggcttaaggagcagttgaaggccgctaccgaagcgttaggcgaaaagagtcctgattccgccacagtctccggatacgacatcatgaagagcaaatctaaccccgactttctgaaaaaggaccggagctgcgttactagacagctcaggaacatccggtctaagagcgtcatcgaacaggtgtcctgggatacttag

SEQ ID NO: 231621 - DNA, 840 bp, synthetic construct
  misc_feature 1..840: note = Description of Artificial Sequence: Synthetic coding sequence
  source 1..840: mol_type = other DNA
tgacaggaagccgagttaggcgagccggaccccgaacagaagcgctcgcgagcacgggagagaaggcgcgagggacgcagcaagacctttgactgggcggaatttagaccaatccagcaggcactcgcgcaggagcgagtaggcggagtgggcccagcagatacgcacgagccccttagacctgaagctgaacccggtgagttggaacgtgagcgggctcgaagacgcgaagaaaggcgtaagaggttcggaatgctggacgcaacagatggacccggaaccgaggatgccgctttaaggatggaagtcgatagaagcccgggactcccaatgtcagaccttaaaacacacaatgtgcacgtggaaatcgaacaacggtggcaccaagtggaaactacccccctgagagaagaaaaacaggtgcccatcgcccctgtgcacttgagtagtgaggatggcggtgatcgactctctacacacgagctgacgagtttgttagagaaggagctggagcagagccaaaaggaggccagcgacctgctggagcaaaatcgtctgctccaggaccagctgagggtcgccctgggacgggagcagtctgcccgagaaggctacgtgctccaaaccgaggtcgccgcatcaccctccggagcttggcaaaggctgcatagagttaatcaggacttgcagagcgaattggaggcccagtgtcagcgccaggagctcatcacccaccagatacagactttgaaacgctcctacggagaggctaaggacactattaggcaccatgaggctgagattagatctctgcaggccaggctgagcaacgccgcatag

SEQ ID NO: 231622 - DNA, 585 bp, synthetic construct
  misc_feature 1..585: note = Description of Artificial Sequence: Synthetic coding sequence
  source 1..585: mol_type = other DNA
ctaagacaacaaaccgtagaagagttgcagagcgtccagagagagctggaagttttgagtgagcaatacagtcagaagtgtctggagaacgcccatctcgcacaagcactggaggccgaacgccaggcgctgagacagtgccagcgagaaaatcaggaattaaacgctcacaaccaggttctgctgagggtgaaggagagcgagattcagtacctaaagcaagagatctcttcgttgaaggacgagttgcagaccgcattaagggacaaaaaatacgctagcgacaagtataaagatatctacaccgagctttccatcgctaaggccaaggcagactgtgacataagccgccttaaagaacaattaaaggcggcaaccgaggccctaggcgagaaaagtcccgacagcgccactgtcagcggctacgacatcatgaagagcaagtccaatcccgactttttaaagaaggaccgctcgtgcgtcactagacaactgaggaacatcaggtctaaatccttgaaggagggactgaccgtccaggagagactgaagcttttcgaatctcgagacctgaaaaaagattag

SEQ ID NO: 231623 - DNA, 3003 bp, synthetic construct
  misc_feature 1..3003: note = Description of Artificial Sequence: Synthetic coding sequence
  source 1..3003: mol_type = other DNA
atgtcagcagcaaaagaaaacccatgccgcaaattccaggccaatattttcaataagtctaaatgtcagaattgcttcaagcccagagaatcacacttgttgaatgatgaggatcttactcaggctaaacctatttatggagggtggctgctcttagcacccgacggtaccgacttcgacaatcccgtacacaggtctaggaagtggcagcggaggtttttcattttgtatgagcacggactgctgcggtacgctctggacgagatgcctaccaccctgccacagggcacaataaacatgaatcagtgcacagatgtggtcgacggagaaggccgtacgggtcaaaaattctccttgtgcatcctgacccctgagaaggaacatttcattagagccgaaacaaaggaaatagtgtcaggatggctggaaatgctaatggtgtacccacgcaccaacaaacagaaccagaagaaaaaacggaaagtggaacctcctactccacaagagcctgggcctgcaaaagttgccgttacatcaagttctagtagctcgtccagcagcagtagcatcccaagcgctgaaaaagtgccgaccactaaatcgacactgtggcaggaggaaatgaggaccaaggatcagcccgatgggtcatctctcagcccagcacagtctccttctcagtcccaacccccagccgcatcttcgttgagagaaccaggcctcgaatctaaagaagaggagtccgcgatgtcatccgatagaatggactgtggtcgaaaagttcgcgtggagtccggatattttagcctggagaagaccaagcaggacctgaaggccgaagagcagcagcttccgccaccactctcacccccttcaccctccaccccgaatcatcgtaggagtcaggtgatcgaaaaattcgaggctctagacatagagaaggcagagcacatggaaactaatgctgtgggtcctagccccagctcagacacccgccagggacgttcagagaagagagcattccctcggaagcgacctgatctcctcaacttcaagaagggctggttaactaaacagtatgaagatggacagtggaaaaaacactggtttgtgttagcagaccagtctctgaggtactacagagactctgtagcggaggaagcagccgacctcgatggcgagatcgatctgtcagcctgttacgacgttacagaataccctgtgcaacggaactacggcttccagatccatactaaggagggcgagtttactcttagcgcgatgacctccggcattcgccgaaattggattcaaacaatcatgaagcatgttcatcccaccacagctcctgatgtgacctctagcctgccggaggagaaaaacaagtcatcttgcagctttgaaacttgtccaaggcctactgagaagcaggaagccgagctgggggagcccgatcccgagcagaaaaggtctcgcgctcgcgaacgaaggcgagaagggaggagtaaaacttttgattgggccgaattcagaccaatccaacaggctctagcacaagagagggtgggaggcgtgggtccagccgatacacatgagccactccgcccagaggcagagcccggagagttggaaagggagcgcgctcggcgaagagaggaaagacggaaacgctttggcatgctcgacgctacggacggcccagggaccgaagatgcggctctacggatggaagtagaccggtccccaggcctcccaatgtccgacctaaagacacataatgtgcatgtggaaatcgaacagcgctggcatcaagttgagacaactccccttcgcgaagaaaagcaggtacccatcgctcctgtccatctgtcaagtgaagacggcggagatcggcttagtacccatgaactcacttcactgctggaaaaagagctagagcagtcacagaaggaagcaagtgacctgctcgagcagaatcgcctgcttcaagatcagctcagagtggcactgggaagggagcaatctgctcgggagggttacgtgttgcaggcgacttgcgaaaggggtttcgccgctatggaggaaacacaccagaagaagatcgaagacttgcagagacagcatcagcgcgaactggaaaaactaagagaggagaaggatcgccttcttgccgaagagaccgccgcaacaatttccgctattgaggccatgaaaaacgcacaccgcgaggagatggagagggaacttgagaagtcccaaaggtctcagatctcatctgtgaacagcgacgtcgaggctctccggagacagtaccttgaagaactgcagtcggtgcagagggaactggaggtgctgtccgaacagtatagccagaaatgcttggagaacgctcacttggcgcaggccctggaggccgaacgccaggccctgcgtcaatgccagcgcgagaatcaggagcttaatgcgcataatcaggaacttaacaatcgcctggctgccgaaatcactcggctgcgcacactactgacgggcgatgggggtggggaagctacgggaagtcctctggcccagggaaaagacgcttacgagctcgaggtgctgttgagggtgaaagaaagcgaaatccagtacctcaagcaggagattagctcactgaaggatgaactccagaccgcactccgcgataagaagtacgcaagcgacaaatacaaagacatttacacagagctgtctatcgctaaagcgaaagccgattgtgacatttctagactcaaagagcagttaaaagctgccaccgaagcacttggggaaaagtcacctgactctgcaacagtaagcggctacgacatcatgaagtcgaaaagcaatcccgattttctgaagaaggacaggtcatgtgtaactagacaacttcgaaacatcaggtcaaagtcgctcaaggaaggccttacagtacaggaacggctgaaactgttcgaatcgcgggatttgaaaaaagattag

SEQ ID NO: 231624 - DNA, 795 bp, synthetic construct
  misc_feature 1..795: note = Description of Artificial Sequence: Synthetic coding sequence
  source 1..795: mol_type = other DNA
atggagaactacgggatagagtggcattccgtccgggattcagagggacaaaaactcttgataggtgtcggcccagaaggtatcagcatctgtaaagatgacttctctcccattaatcgtattgcctatccagtggtgcagatggcaactcaaagcggtaagaacgtctacttgaccgtgacaaaggaatccggcaactccattgtgctgctgttcaagatgatttctaccagggcggcatctggcctctatcgagccatcacagaaacccatgccttctataggtgtgacacagtaacctctgccgtaatgatgcagtactcccgagatctcaaaggacacctggcctccctttttttgaacgaaaatataaacctcggcaagaagtacgtctttgatatcaaaagaacctccaaagaagtatacgaccatgctcgcagggccctgtataatgccggagtggttgacctggtgagtcgaaacaatcagtcccccagccactcacctctaaagagcagcgaatcctccatgaactgctcatcatgcgaaggtttgtcttgccagcagaccagagtgctgcaggaaaaactgaggaagctcaaggaagccatgctgtgtatggtgtgctgtgaggaggaaataaacagtactttttgtccatgtggtcatacggtgtgttgtgaatcatgcgcagcccagcttcagagctgtccagtctgtcgaagcagagtcgaacacgtccagcacgtgtaccttcccactcacacatctttacttaatctcacggttatctag

SEQ ID NO: 231625 - DNA, 1338 bp, synthetic construct
  misc_feature 1..1338: note = Description of Artificial Sequence: Synthetic coding sequence
  source 1..1338: mol_type = other DNA
atgctctgctacgtaacgagaccagacgccgtgcttatggaggtggaggtcgaagctaaagcaaatggcgaagactgcctgaaccaagtgtgtcggagactggggataatagaggtcgactatttcggactacaattcactgggagcaaaggagagagtctgtggcttaacttacggaatcgcatctctcagcagatggacggcctggccccatatcgcctgaagctgcgggtgaagtttttcgtggagccacatcttattctccaagagcagactagacatatcttcttcttgcacataaaagaagctctcctggccggacacttgctatgctcccctgaacaggccgttgagctgtctgctttgctagcgcagaccaaatttggggattataaccagaacacagccaagtataattacgaggaactgtgcgccaaggaactgtcatccgcaaccctgaatagcattgtcgccaagcacaaagagttggaagggaccagccaggctagcgccgagtatcaggtccttcagatagtgagcgccatggagaattacggcattgaatggcacagcgtaagagactctgagggacagaagcttctaatcggagtggggccagagggtatttcaatctgtaaggatgacttctctccaattaacaggatagcctacccagtagttcaaatggcaacgcaatcaggaaagaatgtgtatctgactgttaccaaagaatctgggaattcaatcgtgttactgtttaaaatgattagcactcgtgctgcaagtggtttataccgcgcaatcacagaaacccacgccttctatcgctgcgataccgttacaagcgctgtgatgatgcagtatagtagggacttgaaaggacatctggccagcttgttcctaaatgaaaacatcaacctgggcaagaagtacgtgtttgacatcaagaggacttccaaggaagtgtatgatcacgctagacgggctttatataacgcaggtgtcgtggacctggtctccagaaataaccagtcaccatcccattcaccgcttaaatcatctgagtcaagcatgaactgctcttcctgtgaaggcctgtcttgccagcagacacgggtactacaggagaaactcaggaagctcaaagaagcaatgctgtgtatggtgtgctgcgaagaggagatcaacagcacgttctgcccctgtggtcacacagtgtgctgcgagagctgtgccgcacagttgcagtcttgtcccgtgtgccgtagcagagttgagcatgtgcaacacgtctacctccctacacatacctctctgctgaatctcacagtgatctag

SEQ ID NO: 231626 - DNA, 5486 bp, synthetic construct
  misc_feature 1..5486: note = Description of Artificial Sequence: Synthetic coding sequence
  source 1..5486: mol_type = other DNA
atggccgcttccgagctgtatactaaattcgctagggtgtggatccctgacccagaagaggtctggaaatccgccgaactgctgaaagactacaagccgggagataaagtactgttgttgcatctggaggagggtaaagacctggaataccatctcgatcctaaaactaaggaactgccccacctgcggaaccccgacattctggttggcgaaaatgacctgaccgccctgagctacctgcacgagccggctgtcctgcataatctgcgggtccgctttatcgattcaaaactcatttatacgtattgtggtatcgtactcgttgccatcaatccctatgagcagctgccaatttacggggaggacattatcaatgcttatagcggccagaacatgggggatatggaccctcacatattcgctgtcgctgaggaagcctacaagcagatggctagggatgaacgaaatcagtccattatagtgagcggcgaaagcggggctggaaagactgtcagcgccaagtatgccatgcgctatttcgcaactgtcagcggttctgcaagcgaagcaaacgtggaagaaaaggtactggcgtctaaccccataatggaatccatcggtaacgcgaagacgacccgcaacgataactcaagccggttcgggaaatatatcgagatcggcttcgataaacgctacagaattataggagctaacatgaggacctacctgcttgagaaatctcgagtggtgtttcaggccgaagaggagaggaactaccacattttctaccagctgtgtgcctcggcgaaattgcccgaatttaagatgctcagactcgggaacgctgacaacttcaactacaccaagcaaggtggatcacctgtgattgaaggggtcgacgacgctaaggagatggcacacacgagacaggcttgtaccttactcggtatttctgaatcccaccagatgggaatcttccgaattctcgctggaattctccatctcggtaacgtggggttcacttcccgcgacgctgattcctgtacaatcccacctaagcacgaacccctgtgtattttctgcgaattaatgggggtcgactatgaagagatgtgtcattggttgtgccatcggaaactggcgacggccactgaaacctacatcaaaccaattagtaaattacaggccactaacgctcgcgacgctctggccaaacatatctacgcaaagttatttaactggatcgtggacaatgtgaaccaggcgttgcactccgccgtgaaacagcactctttcatcggcgtgctagatatttatggattcgagaccttcgagatcaactcattcgagcaattctgcatcaactacgcgaacgaaaagctccagcaacagttcaacatgcatgtgttcaagttagaacaagaggaatacatgaaagaacaaatcccctggaccttaattgacttttacgataaccagccttgtatcaacttgattgagtcgaagctgggaatcttggatcttcttgacgaggagtgtaagatgccaaagggcaccgatgacacatgggcgcagaagctctacaatacacacctcaacaagtgtgccctcttcgaaaagccgaggttatctaataaagcgttcataatccagcactttgctgataaagtggagtaccagtgtgaggggttcttggaaaaaaacaaagacaccgtgttcgaagaacaaatcaaagtgttgaagtcctcaaagttcaagatgctccctgaactgtttcaggatgatgaaaaggctatttctcctacttccgctacctccagcggtaggacacctcttacccgcacacccgctaagcctacaaagggccgacccggacaaatggccaaggagcacaagaagactgtgggccaccagtttcgtaactctctgcacctgctgatggagaccctgaatgccactacccctcactacgtacgctgtatcaagccaaacgactttaagttcccttttacctttgacgaaaagagggctgtgcaacagcttagggcctgcggtgtgctcgagactattaggatctccgccgctggctttccgagtaggtggacttatcaagagttcttttcgcgatatcgagtcctaatgaagcagaaagacgttctttccgatcgcaaacagacatgtaaaaacgtcctggagaagcttatcttagacaaagataagtatcagttcgggaagactaagatctttttccgtgccggtcaagtggcctatctggaaaaactgcgagctgacaaactgcgggctgcctgtatcaggatacagaagacaatccggggatggctgctccgaaaaaaatacctacgaatgcggaaagccgctataactatgcagcgttacgtacgcggttaccaggcaaggtgctatgcaaagtttctgcgtcgcactaaggccgcaacaataattcagaaatattggcgcatgtacgtggttaggagacggtacaagatacggagggccgcaaccatcgttttgcagagctaccttcggggatttctggccagaaatcgctataggaaaattctgcgggagcataaggcagtcatcattcagaaacgagtgagaggctggcttgcaagaacccactacaaacgatcaatgcatgccattatctatcttcaatgttgctttcggcgaatgatggcaaagcgggagctgaaaaaactaaagatagaggcaaggtcggttgagaggtacaagaagctccacatcggtatggagaataagattatgcagctgcagagaaaagtcgacgagcagaacaaggactataaatgcttggtggagaaactgaccaatctggagggaatctacaattccgaaactgagaagctccgaagtgaccttgagcgattacagctgagtgaagaggaagccaaagtcgccaccgggagagttctgtctttacaggaagaaatcgcaaagctgcggaaggacctcgaacagacccggtcggagaagaagtgtatcgaagaacatgccgatcggtacaagcaggagacggaacagctggtctccaaccttaaggaggagaacactctgctgaagcaggaaaaggaggccctgaatcacaggatagtacagcaggccaaggagatgacagagacaatggaaaaaaagctggttgaagaaactaagcagttggaactcgacctgaatgatgaacggctgagatatcagaatctgttgaatgagtttagtcgactggaggagaggtacgatgacctgaaggaagaaatgacactgatggttcatgtacccaagcccggacataagagaaccgactctactcactcgtcaaatgagtccgaatatatcttcagcagcgagattgctgagatggaggatatcccctcccgaacggaggaaccctccgaaaagaaggtcccattggatatgagccttttcctcaagctacaaaaacgcgtgacagaactggagcaggagaaacaggttatgcaagacgaactggaccgaaaagaggaacaggtgctgcgtagtaaagctaaggaggaagaaaggccacaaattcggggagccgagctagaatacgagtccctcaagcggcaagagctggaaagtgagaataaaaaacttaagaacgaactcaacgaactgagaaaagcactatcggagaagtctgctccagaggtgactgcaccaggcgcacccgcttaccgtgtgcttatggagcagctgacaagtgtctctgaggagctagatgttcggaaggaagaggttcttattttacgcagtcaactggtcagtcagaaagaggccatacagcctaaggacgacaagaatactatgacagacagtactatcctgctggaggatgtccaaaagatgaaagacaaaggcgaaatcgcccaggcatatatcgggcttaaggaaacgaacaggctgcttgaatcacagctgcagtcccagaaaaggtcccacgagaacgaagctgaagcactgcgcggagagattcagtctctgaaagaagagaacaaccggcagcaacagttgttggcccagaaccttcaattaccccctgaggctagaatcgaagcttcacttcagcacgagattaccaggctgaccaacgagaatcttgacctcatggagcaactggagaaacaggataaaacagtgcggaaattgaagaagcaactgaaggtcttcgccaaaaagatcggagaactcgaggttggacagatggaaaatatctcccctggccaaattatcgacgagcccatcaggcctgtaaacatccccagaaaagagaaggactttcaaggaatgttagaatataagaaggaagacgagcagaaacttgtaaaaaaccttattctggagctgaagcctcgcggtgtcgccgtaaatctcataccaggtctccccgcttacatcctctttatgtgcgtgcgtcacgctgattatctcaatgacgatcaaaaagtcagaagtctgctgacctcaactattaacagtattaagaaagtcctgaaaaaacggggtgacgacttcgagaccgtatctttttggttgagcaatacctgcaggtttctacattgccttaaacagtacagcggtgaggaggggttcatgaagcacaataccagtcgacagaatgaacattgcctgacgaatttcgatttggccgagtaccgacaggtactgagcgacctggcaattcagatctaccagcagcttgtgcgtgtgctggaaaacatcctgcagcctatgattgtcagcggcatgctagagcatgagactattcaaggggtatctggcgtgaagccaactggcttgagaaaacgaacaagcagcattgcggacgaaggaacctatactctagactccatactgcggcagctgaattcctttcatagcgttatgtgtcagcatggaatggatcccgagctgataaagcaggtggttaaacagatgttttacattatcggggctatcactctcaacaatctgcttcttaggaaggacatgtgttcctggagcaagggaatgcaaatccgctacaatgtatcccaactggaggaatggcttagggataaaaatttgatgaattcaggtgccaaagagacccttgaaccattaatccaagctgcgcagctgctccaggttaagaagaaaactgacgacgacgcagaagccatttgttcgatgtgcaatgccctgacgaccgcgcagattgttaaagtcctcaatttatacactcctgttaatgaatttgaggagagggtctctgtaagtttcatccgtactatacagatgcggctcagggaccgcaaagacagtccacagctactgatggacgccaagcatatcttccctgtcacctttccattcaaccccagcagtttggccctagagactatccagatccctgcttcccttggcctgggatttatctctagagtcta

SEQ ID NO: 231627 - DNA, 5642 bp, synthetic construct
  misc_feature 1..5642: note = Description of Artificial Sequence: Synthetic coding sequence
  source 1..5642: mol_type = other DNA
atgaagagcagcagtctggagactatgtttgccagggtctggatccccgaccccgaggaggtctggaagagcgcggagctgctgaaggattataagcctggggacaaggtgctcttactgcacttagaggaaggtaaagacctagagtatcatctagatcccaagacgaaggaactaccgcatctcagaaatcctgacattctggtaggcgagaacgatttaacagccctgtcttatttgcatgagcccgctgtgctgcataacttacgcgtgcgatttattgatagtaagctgatatacacatactgtgggatcgtgctggttgccattaatccctatgaacagctgcctatttacggcgaagacattatcaacgcatacagtggccaaaacatgggagatatggacccacatatcttcgcagtggctgaggaagcctacaagcagatggctcgggacgaacgcaatcaatccattattgtctcaggcgagagcggagctggcaaaactgtctcagctaagtacgccatgcgatacttcgctaccgtttctgggtcggcctctgaagctaatgtcgaagaaaaagtgttagcttcaaaccccatcatggagagtattggtaatgccaagaccacccgaaatgacaattccagccgcttcggcaaatacatcgagatcgggttcgacaagcgatacaggatcatcggtgccaacatgagaacttatctcctggagaagagtagagttgtgtttcaggccgaggaggaaagaaactatcacatattttatcagctttgcgcttccgcaaagcttcccgaatttaagatgctgcgcctgggcaatgccgacaacttcaactacaccaagcaagggggttctcctgtgatcgagggtgtggacgacgcaaaggagatggcccacacaaggcaggcttgcaccctcctgggcataagcgaatcacatcagatggggatatttcgaattttggctggcatccttcatttgggcaacgttggattcacaagccgagacgccgacagctgtaccattccccctaaacatgagcccctatgtatcttttgcgaactcatgggggtcgattacgaggaaatgtgtcactggctttgccacaggaagcttgccacagccacagagacctacattaaaccaatatctaaattacaggccacaaacgctagagatgctctcgctaagcatatctacgccaagctattcaactggatcgtcgataacgtcaaccaggctctgcacagcgctgtaaagcagcacagctttataggagtgctggatatctatggtttcgaaacatttgagattaattccttcgaacagttctgcatcaattacgcaaacgagaagctgcagcagcaatttaacatgcacgtctttaagctggaacaggaagagtacatgaaggaacagatcccatggactctaatcgatttctacgacaaccagccttgcataaatctgatcgagagtaagttgggcatactggacttgcttgatgaggagtgtaagatgccgaaaggaaccgacgatacttgggcccaaaaactgtataatacccatctcaataagtgcgccttgtttgagaaacctcgtctctctaataaagccttcatcattcagcacttcgcagataaggtagaataccaatgtgagggatttctcgagaagaataaggatacagtctttgaagaacaaatcaaggtgctgaagtcctctaagtttaagatgctacctgagctgtttcaagacgacgaaaaggcaatctcaccaactagtgcaacgtccagcggacggactccattgacacgaacaccagctaaacccacaaaaggacgtccgggacaaatggccaaggaacataaaaagactgttggccaccagttccgaaattccctacacctgctgatggaaactctaaacgctactacaccacattacgtgaggtgcataaaaccaaacgacttcaagttcccctttacatttgatgagaagcgggcagtgcagcaactacgtgcttgtggcgtgctagagactatcaggatctccgccgctggtttcccatcacggtggacttatcaggaatttttcagccgctatcgggtgcttatgaagcagaaagacgttctaagcgatcgtaagcagacttgcaaaaatgttcttgagaagctgattctggataaggataagtaccaattcgggaagacaaagatcttttttagggccggacaggtggcttatctggagaaactgcgggcagacaagctgagggcagcatgcattagaatccagaaaaccattagggggtggcttctaagaaagaaatacctacggatgcgcaaggcagcaattactatgcagcggtatgtgaggggttatcaggcacgctgctacgctaaattcctcagacggaccaaagccgctactatcattcagaagtactggcgtatgtacgttgtgagacgcagatacaaaattcgtagggcggcaacgatcgtgctacagtcgtatttgcggggtttcctggccaggaacaggtaccgaaagatcctccgcgagcataaggcggtgattatacagaagcgcgtcagaggatggttggctaggactcattataaacgaagcatgcacgccatcatatacctgcagtgttgctttagaagaatgatggcgaaaagagagttgaagaaactgaagattgaagctcgatccgtggaacggtacaagaagctccatattggcatggagaataaaataatgcaactgcagaggaaggtagacgaacagaataaagactacaagtgcctggttgagaagctgaccaacttggaaggcatatacaatagcgagacagaaaagctgcgtagcgatttagaacggctgcagctaagtgaggaagaggccaaagtagccaccgggagagtgctgtccctgcaggaagagatcgcgaagcttcgcaaggatctggagcagactaggtctgaaaaaaagtgcatcgaagagcatgccgatagatataaacaggaaacagaacaactagtcagcaacctgaaggaggagaataccctgttaaagcaagagaaggaagcacttaaccacagaattgtgcagcaggctaaggagatgacggaaacgatggagaagaagttggtggaagaaacaaagcagttggaactcgatctgaatgatgagcgtttgcggtaccagaatctattgaatgagttctcgcgcctagaagagaggtacgacgacctgaaggaagagatgacgctgatggtgcacgtccccaagcctggccacaagagaacagacagcacccacagctcgaacgaatcggagtatatcttctccagtgaaattgccgagatggaggacattcctagtagaaccgaggagccctctgagaaaaaagtccccttggacatgagtctgttccttaaattacagaagcgagtgacggagctcgagcaggaaaaacaagtgatgcaggatgagcttgatcggaaggaggaacaagtgttgcgctctaaggctaaagaagaagagagaccccagattagaggggctgagctggagtacgagtctctaaagcgccaggagctcgaatctgagaataagaagctgaagaatgaactcaacgaattgaggaaggccttaagtgagaaaagcgcccctgaggttacagcccctggagcacccgcatatagggtgctcatggagcaactcacttccgtgtccgaagaactggatgttcgcaaagaagaagtgctgatactgaggtctcagttagtatctcaaaaggaggcaatacagcccaaactccacgaaaacactatgacggactcgactatactgctggaagatgttcagaagatgaaggacaaaggtgagatcgcacaggcttacatcggcttaaaggagaccaaccggtctagcgctctggactaccatgagctaaatgaagatggggagctgtggcttgtgtatgaaggactcaagcaggccaacagactcttggagtcacagttgcagtcacagaaaagatcccacgagaatgaagctgaggccttacgcggagaaattcagtcactcaaggaagaaaataacagacaacaacagctcttggcccaaaatcttcagctgcctccagaagccaggattgaagctagtcttcagcacgaaattacaagacttactaacgagaacctgtatttcgaggaactctatgcggacgatcccaaaaagtaccaatcatatcgaatttctctgtacaaacgcatgatcgacttgatggagcaactggaaaaacaggacaagactgtgaggaaacttaagaagcaacttaaggtttttgccaagaagattggcgagctggaggtgggacagatggaaaacatttcgcccggacagatcatcgatgaacctattcggcctgtcaatatcccccgaaaggaaaaggactttcagggcatgctggaatacaaaaaggaagacgaacagaagctggtcaaaaacctgatcctcgaactgaagccacgcggagttgctgtgaatctgatcccagggcttcccgcttacattctgttcatgtgtgtgagacacgctgactacctcaatgatgatcaaaaggtccggtcactgttgaccagtaccataaactccattaaaaaggtactgaagaagcgcggtgacgattttgaaacggtgtctttctggttgagcaatacttgccgtttcctgcactgtctcaagcagtactctggagaggaagggttcatgaaacataacacatcccgccagaatgagcactgtctaacgaactttgacctagcggaatataggcaggtcctctcggacttggcaattcagatctaccaacagctggtgagagtcctggagaatattctacagccgatgatcgtctctgggatgttggagcacgaaaccattcagggagtgtccggcgtgaagcctacaggtctcagaaaaagaacgtctagtatagccgatgaaggtacatatacattggactccattttgcgtcagctgaattccttccacagtgtgatgtgccagcatgggatggatccagaactcattaagcaagttgtgaaacagatgttctatattataggtgctataaccctaaacaacctgctgctccgcaaggatatgtgtagttggtcaaagggaatgcaaatcagatacaacgttagccaactggaggagtggctgagggataagaacttgatgaattcaggcgcaaaggaaaccttggagccattgatccaagctgcacagttactgcaggtcaagaaaaaaaccgacgacgatgctgaagcaatctgctcgatgtgcaacgccctaaccaccgcacagatcgtgaaggtcttgaacttgtacactccagtgaatgagttcgaggaacgggtgtcagtcagcttcattagaactatccagatgcgactccgtgaccggaaagactccccacagctgttgatggatgccaaacacatcttcccagtcacgtttccatttaacccttcgtcccttgccttagagactatccaaatacccgcttccctgggcctcgggtttattagccgtgtgta

SEQ ID NO: 231628 - DNA, 4089 bp, synthetic construct
  misc_feature 1..4089: note = Description of Artificial Sequence: Synthetic coding sequence
  source 1..4089: mol_type = other DNA
atgcacgtttttaaattggagcaagaagagtacatgaaagaacagatcccatggacactgatcgatttctatgacaaccagccctgtataaacttgattgagagcaaacttggaatactagatctgttagatgaagaatgtaaaatgcctaaggggacggacgacacctgggctcaaaagctctacaatactcacctgaataagtgcgcattattcgaaaagccgaggctgtctaataaggcgtttattatccagcattttgccgacaaggtggagtaccaatgcgaaggctttttagagaagaacaaggacaccgtgtttgaggagcagattaaggtgttgaagagctctaaatttaaaatgctgcccgagttgttccaagatgacgagaaggcaattagccccactagcgccacttcttccggtaggaccccgctgactagaacccccgcaaagcctaccaagggccgtccagggcagatggccaaagaacacaaaaagaccgttggacaccagttcagaaattccctccatttgctgatggagaccctgaatgctaccacaccacattatgtccgctgtatcaaacctaatgatttcaaattcccattcaccttcgatgagaagcgggcagtgcagcagctcagagcgtgcggagtactggagaccatacgaattagcgccgctggcttcccgagtcgttggacataccaggaatttttcagtcggtaccgcgtcttaatgaaacagaaggacgtgctgtcagacaggaaacagacgtgcaaaaatgttctggagaagctcattcttgataaagataaatatcagttcgggaaaacgaagatcttttttagagcaggccaggttgcttatctggaaaagttacgggctgacaaactccgggctgcctgtatcagaatccagaagactataaggggatggttgttacgtaagaaatacctgcggatgcggaaagccgcaattacaatgcagaggtatgtaaggggataccaggcacggtgctacgctaaattcctcagacggaccaaagctgcgactattatccagaagtactggaggatgtatgtggtcaggcggcgttataaaatccgcagagctgccacaatcgtgttgcagagctatttgcgcggattcttggcaagaaaccgctatcgaaaaatcctgagagagcataaggctgtcattatacagaaacgcgtgagagggtggcttgctcgcactcactataaaaggtctatgcatgccattatctatctgcagtgttgcttcaggcgaatgatggcaaagcgagagctgaagaagctgaagattgaagctcgcagcgtggaacgctataaaaagcttcacattgggatggagaacaagattatgcagctgcagcgcaaggtcgatgaacagaataaggattataagtgcctggtcgagaagctgactaacctggaagggatttacaacagtgagaccgagaaactcaggtctgatttggagagactgcagctttctgaagaagaggcaaaggtggccacaggtagagttctgagcctccaggaggagatcgccaaacttaggaaagatctagaacagacccggtccgaaaagaaatgtatcgaggagcatgcagatagatacaaacaagagacagagcagctcgtcagcaatctaaaagaggaaaacactctcttaaagcaggagaaggaggctctgaaccaccgaatcgtccagcaagccaaagagatgacggaaaccatggagaaaaagctggtggaagagactaagcagctggagttagatttgaacgacgagcgcctccggtatcagaacctgttaaatgagttctctagattagaagagcgctatgatgacctgaaggaagagatgacacttatggttcatgtgcctaagcctgggcataagcggacagatagcacacacagctctaatgagagcgaatatattttctcatctgaaattgccgagatggaggatattccatctagaaccgaagagccatctgagaagaaggtccctctggacatgtccctcttccttaagctccagaagagagttaccgagctcgagcaggagaagcaggtcatgcaggacgaactcgatcgaaaagaggaacaggtgctgcgctcaaaagctaaggaagaagaacggcctcagatcaggggggcagaactggaatatgagtccctcaaacggcaggagctggagagtgagaataagaagctgaaaaatgagctgaatgagctgcggaaggcgcttagcgagaagtcagctcccgaggttaccgcccctggcgctccagcatacagggttctcatggaacagttaacctctgtgagcgaagagctggacgttagaaaggaagaagtgttgatcctccgctctcagcttgtgtctcagaaggaggctattcaacccaaggatgacaagaataccatgacggatagtactatcttactggaggacgtccaaaaaatgaaagacaaaggggaaatcgcccaggcctatattggccttaaagaaacaaatcgactgctggagtctcaactccagagtcagaagaggtcacatgagaacgaggctgaggctctcagaggggaaatccagtccctgaaagaagagaataaccgccagcagcagctgctcgctcaaaatttgcaactaccacccgaagcccgaattgaggcctccctgcagcatgagatcacccgccttaccaacgagaatctggatctgatggaacagctcgagaaacaagacaaaaccgtgcgcaaactgaagaaacaactaaaggtctttgccaaaaaaattggagagctggaggtcggacagatggagaatataagtcctggccagatcattgatgaacccattcgtccggtgaatattcctcggaaggaaaaagattttcaggggatgttagaatataagaaggaggacgaacagaagttggtgaagaatctcatcctcgaactcaagccaaggggtgtggccgtcaacttgatccctgggttaccagcttatattctcttcatgtgtgtaagacacgcagactatttgaacgacgaccagaaggtccgctctctgttgacgtcaacaatcaactccataaaaaaagtgctcaagaagcggggtgatgatttcgaaacagtctcgttctggctgtcaaacacatgcagattccttcactgtctgaagcaatacagcggggaagagggcttcatgaagcacaacacttcgcggcaaaacgagcattgcctgaccaactttgatttggccgagtatcgccaggtgttgagcgacttggccattcaaatctaccagcaactcgtgagagtattggagaacattctacaacctatgattgtaagcgggatgctcgagcacgagacaattcagggagtttcaggagtcaagcccacaggactaaggaagcgtacttcttccatagctgacgagggaacatacaccttagactccatcctacgtcagctcaacagttttcatagcgtgatgtgccagcacgggatggatcccgagctgatcaagcaggtcgtgaaacagatgttctacattatcggtgctatcacccttaacaacttgttgctgcggaaggatatgtgttcttggtccaaagggatgcagattaggtacaacgtttctcagcttgaagagtggctacgcgataagaacctgatgaattcaggggctaaagagaccctggagcctctgattcaggctgcgcagctgttgcaggtcaaaaagaaaactgacgatgatgccgaggccatatgttctatgtgcaacgctttaactaccgcacagatcgtgaaggtactgaacttgtatacccccgtgaacgagttcgaagagagggtttcggtatcgttcataaggactatacagatgcggctccgagatcgaaaggactcacctcaactgttaatggatgccaagcatatcttccccgtcacattcccgttcaatcctagctccctagctctggagactattcagattcccgctagcctcgggctgggtttcattagcagagtatag

SEQ ID NO: 231629 - DNA, 5567 bp, synthetic construct
  misc_feature 1..5567: note = Description of Artificial Sequence: Synthetic coding sequence
  source 1..5567: mol_type = other DNA
atggctgcctcagaactctacaccaagtttgctcgcgtatggatccctgaccccgaggaagtgtggaagtctgctgagctgctgaaggactacaagcccggtgataaagtcctgctgctgcacttggaggagggcaaggatctcgaataccacctcgatcccaagaccaaagaactccctcacctgagaaaccctgatatactggttggggaaaacgacctgaccgccctcagttatctgcatgaacccgctgttctgcacaaccttcgggtgcggttcattgatagtaaactgatttatacatactgtggcatagtgctagtggccatcaatccatatgaacagctgccaatttacggtgaagacattattaacgcctattcaggccaaaacatgggagacatggatccccacatctttgcggtagctgaggaagcatataaacagatggctcgcgacgaacgcaatcagtccattatagtgagcggggaatccggcgctggtaaaactgtgagtgctaagtacgccatgaggtatttcgccacagtgagcggaagtgcttccgaggctaatgtggaggagaaagtcctcgcatctaaccctataatggagtccatcggcaatgccaagaccacgagaaacgacaattcttccaggtttggaaagtacatcgaaatcggcttcgataagcggtaccggattattggagcgaatatgagaacctatttgcttgagaaatcccgggtcgtgttccaggccgaagaggaaagaaattaccacattttttaccagctctgtgccagcgcgaaattgcccgaatttaagatgctcaggttagggaatgccgacaatttcaactataccaagcaggggggaagccctgtcatcgagggggtggatgatgcaaaggaaatggcacacacccgccaagcgtgtacactcctgggtattagcgagagtcatcagatgggaatctttcgaattcttgctggtatactacatctgggaaacgtaggcttcacatcacgcgatgctgattcttgcactatacctccgaagcatgaacctctctgcattttttgcgagctgatgggagtggattacgaggagatgtgccactggttgtgccaccggaagctggccactgccacagaaacttatattaaaccaatatccaaactccaagctactaatgctagggacgctctcgcaaagcacatctacgccaagctgtttaattggattgtggacaacgtcaaccaggcccttcactccgccgtcaagcagcacagttttatcggtgtgttggacatatacggcttcgagaccttcgagatcaatagtttcgaacagttctgtatcaattacgctaacgagaaactgcagcaacaatttaatatgcacgtttttaaattggaacaggaggagtatatgaaggaacagattccttggaccctgatcgacttttacgacaatcaaccctgtatcaacctgatagaatctaagctcggaatcctggatttgcttgacgaggagtgtaagatgccaaaaggaactgatgacacctgggctcagaagctctataatacccatctgaataaatgcgctttattcgagaaacccagactgtctaacaaagcgttcattatccagcatttcgctgacaaagttgagtatcaatgtgaaggatttcttgaaaagaacaaggacaccgtgtttgaggaacagattaaggtgttgaaatctagcaagtttaaaatgctgcccgaactctttcaggacgacgagaaagctatttcccccacaagtgccacaagttccggcaggacacctctcaccagaactcccgctaaaccaacgaaagggaggcctggccaaatggcaaaggagcataagaagacggtgggccaccagttcaggaactcccttcatctgttgatggagaccctcaacgccacgactccccactacgtccgatgcatcaagcctaacgatttcaagttcccatttacgtttgatgaaaagagggcagtacagcagctccgtgcgtgcggagtgctggaaactatcagaatctcagcagcagggtttccgagccgctggacctatcaagaattcttttcacgatatcgtgtgctgatgaagcagaaggatgtgctgtccgatcgaaagcagacatgtaaaaacgtcttggaaaagttgattctcgataaggataaatatcaattcggcaagaccaagatctttttccgtgccggacaagtggcttacctggagaagctacgtgcagacaaattaagagctgcctgcataagaatccaaaaaacaattcgcggttggcttctccgaaagaaatatctgaggatgcgaaaggcagcgatcacaatgcagcgctatgtgagggggtaccaggctcggtgctatgctaagtttcttaggcgaacaaaagccgcaaccatcatccagaaatattggagaatgtacgtggtacgcagacgctataagatccgacgcgctgcaaccatagtcttacagtcttacctaaggggatttctcgccagaaatagataccgcaagattctgcgagagcacaaagctgtaataattcagaaaagagtgcgtgggtggcttgccagaacacactataagaggagcatgcacgcaattatttatctgcagtgctgcttccgcagaatgatggcaaaaagggagttgaaaaaactgaagatcgaagctcgcagtgtggaaagatacaaaaaactgcacattggcatggaaaacaaaattatgcagctgcagaggaaagtagacgaacagaacaaggattacaaatgcctggtagaaaaattaacgaatctcgaggggatttataatagtgaaaccgaaaagcttcggtccgatctggaacggttgcagctgtcggaggaggaagccaaggtggccactggaagggtgctgagtcttcaagaggaaatagcgaaactgcgtaaagacctggaacaaacaaggtcagagaagaagtgcattgaggaacatgcagaccggtataagcaagagacagaacagctcgtgtccaatctaaaggaggaaaacacccttctcaaacaggagaaggaggctctgaatcaccgtatcgtgcaacaagctaaagaaatgacagaaacgatggaaaagaaactcgtggaagagaccaagcagttagagcttgatctcaacgacgaacgactgagataccagaatcttctcaacgaattttccagacttgaggagagatacgacgacctgaaagaggagatgaccttgatggtccatgttcctaagcctggtcataaacgcacggacagcacccactcatccaatgaatcggagtatatatttagcagtgaaatagccgagatggaagatattcctagccggactgaggagccctctgaaaaaaaggtgcccctagatatgagcttattccttaagctgcaaaagcgggtcactgaactcgaacaggaaaagcaagtcatgcaagatgagctggatcgaaaggaggagcaggtcctccggtcaaaagcaaaggaggaggagaggccccagattagaggcgctgagctcgaatatgagtcactgaagcgtcaagaactagagtcagaaaacaaaaaactcaaaaacgagctgaacgagctgagaaaagcattaagcgagaagagtgcaccagaagtgacagcccctggagcacctgcctatagagtgctaatggagcaactgacctctgtctccgaggagcttgatgtgagaaaggaagaggtgttgatccttcgttcccagctcgtgtcccagaaagaggccattcagcctaaggacgataaaaacaccatgaccgacagcaccatactcctcgaagatgttcagaaaatgaaggacaaaggcgaaatcgcccaggcctacattgggctgaaggaaacgaacaggagttccgccttggactaccatgagctgaatgaggacggtgagctctggttggtatatgaaggactcaaacaggcgaacagattgctggagtcacagctgcagtcgcagaagagaagccacgagaatgaagctgaagccttgcggggagaaattcagagtttaaaggaagagaacaaccgccagcagcaactgctcgcccaaaaccttcagttaccccctgaagctagaatcgaggccagtttgcagcacgagataactagattaaccaatgagaaccttgacctgatggaacagctggagaagcaggacaagacagttcgcaaactgaaaaaacaactgaaagtctttgcaaagaaaattggtgagcttgaagtcggacagatggaaaatatttcacctggtcagatcatcgacgaaccgatccgccctgtcaacataccacggaaagagaaggacttccaggggatgctcgaatacaagaaggaagacgagcagaaactggtgaagaacctcattctggaactcaagccaagaggggtggctgtgaacctgatccccggtctccctgcttacatcctgttcatgtgtgtacgacatgcggattatctcaacgacgatcagaaggttagatcccttctcacctctactattaacagtattaagaaagtgctcaagaagcggggagacgacttcgagacagtcagcttttggttatctaatacttgtcggtttttacactgtctgaaacagtactctggagaagagggatttatgaagcataacacctccagacaaaacgagcactgtttgactaattttgacctggctgagtacagacaggtgcttagcgacctggccatccaaatatatcagcagctggtacgggtcctggaaaacattctgcaacccatgattgtctcaggcatgctagagcatgagactattcagggagtgagcggcgtgaagccaacaggactgcggaaacggacgagttctatagcagatgaagggacttatacactggacagtatcctgcggcaacttaacagctttcattcggtgatgtgtcagcacggaatggaccctgaactgattaagcaagtggtgaagcagatgttctatataatcggggctatcactctcaacaatctgctcctccgcaaggacatgtgcagctggtcaaagggcatgcagattcgctacaacgtttcccagttggaggagtggctgagggacaaaaacctgatgaatagcggggcaaaagaaacccttgaaccgctcatccaggcagctcagctcctacaggtgaagaagaaaacggatgatgacgcggaagcgatttgctccatgtgcaacgccttgactacagctcagattgtgaaggttttaaacctgtatacgcccgtgaacgagttcgaagagcgcgtgagcgtaagttttatacgtactatccagatgaggttgagagatagaaaggactctccacagctgctcatggacgccaaacacatattccccgtgacctttccatttaatccctcctccttggctcttgaaacaatccagatccctgccagtctcggtctgggtttcatcagccgtgtcta

SEQ ID NO: 231630 - DNA, 5558 bp, synthetic construct
  misc_feature 1..5558: note = Description of Artificial Sequence: Synthetic coding sequence
  source 1..5558: mol_type = other DNA
atggctgcctctgagctgtacaccaaatttgctagggtttggattcctgatccagaggaagtctggaagtctgctgagctgctgaaggattacaagcccggagataaagtactgctcctccacttggaggaaggcaaagacctggaatatcatctcgatccaaagacgaaggaactgcctcatctgaggaatccagacattctggttggcgaaaatgatctgaccgcactaagctacttacatgaacctgccgttctgcacaacttacgcgtgcggtttattgatagcaaattaatttatacctactgcgggatcgtcctggtggccataaacccttatgaacaactcccaatatatggcgaagacatcatcaatgcctacagtgggcaaaatatgggggacatggaccctcatatttttgcagtcgctgaagaggcctacaagcagatggccagggatgagaggaatcaatcgatcattgtgagcggtgaatcaggcgcaggcaaaacggtctcagctaagtacgcaatgcgttacttcgcgactgtgagcggaagcgccagtgaagcgaacgtggaggaaaaggtgctagcaagcaatcccatcatggagtcaataggcaacgctaagactactagaaatgacaatagcagccgctttggtaagtacatcgagattggtttcgacaagcgatatcgaatcataggagcaaatatgagaacctacttgttggaaaagagcagagtagtgtttcaggctgaagaagagagaaattatcacattttttaccaactgtgcgcctctgcgaaactgcccgagttcaaaatgttgcgcctaggtaatgcagacaatttcaactatactaagcagggaggttctcccgtgatcgaaggcgttgacgacgcaaaggaaatggctcatacacgccaggcttgcactctgctaggcatctcagaaagccaccagatggggatcttccggatcctcgccggaatcctgcacctggggaacgtcggatttacctcccgtgacgctgattcatgcaccatcccacctaaacacgagccactgtgtattttttgcgagctgatgggggtcgattatgaggaaatgtgtcactggctctgtcatcggaaactagcaacagccactgagacgtacataaaacccatcagcaagctgcaggctactaacgcaagagacgctctggcaaagcatatctacgccaagctcttcaattggattgtggataatgtgaaccaggcacttcacagcgcagtcaaacagcattcttttatcggagtcctcgacatctatggatttgaaacctttgaaataaactcgttcgagcagttttgtatcaattacgcaaacgagaagctccaacagcagttcaacatgcacgtgtttaaactggaacaggaggaatatatgaaagagcagattccgtggaccctgatagacttttatgacaaccaaccatgtataaatctgatcgagtccaaactaggcattctggatttgctcgatgaagaatgcaagatgcctaagggaacagatgatacatgggctcaaaagctttacaatacgcacctcaacaagtgcgccctgttcgagaaacccaggttgtccaataaggcatttataatacagcacttcgcggacaaagtggagtaccaatgtgaggggttcctcgagaagaacaaagacaccgtatttgaggaacagatcaaagtgcttaaatcatccaaattcaagatgctgcccgaactcttccaggatgatgagaaggctattagcccgaccagtgccacttctagcggtcgcacacctctgacaaggactcctgccaagccgaccaaggggagaccaggacagatggcaaaagagcacaaaaaaactgtgggtcatcaatttcggaatagtctgcaccttctgatggaaacccttaatgcaactacaccacattatgtgcgctgcattaagcccaatgactttaaatttcctttcacttttgacgaaaaacgggcagtacagcagctccgtgcctgcggggtgctggaaacgattaggatctccgcagcagggtttccttctagatggacttatcaggaatttttttccagatatagggtgctgatgaaacagaaggatgtgctgtcagatcgaaagcagacgtgtaagaacgtgctggagaaattgatcctggataaggataaatatcagttcggaaagactaagattttttttagggctggccaagtggcttacctggagaagctgcgcgctgacaagttgcgggcagcctgcattcggatccaaaaaaccattcgaggttggctgctgcgaaaaaagtaccttaggatgaggaaggctgctattaccatgcaacgctatgtgagaggttaccaggcgaggtgctacgccaagttccttcgaaggaccaaagccgctaccataatccagaagtattggaggatgtacgtcgtccggaggaggtataagataaggcgagccgctaccatcgtgctgcagtcttatttgcgaggttttctggccagaaatagatacaggaagattctacgagaacacaaggctgtgatcatccagaagcgcgttagaggctggctggccaggacacattataagaggagcatgcatgcaatcatctacctgcagtgttgttttaggcgcatgatggctaaacgcgagttgaaaaagctcaagatcgaggctaggagtgtggagaggtacaagaaactccatatcggcatggagaacaaaataatgcagctacaacggaaggtggatgaacaaaacaaggactataaatgtcttgtggaaaaactgacaaatctcgagggaatatacaattccgagaccgagaagctcagaagcgatttggagcgactgcagctctccgaggaggaggccaaggtcgctacagggcgagtcctgtctctgcaggaggaaattgccaagttacgaaaagacctcgaacagacaagatcggaaaagaaatgcatagaggagcacgctgaccgctacaaacaggagaccgagcagttggttagcaatctcaaagaggagaatactctcctgaagcaggagaaggaggccctcaaccacaggattgtgcagcaggcaaaagaaatgaccgaaacaatggaaaagaagctagtggaggaaaccaagcagctggaactcgatcttaatgatgagcgcttacgataccagaatctcttgaatgagtttagcagattggaggaacgatacgatgacctgaaggaagaaatgactctcatggttcacgtgccgaagcccggacataagcgcacagattcaacccactctagcaatgagagcgagtatattttttcctccgagatagctgaaatggaggacattccttctaggaccgaggaaccctcagaaaaaaaagtgcccctggacatgagcctcttcctgaagctgcagaaacgcgtgacagaactggagcaggaaaagcaggtgatgcaggacgaactcgaccggaaggaggagcaagtcctgcgatccaaagctaaagaagaagaacgccctcaaattcggggtgccgagctcgaatacgagtccctgaaaagacaggagctggagtcagagaacaagaagttaaaaaatgagcttaatgagctgcgcaaggccctaagcgagaaaagcgcccctgaagtgacggcccctggggctcctgcttatcgcgtgctgatggagcagctgacctcagtttcggaggaattagatgtaaggaaagaggaggtactaatcctgcggtcgcagttggtatcacagaaggaggccattcaacccaaaaataccatgactgattccacaatcttactggaggatgtgcagaaaatgaaagacaaaggcgaaatcgcccaggcctatataggcttgaaagaaaccaacagatccagcgccctggactatcatgagctgaatgaagacggcgagctgtggctggtttacgagggactcaagcaggcaaacaggcttctcgagtcccagctccaatcccagaagcgcagccacgagaacgaagctgaagccctgagaggcgagattcagtccctgaaagaagagaacaaccgacagcagcagctgctggcgcagaatttacagttaccccctgaagccaggatcgaggctagcctgcagcatgagattacccgtctcaccaatgagaatcttgatctgatggaacagctggagaaacaggataagactgttcgtaagctgaaaaagcaattgaaggtctttgctaaaaaaataggcgaattagaggtgggccagatggagaatatttcacctgggcaaataatcgacgagccaattcgcccagtcaacattccccgaaaggaaaaggatttccagggcatgctcgaatataagaaggaggacgagcaaaaactcgttaagaatctgattttagaactgaaacccaggggtgtggccgtaaatcttatccctggactccccgcatacatcctgttcatgtgcgtgcgccacgctgattacctgaacgatgaccagaaagtgcggagcttgctgacatccactatcaatagcattaaaaaggtgctgaagaagcgcggagatgatttcgagacggttagcttttggctcagcaacacttgtcggtttctacactgcttgaagcagtacagtggcgaagagggatttatgaaacataatactagccgacaaaacgaacattgtctgaccaacttcgacctggccgaataccgccaggtgttgtccgacttggccattcagatataccagcagcttgtgcgagtcctggagaacatcctgcagccaatgatcgtgagtggtatgctggaacacgagacgattcagggtgtatcgggggttaaacccaccgggctgcggaaaaggacctcttcaatcgccgacgaggggacctacaccctagattctatccttcgtcagctgaacagctttcactccgtgatgtgccaacatgggatggatcctgagctgattaaacaggtagtcaagcagatgttttacattataggggcaataaccctgaacaatctgttactgagaaaagacatgtgctcctggtcgaaaggcatgcagattcggtacaatgtgagccaactggaagagtggctgcgggacaagaacctgatgaattctggggctaaggagacattggagccacttatccaagccgcacagctgctgcaagtgaaaaagaaaacagacgatgacgccgaagctatctgcagtatgtgtaatgcactgacgactgcccagatcgtgaaagttctgaacttgtacaccccagtgaacgagtttgaagaaagggtgtccgtgagcttcataagaacgatccagatgcgcctacgcgaccgtaaggacagtccccagttgctgatggatgcaaagcatattttccccgttacgttccctttcaacccctcaagtctggctctcgagacaattcaaatccccgcaagcctagggctgggcttcatctcccgcgtgta

SEQ ID NO: 231631 - DNA, 4376 bp, synthetic construct
  misc_feature 1..4376: note = Description of Artificial Sequence: Synthetic coding sequence
  source 1..4376: mol_type = other DNA
atgtgtcactggttatgccataggaaactcgccaccgccacggagacctacatcaaaccgatttctaaattgcaagccacgaatgcaagagatgcactggccaaacacatctacgccaaactattcaattggattgtggataatgtaaaccaagccttgcactctgcggtgaagcagcatagcttcatcggggttctcgatatctatggatttgagacgttcgagattaactccttcgagcaattctgcataaattatgcaaatgagaagctccagcagcagttcaacatgcacgtattcaagttagagcaagaagagtacatgaaagaacaaatcccttggacactgattgacttttatgacaaccaaccatgtataaacctaatcgaatccaaactgggcattttagatctgctcgatgaagaatgcaagatgcctaaaggcacagacgatacatgggcacagaaactctataatacacatctcaacaaatgcgctctctttgaaaagcccaggctgagtaacaaagccttcatcatccagcattttgcggacaaagtagagtatcagtgtgaaggtttccttgagaagaataaggataccgtgttcgaagaacaaatcaaagtgctgaagtcttcaaagtttaagatgttgcctgagctctttcaggatgacgaaaaggccatatcaccaactagtgccactagcagtggccgaactccactgacaaggacccccgctaagccgacaaaggggcgtcctggtcagatggcgaaagagcataagaagacggtcggccaccagttcaggaattccttgcatctgctcatggagaccctgaatgccactaccccacattacgtgagatgcatcaaacccaacgacttcaaattcccctttacattcgacgaaaagcgagctgtccagcagttgagagcctgcggggtactggagaccatacggatctcggcggcaggattcccttcccggtggacatatcaagaattcttctcccggtacagggttctgatgaaacagaaggatgttctgagtgatagaaaacagacatgtaagaatgtactggagaagctaattttggataaagataaatatcagttcggcaagacaaagattttctttcgcgctggacaggttgcgtatctggaaaaattgcgagctgacaaactcagagcagcctgtatccgaatccagaagactatcagagggtggctgctacggaaaaaatacttgcgcatgcggaaagccgcaatcaccatgcaacgatacgtgagaggctaccaagctcgatgctacgccaaatttctcagacggacaaaggcagcaaccattattcagaagtactggcgcatgtacgtcgtacggagacggtataagatccgacgggcagcaactatcgtgcttcagtcatacctgcgcggattcctagcccgaaataggtatagaaagatcttgagggagcataaagccgtcattatccagaaaagggtccggggttggcttgccaggacacactataagagatccatgcatgccattatatacctgcagtgttgcttccgacgaatgatggcaaagagagaactgaaaaagctgaagatagaggcgagaagtgtggagcgctacaaaaaactgcacatcggtatggagaataagataatgcagctgcaacggaaagtggatgaacagaataaggattataagtgtctagtcgaaaagctgacgaacttggagggaatttacaactctgagacagaaaagctccggtccgacctggagcgactgcagctgagcgaggaggaagctaaagtggccactggtagggttcttagtctgcaggaagagattgccaagctgaggaaggatttggagcagacccggtctgagaagaagtgcattgaagaacacgcagacagatataagcaggagactgagcagctagtctctaacctgaaggaagaaaacaccctgctgaaacaggagaaggaagccctgaatcatagaatcgttcagcaggccaaggagatgaccgaaacaatggagaagaaactcgtggaagagacaaagcagttagaactggatctgaatgatgaacgtctcagataccagaacctgctgaatgaattttcaaggctggaggaaaggtatgatgatctaaaagaggagatgacactaatggtgcacgttccaaagcccggtcataaaagaaccgactctacacactcatctaacgagagcgaatacatttttagctccgaaattgcagaaatggaggatatcccttctcgaaccgaagagccatctgaaaagaaggttccactagacatgagtctatttctgaagctgcagaaacgtgtcacagagctagaacaggaaaagcaggttatgcaagacgaactggaccgcaaagaagaacaggtcctgaggtcaaaggctaaagaggaggaaaggccccagatacgcggagccgaactggagtatgagagtctgaaacgccaggagctggaatccgagaataagaagctcaagaacgagctcaatgagctgcgcaaagctctctccgagaagtccgccccagaagttacggcccctggagccccagcttatcgggtgcttatggaacagctgactagtgtgtccgaggaactcgatgtgcgaaaagaggaagtgctgatcctgcggtcccaactggtgagtcaaaaagaggccatccagcccaagcttcacgagaacaccatgaccgatagcactattctactggaggatgtacagaaaatgaaagacaaaggggaaattgcccaagcctatattgggctgaaggaaacgaaccggctgctcgagtcccagctacagtctcagaagaggagccacgagaacgaggctgaggcattgcgaggagagatccagtcgctgaaggaggagaacaatcgccagcagcaacttctggcccaaaatctccagctgcctcccgaggcccgtatagaagcaagtctgcagcacgagattacgaggctaacaaatgagaatctggatcttatggagcaacttgaaaaacaggataagacggtcagaaagctgaagaagcaacttaaagtgttcgcaaaaaagattggggagcttgaagtgggacagatggagaatattagccccggtcagattattgacgagcctattcgtccagtgaatattccaaggaaggaaaaggacttccagggtatgctggaatacaagaaggaggacgagcagaagctggtgaaaaatctcattctagagctgaagccacgcggagtggctgttaatctgattccaggtctcccagcgtatattctctttatgtgcgtgaggcatgccgattatctgaatgatgatcagaaagtgcgcagcctcctgacctccactattaattcaataaagaaggtccttaagaaaaggggggacgatttcgagaccgtgagcttctggctttccaacacttgcagattcctccattgtctgaaacagtattccggagaggagggctttatgaaacacaatacatctcgccagaatgaacattgtcttacaaattttgatttggcagaataccgccaggttctgtctgatcttgccattcaaatttatcagcagctggtcagagtcctggaaaatatactgcagcctatgatcgtaagtggcatgctggaacacgagactatacaaggcgtgagcggcgttaaaccaacgggactgcggaaacgcacaagctctattgccgatgaggggacatacactctcgattcgattctgcgacagttgaactcatttcattctgtgatgtgccagcacggaatggacccagagctcatcaaacaggttgtgaaacagatgttttacatcattggggcaatcacgctgaataatctcctgttgagaaaggatatgtgctcatggagcaagggcatgcagatcaggtacaacgttagccaactagaggagtggctgagggacaagaaccttatgaactccggggcaaaagagacgctcgaaccactcatacaggccgcacagctcctccaggtgaagaaaaaaactgatgatgacgctgaagccatttgttcaatgtgcaacgccttaacgacagcccagatagttaaggtccttaatttgtacacacccgttaacgaattcgaggaacgggtgagcgtctcattcatccgaaccatccagatgagattgcgggacagaaaggactctcctcagttgcttatggatgctaaacacatttttcccgtcacttttccttttaacccctcgtctctggcactggagactatccagatccccgcatctctaggactgggattcattagtagagtcta

SEQ ID NO: 231632 - DNA, 5562 bp, synthetic construct
  misc_feature 1..5562: note = Description of Artificial Sequence: Synthetic coding sequence
  source 1..5562: mol_type = other DNA
atggctgcctctgaactgtacactaagtttgccagagtatggatccccgaccccgaggaggtgtggaagtccgccgagctccttaaagactacaaaccaggagacaaggtgttactgttgcacctggaagagggaaaagatctagaataccacctagatccaaagaccaaggagcttccgcatcttagaaacccagacatcctggtgggggaaaacgatcttaccgccctgtcatacctgcatgagccagctgtgctccataacctgagagtgcgctttatcgatagtaagctcatctacacttattgtgggatcgtgctggtagccatcaacccttatgagcagctccctatctacggggaggacattatcaatgcttattccggccagaacatgggggatatggacccccatatctttgctgtggcagaggaggcttacaagcagatggcccgtgatgagcggaaccagtctataattgtaagcggtgagtctggggcagggaagaccgtaagcgccaagtacgctatgcgctactttgcaactgtgtccgggtccgcatctgaggccaatgtggaggaaaaggtcctggctagtaatccaatcatggaaagcatcggcaacgccaaaaccacccggaatgacaattctagccgctttggcaagtatatagagatcggcttcgacaagaggtaccggataatcggcgcaaatatgcgcacctatctactggagaaaagccgagttgtgtttcaggccgaggaagaaagaaattatcacatcttctaccagctgtgcgcctctgcaaagctccccgaattcaagatgctccgtctggggaatgcggacaactttaactatacaaaacaagggggttctcctgttatcgagggggtcgatgacgccaaggagatggcgcacactagacaggcctgcacactgctcgggatcagcgagtctcaccaaatgggcattttcaggattctcgctggtatcttgcatcttgggaatgtgggtttcacatctcgcgacgcggacagttgtaccatcccccctaagcacgaaccattgtgcatcttctgcgaactgatgggggttgactatgaggaaatgtgccactggttgtgccaccggaagctggccaccgctacggagacttacatcaagccaattagtaaattgcaggccacaaatgcgcgagatgcccttgccaaacacatctatgctaaactgttcaactggatagtcgataacgtgaaccaggcgctgcacagtgccgtgaaacagcactctttcattggggtgcttgacatatatggattcgaaacttttgagattaactccttcgaacaattttgcatcaactatgctaacgagaagctacagcagcaatttaacatgcatgtgtttaagttagaacaggaggagtacatgaaggagcagataccttggacactaatcgacttctacgacaaccagccttgtatcaacctgatcgagagtaagttgggtatactggatttgcttgacgaggagtgcaagatgccaaaaggcactgatgacacatgggcgcagaagttgtataatacccatttgaataaatgcgcgctgtttgagaagcccaggctgagcaacaaagcattcatcattcagcatttcgctgacaaagttgaatatcagtgtgaggggtttttggaaaaaaacaaggatacagtgttcgaagaacagatcaaagtgttgaaaagtagcaagttcaagatgctgcccgagctatttcaggacgatgagaaggccatttccccaacttctgcgactagctcaggcaggaccccactgactagaacgcccgctaagcctaccaagggtcggccaggccaaatggccaaggaacacaagaagacagtgggacaccagttccgcaatagtttgcacttgctgatggagacactaaatgctaccacaccacattatgtccgctgcatcaaacctaatgatttcaaatttccatttaccttcgacgagaagcgcgctgtgcagcagctgagggcttgcggggttctagaaactatccggattagtgccgctgggttcccaagcaggtggacctatcaagagttcttctctcgctaccgagtgctcatgaagcaaaaagatgttctgagtgaccggaaacagacatgcaaaaacgttctggaaaagctgatactggacaaagacaagtaccagtttggaaaaaccaagatatttttccgagctggccaagtcgcatacctcgagaagttgcgagccgataagctacgtgccgcatgcattaggatccagaagacaatccgaggctggctgcttaggaagaagtatttgcgtatgcgaaaggccgcaataaccatgcagcgttatgtgcgtggctaccaggctcgatgttatgccaagtttctccggagaacaaaagctgccacaattattcaaaagtactggcggatgtacgttgtgcgaagacgatacaaaatcaggagggccgctactatagtgctgcagtcatacctgagaggatttcttgcacgcaatcgataccgtaagatcctgcgggaacataaggcggttatcattcaaaaacgagtcaggggttggctggctcggactcactacaaacgatcgatgcacgcaataatttacctacagtgctgcttccgccgaatgatggctaagcgcgagctgaaaaagctgaagattgaggcacgctccgtggagcgctataagaagttacacataggaatggaaaataaaattatgcagctccaacgcaaggtcgacgagcagaacaaagactacaagtgcttggtggagaaactcacaaatttggagggtatctacaattcagagaccgagaaactgcgctctgacctagaacggctgcagctctctgaggaggaagctaaggtggcaaccgggcgtgtgctttcactccaggaggaaattgccaaactgcgcaaggacctggagcagactagaagcgaaaaaaagtgtatcgaggaacatgcagaccgctacaagcaggaaacagagcaactggtttccaacctcaaggaggaaaacacactgctgaaacaagagaaggaggccctgaaccataggatagtacagcaggccaaggaaatgacagagacaatggaaaaaaagctcgttgaggagaccaaacagctggagttggatctaaatgatgagcgactcaggtaccaaaaccttctaaacgagttttcacggctggaagagaggtacgacgatcttaaggaggaaatgactcttatggttcacgtccccaagcctgggcacaaacgcaccgatagcactcactcttcaaacgagagcgaatacatcttcagttctgagattgcagagatggaagacatcccttctagaactgaggaaccgtctgaaaagaaggtgcctttggacatgtccctttttctcaagcttcagaagagggtgacggaactggagcaggagaagcaggttatgcaggatgaactcgaccggaaggaggaacaggtgctcagatcgaaagcaaaggaggaggagagacctcagatacggggtgctgagctggaatatgagtctttaaaacggcaggagctggagtcagagaataaaaagttgaagaacgagctcaacgaactgaggaaagctctttccgagaagtccgcccctgaggtcacagcacccggtgctcctgcctaccgagtgctgatggaacagctgacctcggtctcagaggagctcgacgtaagaaaggaggaggtcttgattctcagatcacagcttgtcagccaaaaggaagctatccagcctaaggacgacaagaatactatgacagacagcacaatcttgttagaggacgtgcagaaaatgaaggataaaggggaaatcgcgcaggcatatatcgggctcaaagagactaaccgtctgctggagtcccagcttcagtcacaaaaacggtcccacgagaacgaggctgaagcactgcgcggtgaaattcaatcgctgaaagaggaaaataaccgccagcagcagctgctggcacaaaatctccaactgccccctgaggccagaatagaggccagcctgcagcatgaaatcacgagattgactaatgagaatctgtacttcgaagaactctacgccgatgatcccaaaaaataccagtcgtacagaatctcgttgtacaagcggatgattgacctgatggaacagttggagaagcaagacaagacagtacggaagctgaaaaaacagttgaaggtgttcgctaagaagatcggcgagctggaagtaggccagatggagaatataagtcccggtcagatcatcgacgaaccgatccgccctgtaaacatccccaggaaggaaaaggacttccagggcatgttggagtataaaaaagaggacgagcaaaagctagtcaagaacctgatcctggagttaaagcctcgcggagtggcagtaaatctgatccccggactccccgcatacattttgttcatgtgcgtgagacatgccgactacttgaatgatgatcagaaggtccgcagcttactgacaagtacaatcaacagcatcaaaaaagtgctaaaaaagcgaggagacgattttgagaccgtgagcttctggctatctaatacttgtcggttcctgcactgccttaaacagtatagcggggaggaaggtttcatgaaacacaacacatccagacagaacgaacattgcctgacgaacttcgacctggctgagtatagacaagtcctaagcgacctcgcaatacagatataccagcagctggtgagggtcctggaaaatatcctgcagcctatgatcgtgtctggcatgctcgagcacgagaccatccaaggcgtcagcggcgtaaaacccactggactaagaaagcgtacatcctccattgcggatgagggtacttacacgttggattcaattctccgccaactgaatagttttcacagtgtgatgtgccagcacggcatggatcctgaactgattaagcaggttgttaagcaaatgttctacattataggcgcaatcactctgaataatctcctgctccgtaaggatatgtgttcctggagcaaggggatgcaaattaggtacaacgtcagccagctggaggagtggcttagggacaagaatctcatgaacagtggggctaaggaaacccttgagcctctcatccaggcagcccagctgctccaggtcaaaaaaaagaccgatgacgacgcggaggctatttgtagtatgtgtaatgctttaacaaccgctcagatcgtgaaggtgctgaatctgtacacccctgttaacgaatttgaagagagagtgtctgtcagttttatcagaacaatccaaatgagacttagggaccgaaaagatagtccacagttactaatggacgccaagcacatttttcccgtcacgtttccatttaacccatcttccctggctctagagaccattcagatacccgcaagcctgggactgggcttcatctcgcgcgtctag

SEQ ID NO: 231633 - DNA, 5547 bp, synthetic construct
  misc_feature 1..5547: note = Description of Artificial Sequence: Synthetic coding sequence
  source 1..5547: mol_type = other DNA
atgtctgtaggggagctgtacagccagtgcaccagggtctggatccctgacccggacgaagtgtggcgcagcgccgagcttacaaaagactataaggagggcgataagagcctccagctgcgcttggaggacgagacgatccttgaataccccatcgacgtacaacgaaatcagctcccgttccttagaaacccagatattctcgtcggggagaacgacctgaccgctctaagctatctccatgaacccgctgtcctgcataatctgaaggtcaggttcttagaatcaaatcacatttacacctattgtgggattgtcttagtcgccataaacccctatgaacaattgccgatatatggacaagatgtcatttacacgtacagtggacagaatatgggcgatatggaccctcacatatttgccgttgccgaagaagcatataaacagatggctcgcgacgagaaaaaccaatccatcattgtgtccggagagagtggcgctggcaagacagtgagcgccaaatacgctatgcgctatttcgctacagtgggtgggtccgcctctgagactaacattgaagagaaggtgctggcttcaagtcccatcatggaggccattgggaatgccaaaacaacccggaacgataattcatcaagattcggtaaatatattcagatagggtttgacaaacgctatcacatcattggcgctaatatgaggacctacttgctcgagaaaagtagggtggttttccaggcggatgatgagcggaattatcatattttctaccagctgtgcgctgccgctggcctgccagaattcaaagagctcgctttaacgtcagccgaggactttttttatacaagccagggaggcgatacaagtatagagggggttgatgacgccgaggactttgaaaaaacaaggcaagccttcacgcttttgggcgtgaaggagtctcaccagatgtcaatatttaagattatcgcctctatcctccatctgggcagcgtggccatccaggcagagcgtgacggagattcatgttcgatatctcctcaggacgtctacctgtctaacttctgcaggctgttgggtgtggagcacagtcaaatggagcactggctttgccatcgcaagctcgtaaccacttcagagacctacgtcaaaacaatgagcctgcaacaggtcatcaacgcacgcaacgctctggccaaacacatttacgctcagttgtttggctggattgttgaacacatcaataaagccctgcacaccagcttgaagcagcattccttcatcggggttctggatatatatggtttcgaaacctttgaagtcaatagtttcgagcagttctgtatcaattacgcgaacgagaagctgcagcagcagttcaatagccacgtgtttaagctcgaacaggaggagtacatgaaagagcagattccctggacactcatagacttttatgacaaccaaccatgtatagatttaattgaagcaaagctgggaatcctagacttattagacgaggaatgcaaggtgccgaaagggaccgaccagaactgggctcaaaagttgtatgatagacattcttcttcacagcacttccaaaagccacgcatgtcaaatacagcctttattatcgtgcatttcgccgacaaggtggagtacttgtccgacgggtttctggaaaagaaccgcgacacggtgtacgaggaacagatcaacattctaaaggcatccaaatttccgctggttgctgatctattccatgacgacaaggacccggtgcctgcaactaccccaggaaagggttcaagctcaaaaatatctgtgcggtctgcacgcccacccatgaaagtatccaataaggagcacaagaagaccgttggccaccagtttcgcacatccctgcatttgttgatggagacactgaacgctactacacctcactatgtacgctgcatcaaaccgaatgatgaaaagcttccctttcactttgaccccaagagggcagtgcagcagctgcgcgcttgcggagtgctcgagaccatccgaatttcagccgctggatatccctctcgatgggcctatcatgatttcttcaataggtatcgcgtgttagtcaagaagcgggaactggccaacaccgacaaaaaggcaatttgccgcagcgtcctcgagaatctgatcaaggaccctgacaagtttcagtttggacgaaccaagattttcttcagggccggacaagtggcttaccttgagaagcttagggctgacaagtttaggacagcaactattatgattcagaagaccgtgagaggctggttgcagaaggtcaaatatcatcggttgaagggagctactctaactctgcagcgctattgtcggggtcatcttgcgagacgactggctgagcatctgaggcgaatccgtgctgccgtggtgctgcagaagcactaccgcatgcagcgcgcacgacaggcttatcagcgggtgcgtcgagctgcagtcgttatacaggctttcactcgggctatgtttgtgcggagaacgtaccgacaggtgctcatggagcacaaagctacaaccattcaaaagcacgttcgaggctggatggctagacgacacttccagcgtctccgcgacgccgcaatcgttatccagtgcgcctttcgcatgttgaaggccagacgtgaactcaaggcacttcgtattgaggcaaggagtgccgaacacctgaaacgtctcaacgttgggatggaaaataaagtagtccagttacagaggaaaattgatgagcagaataaagaatttaaaacactcagtgagcagctcagcgtcaccaccagcacgtacacaatggaggtagaacgccttaagaaagagctggtccattatcagcagtccccaggcgaagacaccagtctgcggttgcaggaagaggtagaatctctccgaaccgagctccagagagcgcactccgaacggaaaatactcgaggacgcgcattcgagagagaaagacgaactccgcaaacgggtcgccgacctagagcaggagaacgctttgctaaaagacgaaaaggaacagctcaataatcagatactatgccagagcaaggacgagttcgctcagaactcggtgaaggagaacctcatgaaaaaggagctggaggaggagcggtcccggtaccagaatctggtgaaagagtacagccagctggagcaacgctatgataaccttcgcgacgaaatgactataatcaagcagacaccaggccatcgacgtaaccctagtaaccagtcatcactggaatccgacagtaactatccaagcatcagtactagtgaaatcggagatactgaagacgcgcttcagcaggttgaggagattgggcttgaaaaagccgctatggatatgacggtctttctgaaactccagaagagagtgagagaactggaacaggaaagaaagaaactgcaggtccagttagaaaagcgcgagcagcaggactccaaaaaggttcaggcagagccccctcagacagatattgacctagatcccaatgctgacctggcctacaactcactcaaacgccaggagctcgagtccgaaaataaaaaactaaagaacgacctcaatgagcttcgtaaagcggtggcggatcaagctacccaaaacaattcatcccacggaagccccgatagctactcactgctgttgaatcaactgaagcttgctcacgaagagctggaggtcaggaaagaggaggtgttgatcttgagaacgcagatcgtcagcgccgatcaaagacgccttgccggaaggaacgctgagccaaacattaatgcgagaagcagctggcccaattctgaaaaacatgtggaccaggaggacgcaatcgaggcttatcacggcgtttgtcaaactaattcgaaaacagaagactggggctacctgaacgaggacggcgagctgggcctcgcttaccaaggcctgaagcaggtggcccgactcctcgaagctcagctgcaggcacagagtctggagcacgaggaggaggtagaacacctgaaggcacagctggaagcacttaaagaggaaatggacaaacagcaacagacgttctgtcagaccctcttgttatctcccgaagcccaagtggagttcggagtgcagcaagaaattagtcgcctcacaaatgagaatctggacctcaaggagttggtggagaaactggagaagaacgagcggaaattgaaaaaacagcttaaaatatatatgaaaaaagctcaagacctggaagccgcacaggcgcttgcccaaagcgagagaaagcgccatgagcttaatcgtcaggtgactgtccagcggaaggagaaagactttcaggggatgctcgagtaccacaaagaggacgaagccttgctgattcggaacctggtgacggatttgaagccccagatgctctcaggcacggtgccttgcctccctgcgtacatcctgtacatgtgtattaggcatgcagattatacaaatgacgatctcaaagtgcactcactgctgacctccacaattaatgggatcaaaaaggtgctcaagaaacacaatgacgatttcgagatgaccagcttctggctgtccaacacgtgtaggctgctgcactgcttgaagcagtacagcggcgacgagggatttatgactcagaatacggccaaacagaatgagcactgcctgaaaaatttcgacctgaccgaataccgccaggtgctctcggatctgagcatacagatttaccagcaactcataaaaatagccgaaggcgtgctccaacccatgattgtctccgcgatgctggagaatgagtctattcagggattgagtggcgttaagcctacaggctacagaaaacgctccagttcgatggctgacggggataacagttactgcctggaagcgatcattagacagatgaatgcctttcacacagtgatgtgtgatcagggcctagatcctgaaatcatactgcaagtgttcaagcaattgttctacatgatcaatgcagttaccctcaataacctgctattacgcaaggatgtatgtagttggagcactggaatgcaactgcgatacaatattagccagctggaggaatggttgcggggacgtaatcttcatcaatccggcgctgtgcagaccatggaaccactcatacaggcagcccaattgcttcagctgaagaaaaagacgcaggaggacgcggaagcaatctgctctctgtgcacttctctttcaacccagcagatagtgaagatcctgaacctgtacacgcctctcaatgagtttgaggagagggtaactgtggcattcattcgcacaatacaggcgcagctgcaggaacgtaatgaccctcagcagttgctgctagatgccaagcacatgttcccggtcttgttcccatttaaccccagttccctgaccatggattcaatccacatccccgcttgccttaacctggagtttctgaacgaggtgtac

SEQ ID NO: 231634 - DNA, 2892 bp, synthetic construct
  misc_feature 1..2892: note = Description of Artificial Sequence: Synthetic coding sequence
  source 1..2892: mol_type = other DNA
atggaacacaaggctaccacgattcaaaagcacgttcgagggtggatggcaagacggcattttcagcgtctccgggacgccgcaatagtgatccagtgtgctttccgaatgttgaaggcgaggcgggaacttaaggctctccgcatcgaggctaggagcgcagaacatctcaagcgcctgaacgtcggcatggagaacaaagtggtgcaactgcagaggaagattgacgaacaaaacaaagaatttaagaccttgtctgagcaattgtctgttacgactagcacctacacaatggaggttgagagactcaaaaaggagcttgtgcattatcagcagagtcctggtgaagatacctccctaagactgcaagaggaagtagagtctcttagaacagagctgcagagagcacactccgagaggaagatcctggaagatgcacatagcagagagaaagatgaacttcgtaagcgcgttgctgatctggagcaggagaacgctctgctgaaggacgagaaggagcagctaaataaccaaatcctatgccaatccaaggatgagttcgctcagaactcagttaaagagaatctgatgaagaaggagttggaggaggagcggtcgaggtatcagaatctcgtgaaggagtactcacagctggaacagaggtatgacaacttaagggacgagatgaccataataaagcagacgccgggtcacaggcgcaaccccagcaaccagtctagcttggagtccgattccaattacccgtctatctccacttccgagattggagacaccgaggacgcactccagcaggttgaggaaattggtttggagaaagcggctatggacatgactgtctttctgaaactccaaaagcgtgtccgagagcttgagcaggaacgaaaaaagctgcaggtacagttggaaaagcgcgaacagcaagactctaaaaaagttcaggcggagccccctcagactgatatcgatctagacccaaacgcagatttggcctacaattcccttaagcgccaggaattagaatccgagaataaaaagcttaagaacgatctaaacgaactgagaaaagcggttgcagatcaggctacacagaacaactcatctcatgggtcacctgactcttacagtctccttcttaaccaactgaagctcgcccacgaagaattggaggtccggaaagaagaagtgctgattctcagaactcaaattgtatccgccgaccagcggcgacttgcagggaggaacgctgagccgaatatcaatgcacgctcctcttggcctaacagcgagaaacacgtagatcaggaggatgccattgaggcgtatcacggtgtctgtcagactaatagactgttggaagcgcagttgcaggcccagagtctagagcacgaggaggaagttgaacatttgaaggcccagctcgaggcccttaaggaggaaatggacaagcaacagcagacgttttgccagaccttactgctgtctcccgaggcccaggttgagtttggagtacagcaggagatttcacggctgacaaacgaaaacctagacctgaaggagctggtcgagaagctggaaaagaatgagagaaaactgaaaaaacaactgaaaatctatatgaagaaagctcaggaccttgaggccgcacaggcgttggcccagagcgaaaggaagcggcatgagctaaatcggcaagtaactgtgcagaggaaagagaaagatttccagggcatgcttgagtatcataaggaggacgaggcacttctgatacgaaatctggtgacggatctgaagcctcagatgctttctggtacggtcccctgccttcccgcttacatactttatatgtgcataaggcacgctgactacaccaacgacgacctaaaggtacactctctcctcacctcaactataaacggtatcaagaaagtactcaagaaacacaacgatgacttcgagatgacgagcttttggctgtctaacacttgtcgacttctgcactgcctgaaacagtattctggtgatgaaggttttatgacccagaatacagcaaagcagaatgagcactgcttaaaaaacttcgatttgaccgaataccgccaggtgctctctgacctgtctattcaaatttatcagcagctcatcaagattgcagaaggcgtacttcagccaatgatagtgtcagctatgctcgagaatgaaagcatacaggggctgtccggagtcaaaccaacggggtatcggaaaaggtccagtagcatggctgatggcgacaactcctactgtctggaagcaataatccggcagatgaacgcatttcacacggtcatgtgcgaccaaggcctcgatcctgagattattctgcaggttttcaagcagctgttttacatgatcaatgccgtgactttgaataatttgctgttacgcaaggacgtatgcagttggtctactggcatgcagttgagatataatatctctcagctggaggagtggctgagagggagaaatttgcatcagtcaggggcagtacagacaatggagccattaattcaggcagcacagctccttcagcttaaaaagaaaactcaggaggacgctgaggcaatttgctctctgtgcacctcactttctacccagcaaatcgtcaaaatccttaatctatacacacccctaaacgaattcgaggagcgcgttaccgtagcgtttatccggacgatccaggctcagttgcaagaacggaacgatccccagcagctgctccttgacgctaaacacatgttcccagtactgttcccctttaatccatctagcctcacgatggacagtattcacattccagcgtgtcttaacctggagtttctgaacgaagtgtag

SEQ ID NO: 231635 - DNA, 2163 bp, synthetic construct
  misc_feature 1..2163: note = Description of Artificial Sequence: Synthetic coding sequence
  source 1..2163: mol_type = other DNA
atgcactggcctgtgacccgggagtgtaccagggtatggattcctgatcccgatgaagtgtggagatccgcagaattgacaaaagattacaaagagggcgataaatcattacagctgcgtctggaggatgagacgatcctcgagtaccccatcgatgtgcagcgaaatcagttgccgttcctgcggaatcccgacatactcgtgggcgaaaatgacctgaccgcattaagctatcttcacgaacctgccgttcttcacaacctcaaggtcaggttcctggagtctaatcacatttacacatattgtggcatcgttctggtggcgatcaacccctatgagcaactccccatttacggccaggatgttatctacacatattccggacagaatatgggtgacatggaccctcatatctttgcagtagcagaagaggcatacaagcaaatggcaagagatgagaaaaatcaatcaattattgtgtctggcgaaagtggtgcgggtaagaccgtgagcgcgaagtacgccatgagatactttgcgaccgtcggaggctccgcatccgagacgaatattgaagaaaaagttctcgccagttcgcccatcatggaggcaataggcaatgccaaaaccacccggaacgataatagttccagatttggtaaatacatccagattggattcgataaaagataccacataatcggggctaatatgaggacgtatttacttgaaaaatcccgtgtcgtattccaagccgatgatgagcgcaactaccacatattttaccagctgtgcgccgcagccggactgcccgaattcaaggagctggcattgaccagcgccgaggatttcttctatacctctcaaggcggtgatacgtcaattgagggggtcgacgatgcggaagactttgagaagacacgacaggcattcacactgttaggggtcaaggagtcacatcaaatgtctattttcaagatcatcgcgtccatccttcaccttggaagtgtggcaatccaggctgaacgggacggagatagctgttccatttctccgcaggacgtctatttgtctaatttctgccggctgctgggcgtcgaacacagtcagatggaacattggctgtgccatagaaagttggtcaccacgtcggaaacttacgtaaagacgatgagtctccaacaggtgatcaatgcacggaatgccctcgcaaagcacatctatgcccagctattcggttggatcgtggaacacatcaacaaggcccttcacacatccctgaagcaacacagctttattggtgtgctcgatatctacggcttcgagacgtttgaggtgaactcatttgaacagttttgtataaactacgcaaatgagaagctacagcagcagttcaactcccacgtgttcaaattggaacaggaggagtacatgaaagagcagatcccctggacactgattgatttttatgataaccagccttgcattgaccttattgaagccaagttgggcatcctggacttgctagacgaagagtgcaaagtcccaaaaggaaccgatcagaattgggcacagaagctgtatgaccggcatagttcgtctcagcattttcagaagcccaggatgagcaatacagcattcatcattgtgcatttcgccgataaagtcgagtatcttagcgacgggtttttggagaagaaccgggataccgtgtacgaagagcagattaacatccttaaagcgagcaaattcccactcgttgcagatctcttccacgatgacaaggacccagtgccagccaccacaccaggcaaggggagctcctccaagatctccgtcaggagcgcgagacctcccatgaaggtctccaataaagagcataaaaaaacagttgggcatcagttccgtaccagccttagtacacagcaaattgtgaaaatcttgaatctgtacacgcccttgaacgagttcgaagaaagggttacggtggccttcattaggactatccaggctcagttacaggaacgcaatgatccacagcagctcctccttgacgcaaagcatatgtttcccgtgttattccccttcaatccctcctccttgacaatggactcaatccacattcccgcatgccttaacctcgaattccttaatgaagtgtag

SEQ ID NO: 231636 - DNA, 5229 bp, synthetic construct
  misc_feature 1..5229: note = Description of Artificial Sequence: Synthetic coding sequence
  source 1..5229: mol_type = other DNA
atggctgtggccgagctctacactcagtataacagggtttggatcccggaccccgaagaagtctggaaatccgcagagattgctaaggattatcgtgtcggagataaggtgcttaggcttttgttagaggatggcaccgaacttgattactccgtcaaccccgagtccctcccccctctgcgcaaccctgacattctggtcggcgagaacgatttaactgctctctcatatctgcacgaacccgctgtcctccacaacttgcgtatacggttcgccgaaagcaaactcatctacacatacagcgggatcattctcgtggcaatgaacccctataagcagctgcctatatacggcgatgcaataatacacgcctatagtggacaaaatatgggtgacatggatcctcatatattcgcagttgccgaagaggcttataagcagatggccaggaataatagaaatcaatctattatcgtctcaggggaatccggcgcaggtaagacagtctccgctcgttacgcaatgcgttatttcgccacagtttcaaagtccggaagcaatgcacatgtggaggacaaggtgcttgcctctaaccccattactgaggcagtcggtaatgcgaaaactacacgcaatgacaattcttcgcgcttcggcaagtacactgagatttcgtttgatgagcagaatcagatcatcggggctaacatgagtacatatcttttggaaaaaagccgggtcgtgtttcaatccgagaatgagcgcaactaccatatattttatcagctctgcgcctctgcgcagcagtcagaatttaaacatcttaagctaggttctgcagaggaattcaactacactcgaatggggggaaacacagtgatcgagggagtaaatgatagagcagaaatggtggagactcagaaaaccttcaccttgctcggctttaaggaggactttcagatggacgtgttcaaaatcctggccgcaatcctgcaccttggtaatgtgcagataacggccgtggggaacgaacgttcctctgtgagcgaagacgacagtcacctgaaggtgttttgcgagctgttaggactagagtccggcagggtcgctcagtggctgtgcaatcggaaaatcgtgacctcatcagaaaccgtggttaagccaatgacccgcccacaggcagtcaacgctcgggacgctctcgccaagaaaatctacgcacacctgttcgacttcatcgtggaacggatcaatcaggcactgcagttcagtggcaagcagcacaccttcattggggtcctcgacatctacggatttgaaacttttgatgtgaattccttcgaacagttctgcatcaactacgccaacgaaaaactacagcagcaattcaacatgcatgtttttaagctcgagcaggaggagtatatgaaagaggacatcccctggacactgatcgacttctacgacaaccaacccgtaatagatctgatagaggcaaagatgggaattctcgagctcttagacgaagaatgtctgctgccacatggcaccgatgagaactggctgcagaagctgtataacaattttgtcaatagaaacccactgttcgaaaaacctcgtatgtccaacacctcctttgtcatacagcattttgcagataaggttgaatacaagtgtgaaggctttctggaaaaaaaccgggacaccgtatatgacatgctggttgaaatactgcgggctagtaaattccatctctgtgccaacttctttcaagaaaaccctacacctccatcacccttcgggagcatgatcacagtgaaatcagcaaagcaggttatcaaacccaattctaagcactttcggaccaccgtgggatcaaagttcaggtcttcgctctatctgctgatggaaaccctgaatgcaacaactccacattatgtgcgctgtatcaagcccaacgacgaaaagctgcccttcgagtttgattccaagcggatcgttcagcagctgcgtgcatgcggagtgctggagacgattcgaatctccgctcaatcttatccttctaggtggacatacatagaattctacagccgctatggtattctcatgaccaagcaagaattaagtttctcagataagaaagaggtgtgtaaagtcgttcttcaccggcttatccaggattctaatcagtaccagttcggcaagactaagatattttttagggcaggtcaggtggcatacctagagaaactgcgactggacaaactgcggcagagttgcgtgatggtacaaaaacatatgagggggtggctacagcggaaaaagtttctgagagaacgcagagcggctctcatcattcagcagtatttccgaggccagcagactgtccggaaggctattacggctgtcgcactgaaggaggcctgggctgccatcattattcagaagcattgtcgcggataccttgtgcgaagtttgtatcagctgatccggatggcaacgattaccatgcaggcctacagcaggggattccttgccagaaggaggtatcgcaagatgctggaggaacataaagctgttatcttacagaagtacgcacgggcttggctggctcggaggagattccaaagcatcagacggttcgttttgaacatccagctgacttacagggtgcagagattacagaaaaaattggaagatcagaacaaagaaaaccatggcctagttgagaaattgacctcgctcgctgccctccgagcaggagacgtggagaagatacagaagcttgaggctgaactggaaaaagcagccacccaccggaggaattacgaggagaaaggtaagcgctatcgcgacgccgttgaagagaaattggctaaactgcaaaagcacaattcggaactcgaaactcaaaaggagcagatacagctcaagctgcaagaaaagaccgaggagctcaaggaaaaaatggacaatcttacgaaacaactgttcgacgacgtgcaaaaagaggagcggcagaggatgctccttgaaaaatcattcgagctgaaaacccaggactatgaaaaacagattcaatccctgaaagaggagattaaggctctgaaggacgagaagatgcagctgcagcacttggtggaaggagagcacgttacgagtgatggcctcaaggctgaggtggccagactgagcaaacaggtcaagactatatccgaattcgaaaaagagattgagttattgcaggcgcagaagatcgatgtggagaaacacgttcagtctcagaaacgggaaatgagagaaaaaatgagcgagatcaccaaacagcttctggaatcctacgatatcgaagacgtgcggtcacgcctgagcgtagaagacctggagcacctcaacgaagatggagaactgtggttcgcgtatgaaggcctgaagaaggctactcgggtccttgaaagtcacttccagagccagaaggactgttacgaaaaggaaatcgaggccctcaatttcaaggtggttcatctgagccaggagatcaaccatctgcaaaagctgttcagagaagagaatgatattaacgaaagcatcagacatgaagtcacgcggctgaccagcgaaaacatgatgatccccgatttcaagcagcagatttcggaattggagaaacagaaacaggatttggagatccgactgaacgagcaggcagaaaagatgaagggaaaactggaagagctgtccaatcagcttcaccggtcccaggaagaagagggtacccagaggaaagctctggaagcacagaatgagattcacacaaaagagaaagagaaattgattgacaagatacaggagatgcaggaagcatccgatcacctgaagaagcagttcgagactgagtccgaggtaaaatgcaacttcaggcaggaagctagccggttgaccctagagaaccgcgatctcgaagaggaattagatatgaaggacagggtgatcaaaaaactccaggaccaggttaagacactgtcaaagaccatcggtaaggccaacgatgtacacagctccagcggacccaaagaatatctgggcatgctgcaatacaaacgggaggacgaagcaaagctaattcaaaatttgatactcgacctcaaaccaaggggggtcgttgtgaatatgatcccaggattacccgcacacatcctctttatgtgtgtcagatacgccgacagcctgaatgatgccaatatgctgaaaagtctgatgaactccaccataaacggaattaagcaagtggtgaaagagcatttggaagacttcgagatgctcagcttctggcttagcaacacttgtcatttcctgaattgtctgaagcaatactccggcgaagaggagtttatgaaacataactctccacagcagaacaagaactgtttgaacaactttgatctgtcagagtaccggcagattttgtccgatgtcgctatccgcatctatcaccagttcattattattatggaaaagaatattcagccgatcatagtgccaggcatgctggaatacgagagtctgcagggaatatccggcctgaaacccaccggctttcggaagcgcagctctagtattgacgatacagatgggtacactatgacctccgttcttcagcagctgtcctacttttatacgacaatgtgccagaatggactggacccagaactggtgcggcaggcggtgaaacaactcttcttcttgattggcgcagtcaccttgaatagcctgtttctcaggaaagatatgtgttcatgtcggaaagggatgcaaatccgctgtaatataagctacctagaggaatggttgaaagataagaacctccagaactccttagcaaaggagactcttgaacctctgtcccaagcggcttggcttctccaggtgaagaaaaccacggactccgacgccaaggagatctatgaaagatgcacttctctgtctgcggtgcagattattaaaattctaaatagctacacacccatcgacgacttcgagaagcgggtcacacccagctttgtccgtaaggttcaggctctgttgaatagtagagaggactcatcacagctaatgctcgacacgaagtacctgtttcaggtcactttcccctttactcccagtcctcacgcgcttgaaatgatccagataccgtctagctttaaactaggctttttgaaccgcctttag

SEQ ID NO: 231637 - DNA, 1122 bp, synthetic construct
  misc_feature 1..1122: note = Description of Artificial Sequence: Synthetic coding sequence
  source 1..1122: mol_type = other DNA
atgccctctagcacacctactgctgggcgaacatgggctatctggacccacacatacctgccgtggcaaaaaaggcacacaagtaggtggcccgacgggaaatccgaagctcaagacctagaccttctgaccctctacttgaatctgtactgtataactccggcagcagctcccgagctccctcccctgtacgtcttcgtctgcgaactagactcacagagggctcccatccctggaagcgacgcatataacgaaggggctgggggagcatatatgcgaaacaatcgcaaccagtctattatcgtgagtggagagtccggcgctggtaagaccgtctccgccagatatgccatgagatattttgccacagtgtctaagagtgggagtaacgcccacgttgaagacaaagtccttgcctctaatccaataactgaggcagtcggcaatgctaagactactcggaacgacaactcctcaagatttgggaaatacaccgagattagcttcgacgaacagaatcaaattataggcgctaatatgtcgacctacctgttagagaaaagcagagtcgtgttccagtcggaaaatgagcggaactaccatattttctaccaattgtgtgcctccgctcagcagagcgagtttaaacacctgaaacttgggtcagcagaggagtttaattacacgcgtatgggtggtaatacagtgatcgaaggggtgaatgatcgcgctgagatggtggaaacacagaagacatttactctcctgggtttcaaagaggattttcagatggacgtgttcaagatactggccgctatcctccacctgggaaatgtgcaaatcaccgctgtgggaaatgagaggtcctctgtgagcgaagatgattcccatctcaaagtgttctgcgagctacttgggctggaatccgggagagttgcccagtggctatgcaatcggaagatagttacatctagtgagaccgtcgtgaaaccgatgactcggcctcaggcagtgaacgccagagacgcgcttgctaaaaagatttatgcacaccttttcgactttattgtggagcgaattaaccaggcattacaatttagcgtgcttaaacccctcatgtag

SEQ ID NO: 231638 - DNA, 321 bp, synthetic construct
  misc_feature 1..321: note = Description of Artificial Sequence: Synthetic coding sequence
  source 1..321: mol_type = other DNA
atgaatccatataaacagctaccaatctacggcgacgccattatccatgcgtattccggacagaacatgggcgatatggatccccacatcttcgccgtcgccgaagaggcttacaaacagatggccaggaataacaggaaccaatccattatcgtgtccggggagtccggagctggtaagactgtgtctgctcgttatgccatgcgctacttcgcaacagtatcaaaatcaggcagcaacgctcatgtcgaagacaaggtgctcgcctccaatcctataaccgaggcagtgggaaatgctaaaacaactaggaatgactag

SEQ ID NO: 231639 - DNA, 1293 bp, synthetic construct
  misc_feature 1..1293: note = Description of Artificial Sequence: Synthetic coding sequence
  source 1..1293: mol_type = other DNA
atggccgtcgccgaactctatacgcagtataatcgtgtgtggatccccgatcccgaggaggtttggaagtcggccgaaatcgcaaaagactatagagtcggcgacaaagtccttcgattgctgttggaggatggcacagagttggattacagtgtcaaccccgaaagccttcccccactgcggaaccccgacatccttgttggcgaaaacgacttaaccgccttgagttacctccacgagcccgctgtgttgcataatcttcggatacgcttcgcagaatcaaaactaatctatacgtactccggcatcatcctggttgccatgaacccctacaaacaactcccaatctatggcgatgcaatcattcacgcctacagtggacagaatatgggagacatggatcctcatatctttgctgtcgctgaggaagcatacaagcagatggccaggaataacaggaatcagtccattatcgtatctggtgaaagtggtgccggtaaaaccgtctccgcacgatatgctatgaggtattttgcaaccgtgagcaaatctggaagtaatgcacacgtggaggacaaggtgttagcaagcaatccgataaccgaggccgtaggcaacgcgaagactacacgtaacgataactcaagcagatttgggaaatacacagaaatatctttcgatgaacagaatcaaattattggtgccaatatgtctacgtacctccttgaaaagtcccgtgtagtcttccaatcagagaacgaaagaaattatcacatcttctaccagctgtgtgcatctgcacagcaaagcgaatttaaacatctgaaactgggatccgcagaggaattcaactacaccagaatgggcggaaacacagtgatagaaggtgttaacgaccgggcagagatggtggaaacacagaagacttttactctgctgggtttcaaagaagatttccaaatggacgttttcaagatccttgcagccatcctccacctcgggaatgttcagataacagctgtcggaaatgaacgcagctcagtgtccgaggatgacagccacctcaaagtattctgtgagctactaggcctagagtccggacgtgttgcacagtggctgtgtaaccgtaaaatcgtaacatcctcagaaacagtggtaaagcccatgacacgccctcaggcagtcaacgctcgcgacgccctggcgaagaaaatctatgctcatttgtttgactttatagtggagaggatcaaccaagcactgcagttttcagtgctcaagccactgatgtag

SEQ ID NO: 231640 - DNA, 810 bp, synthetic construct
  misc_feature 1..810: note = Description of Artificial Sequence: Synthetic coding sequence
  source 1..810: mol_type = other DNA
atggctgtggctgagctgtacactcagtacaaccgggtgtggatccccgatcctgaagaagtgtggaaaagtgccgagattgccaaggattatagggtcggcgataaggtgctcagactcctgctcgaggatggcacagagctcgattattctgtgaacccagaatccttaccccctctgcgcaaccctgacatcctcgtcggtgaaaacgatctgacagccctttcctatctgcacgagccggcagtcttacataacctgcggattcggttcgcagagtccaagttgatttacacctacagcgggatcattcttgtggcaatgaatccttataaacagctgcccatttatggcgatgctattatacacgcatactcgggacagaatatgggggacatggatccccatatcttcgcagtggcagaagaagcatataaacagatggccagaaataataggaatcagagtatcatagtcagcggcgaatcgggcgctgggaagaccgtctccgctagatacgccatgcgctacttcgcaaccgtgtccaaatctggttcaaatgcgcacgtggaggataaggtcctggctagcaatcctatcactgaagcagtggggaatgcgaagaccacacgcaatgataatagttcccgcttcggaaagtacacagaaatttctttcgatgagcaaaatcaaataattggtgcaaacatgagtacttatctgctggagaagtctagggtagtgtttcagggagtgcccaaaaacctgatcattcaggagtgggaagccatactaagcctgagggtctag

SEQ ID NO: 231641 - DNA, 3762 bp, synthetic construct
  misc_feature 1..3762: note = Description of Artificial Sequence: Synthetic coding sequence
  source 1..3762: mol_type = other DNA
atggaggacggcaagccggtgtgggctccccatccaacagatggattccagatgggaaacattgtcgatataggacctgactctctcacaatcgaacctcttaatcagaagggcaaaacttttctcgcgttgattaatcaggtgtttccggctgaagaagattctaagaaagacgtggaggataattgtagtctcatgtatttgaacgaggccacgttgctgcacaacattaaggttaggtattccaaggataggatctatacatacgtggctaatatcctaatcgcagtcaacccgtacttcgatatccccaagatttattcatctgaagctatcaagagctatcaaggtaaatctcttggaacacgcccaccccacgttttcgcaatcgccgataaggcctttcgagacatgaaggtgttgaagatgtcacagtctataattgtctctggggaaagcggggctgggaagacagagaatacaaaattcgtgttgcgctacctaactgaaagctacggaaccggtcaagatatcgacgaccggatcgtggaggccaaccctctgctagaggcgtttgggaacgctaaaacggtgagaaataacaactcatctagatttggaaagtttgttgagattcacttcaacgagaagagctccgtggtcgggggatttgttagtcattacctgctcgaaaaatcccggatctgtgtgcagggcaaagaagagcgaaactaccacatcttctaccggctgtgtgccggagctagcgaggacattcgcgaaaaactgcacctctctagcccggacaacttcaggtacctcaacaggggatgcactcgatattttgctaacaaagagaccgacaagcagattcttcagaatagaaagtcccccgagtatctgaaggctggctctatgaaagatcccttgctggatgaccatggcgatttcatcagaatgtgtaccgcaatgaagaaaattggtctggacgatgaagaaaagctcgatctgttcagggtggtggccggagtgctccaccttgggaatatagactttgaagaggctgggagcacctctggcggatgcaatttaaaaaataagagtgctcaaagcctcgaatactgcgcggaactgctcgggctggaccaagatgacctccgtgtgtctcttaccacacgggtgatgctcaccacagctggcggaacaaagggcaccgtgatcaaggtaccgctcaaggtggagcaagccaacaacgctagagatgccctggcaaagaccgtgtattctcatttgttcgaccacgtagttaatagagtcaatcagtgctttccatttgagacaagtagttacttcattggcgttcttgacatcgccggattcgagtactttgagcacaactccttcgagcaattctgtatcaactactgcaacgagaagctgcagcaattcttcaacgagcgtatcctcaaagaagagcaagagctttatcagaaagagggcttaggagtgaacgaggttcactatgtcgacaatcaggactgcatcgatctcatagaggccaaattagtgggcatccttgacattctggatgaggaaaaccgcttgccacagccctccgatcagcatttcacctctgccgtccaccagaagcacaaagaccattttcgacttacgatacctcgcaagagcaaattagcggttcatcgcaatatacgggatgatgagggctttattattcgccactttgccggtgcagtctgctatgaaacgactcagttcgttgaaaagaataatgacgccctccacatgtcgctggaaagcctgatctgcgaaagtcgtgacaaattcatccgagaactgtttgagagctctaccaacaacaataaggacacaaagcagaaggctggaaagctgagttttatctccgtcggtaataaattcaagacacagctcaacctcctgctggataaattgcggtccaccggcgcttcattcatcagatgcataaaacccaatttaaaaatgacctcccaccattttgagggtgcccagatcctctcacagctgcagtgctcggggatggtttccgtgctagatctgatgcagggcggttaccccagcagagcctcatttcatgagctgtataatatgtacaaaaagtacatgccggacaagctcgctcggctagacccaagattattttgcaaagccttgttcaaggccttaggcctgaacgagaacgactacaagttcgggctcaccaaggtgttctttcgacccggtaaattcgctgagtttgaccagattatgaagtccgatccagatcacctagcggagctcgtcaagagagtaaaccactggctgacatgctcccggtggaagaaggtccagtggtgctctttatcggtcatcaaactgaagaacaaaatcaagtaccgggctgaggcctgtataaaaatgcagaagactatacggatgtggctgtgtaagagaaggcacaaaccacgcattgacggactcgttaaggtgggaacccttaaaaagcgtttagacaaattcaacgaagtcgtctcagtgctgaaggatggcaagcccgaaatgaacaaacagataaagaatttggagatatcaatagacacactcatggccaagattaaaagcaccatgatgactcaggagcagattcagaaggagtacgacgccctggtcaagagcagcgaagagctgttgtccgctctgcaaaaaaagaaacagcaggaagaggaggcagagaggttgcgtcgaattcaggaggagatggagaaggagaggaaaagaagagaggaggatgagaagcggaggcgcaaggaggaagaagagcgtcgtatgaagctcgagatggaagcaaagcgaaaacaggaggaggaggaacggaagaagagggaggatgatgaaaaacgaatccaggctgaagttgaagcccagcttgcccgtcagaaagaggaggaaagccaacaacaggctgttctagagcaggaacgcagagatagggaattggctctccgcatagcccagagtgaagcagagctgatttcagacgaggctcaggccgatctcgctctgagacggggaccagccgtgctcgccactaaggctgccgcaggtaccaagaaatacgatctgtcaaaatggaaatacgcggagctgcgagatacaattaatacctcttgcgacatcgagttgctcgccgcatgtagggaagagtttcaccggaggctgaaagtctaccatgcttggaaatctaagaataaaaagagaaacaccgagactgagcagcgcgctccgaaatcagtgacagattacgcccagcagaaccctgccgcacagatccccgctaggcaaagagaaattgagatgaatcggcagcaacgcttctttagaatacctttcatccgcccagcagatcagtacaaggacccccaatccaagaagaaggggtggtggtatgcccactttgatggaccctggatcgccagacaaatggaactgcaccctgacaaaccccctattctcctggtagcagggaaagacgacatggagatgtgcgaactgaatctggaagagaccggcctgacccgaaaacgcggagctgaaatactgccacggcaattcgaagaaatttgggaaaggtgcggcggaattcagtatctgcaaaatgccatcgagtcccggcaggctagaccaacttacgccacagccatgctgcagtctttgctaaagtag

SEQ ID NO: 231642 - DNA, 3858 bp, synthetic construct
  misc_feature 1..3858: note = Description of Artificial Sequence: Synthetic coding sequence
  source 1..3858: mol_type = other DNA
atggaagatggtaagcctgtttgggctccgcaccctacagacggatttcaaatgggcaacatcgtggacataggcccagattcgctaaccatcgaaccgctgaatcaaaagggaaaaaccttcctggccttgattaatcaagtcttccctgccgaggaggatagcaagaaagatgttgaggataactgctctctgatgtatctgaatgaggccacacttctgcacaacattaaagtgcgctactctaaagatagaatatacacgtacgttgccaatatactcattgccgtgaacccctactttgatatacctaagatttacagtagtgaggccatcaaaagctaccaaggcaagtcccttggaacccgccctccacacgtgttcgccattgcagataaggcattccgcgacatgaaagtcctaaagatgagccagagtatcatcgtcagtggcgagagcggcgcaggaaagacagagaatacaaaattcgtcttgaggtacctcacagagtcatatggaaccggtcaggacatcgatgaccgtattgttgaagccaatcctctgctggaggcctttggaaacgcaaagacggtcaggaacaataattcctcaaggttcgggaagtttgtagaaatccacttcaatgagaagagtagcgtggtaggcggtttcgtgtcgcactacttattggagaaatcaaggatttgcgttcaggggaaagaggaacggaactatcatattttttacaggttgtgcgctggggcttccgaggatattcgggaaaaattgcatcttagcagtccagacaactttaggtacctaaatagagggtgtactagatatttcgctaacaaggagaccgacaagcaaatcctgcagaaccggaagtcacctgaatacctgaaagccggaagcatgaaggaccctctgcttgatgaccacggagatttcattcggatgtgcacagccatgaagaaaatcggattagatgatgaggagaagctggaccttttcagggtggttgctggtgtgctacacctgggcaatatagatttcgaggaagccggaagcacatctgggggatgcaatctgaagaataagtctgcccagtccttagagtactgcgccgaactgctgggactggaccaggacgatctcagggtaagcttaacaacgcgggttatgctaacaacagcgggaggtaccaagggtacagtgattaaggttcccttgaaggtagagcaagccaataatgccagggacgccctcgccaaaactgtgtactctcacctatttgaccatgtggtaaaccgcgtcaaccagtgcttccctttcgaaacgtcttcttactttattggtgtgctcgacattgccggatttgagtatttcgaacataattcctttgaacaattctgcatcaactactgcaatgaaaaactccagcaatttttcaatgaacgtatcctcaaggaggaacaggagctgtaccaaaaagaaggcttgggcgtaaacgaggtgcattacgtggacaaccaggattgtatcgacctgatcgaagctaaacttgtgggaatacttgacatcctggatgaagaaaacagactgccgcagccttccgaccagcattttaccagcgcagtgcatcagaagcacaaagatcacttccgacttacaattcctagaaaaagcaagctggcggtgcataggaacatccgggatgacgaaggattcattatcaggcacttcgccggagctgtttgttatgaaactactcaatttgtagaaaagaataatgacgctttgcatatgtcccttgagagcctgatctgtgagtctcgagacaagtttattcgtgaactgtttgagagctcaacaaacaacaacaaagatactaagcaaaaggctggcaaactgtcattcatttccgtcggcaacaagttcaaaactcagctcaacttgctgctcgataaactcaggagtaccggggcatctttcattagatgcataaagcctaacctgaagatgacaagccaccacttcgaaggcgctcaaattctgtcacagctgcagtgcagcggcatggtgagcgtgctcgacttgatgcagggcggatacccatcacgtgctagctttcacgagctatacaatatgtacaaaaaatatatgcccgacaagctcgcgagacttgatcctcgcttgttttgcaaagccctctttaaggctctcggactaaatgagaatgattataaatttggcctgacaaaggtgttcttcaggcccggtaaatttgcagagtttgatcagatcatgaaaagcgaccccgaccatttggccgaactggtaaaacgggtgaatcactggttgacatgcagccgttggaagaaggtgcagtggtgcagtttgtccgttataaagctaaagaataaaatcaagtacagggccgaagcctgtatcaagatgcagaagacgatcaggatgtggctgtgcaagcgcaggcataagcctagaatagacggcctagtcaaggtgggcactctaaagaaaagactcgataaattcaacgaggttgtcagcgtgctgaaggacggtaagccagagatgaataagcagattaagaacttagagatcagcatcgacacgctgatggccaagatcaaatcaacgatgatgacccaggagcagatccaaaaggaatacgacgccctggtcaaaagtagtgaggaactgctttccgcgctgcagaaaaaaaaacaacaggaggaggaagccgagaggcttcgtaggatccaggaagaaatggagaaggagcgcaaaagacgcgaggaagacgagaagagacgtaggaaggaggaggaggaaagacgaatgaagttggagatggaggccaagcggaagcaagaggaagaggagcggaaaaagagggaggatgatgagaaacggatacaggctgaggtagaggctcagttagccaggcaaaaggaggaagaaagtcagcaacaggccgttctggaacaagagaggagagaccgagagcttgccctgagaattgctcaatcagaggccgagttgatctccgatgaggcacaagccgaccttgcactgcggcgtaatgacggcacccgacccaaaatgacaccagaacagatggctaaagaaatgtctgagttcctgtcgagaggcccagccgtactggccacaaaagctgccgctggcactaagaagtatgatctcagcaagtggaagtacgcagagttgcgggacacgatcaatacttcctgcgacatcgaattgctggctgcgtgcagggaggagttccatcggcgactcaaagtgtatcacgcctggaagtcaaagaacaagaaacgtaataccgagaccgagcaaagagccccaaagtctgtgaccgactacgattttgccccattcttgaataacagccctcagcagaacccagctgcccaaatccctgctcggcaaagagaaattgaaatgaatcgtcagcagcgttttttccggatccctttcattcgtccggcagaccagtacaaggatccacagtctaaaaagaaaggctggtggtacgcccatttcgatggcccttggattgcgaggcagatggaattgcatcccgataaaccccctattctattggttgctgggaaagacgacatggagatgtgtgaactgaacctcgaggaaacaggcctgaccagaaagcgaggggctgaaattcttcccagacaattcgaggagatctgggaacgctgtggaggtatccagtatctccagaatgccatcgaatcacgccaggctaggccaacatatgccacagccatgctccagtccctcctcaaatag

SEQ ID NO: 231643 - DNA, 3861 bp, synthetic construct
  misc_feature 1..3861: note = Description of Artificial Sequence: Synthetic coding sequence
  source 1..3861: mol_type = other DNA
atggaggatggcaagcctgtgtgggcaccacaccccacagacggctttcagatgggcaacatcgttgacatagggccagacagcctgaccattgagcctctcaaccagaagggcaagacatttctagcgcttattaatcaggttttccctgccgaggaggattctaaaaaggacgtcgaggataattgctctttgatgtacttaaatgaggctaccctcctgcataatataaaggtgaggtacagtaaagaccgcatttacacctatgtggctaacatcctcattgcagtgaacccttattttgacatcccgaaaatctactcttctgaagccatcaagagctatcagggaaagagcctgggcactcggccaccacacgtcttcgcgatcgctgacaaggctttccgagatatgaaggttttgaagatgtcccaatctatcattgtaagcggggaatcaggcgctggcaaaacagaaaatacaaaattcgtgctgagatacctcacagaatcttacggcaccgggcaagatatcgatgaccgaatcgtcgaagctaacccccttcttgaagccttcggcaacgccaaaaccgttcggaataataactcatcccgttttggcaagtttgttgaaatacactttaacgaaaagtcttcagttgtgggtggcttcgtgagtcactaccttctggagaagagccgaatatgtgtgcagggcaaagaggagcgcaattatcacattttttacagactgtgcgctggagcttccgaggatatccgcgaaaaacttcacctgtcgagtccagacaatttcaggtaccttaaccggggttgtacaagatactttgccaataaagaaactgacaagcagatcctacagaaccgaaagtctcccgagtatctcaaagccggttctatgaaagaccctttattagacgatcatggcgacttcataagaatgtgcaccgccatgaaaaagattggcctggatgatgaggagaaactggacctgttccgcgttgtggctggtgttctgcacctaggaaatattgacttcgaggaagcaggctccacctctgggggatgcaacctgaaaaataaatctgcgcaatctctagaatactgtgctgagctgctcgggttggaccaagacgacttgagagtttctttgacaacacgcgtaatgctaaccaccgccggagggaccaagggcactgtcatcaaggtgcctctgaaagtggaacaggctaacaacgcgagagacgccttagcgaagaccgtctacagtcatctgttcgaccatgtggttaaccgcgtgaatcaatgtttcccttttgagacatcctcatattttattggcgtacttgacattgcgggattcgagtatttcgagcataattccttcgaacaattctgtatcaattactgcaatgaaaagctccagcagttcttcaacgagagaatattgaaggaagaacaggaactttatcaaaaggaagggctgggcgttaatgaagtccattacgtcgataaccaggactgtatagacttgatcgaggctaagctcgttgggatactcgacatattggacgaggagaatcggctgccacagccgagcgaccagcacttcacgtccgccgtgcaccaaaagcacaaggatcattttagactgactattccaaggaaatcaaagcttgcagtccataggaacatacgagacgacgaaggtttcattatcaggcacttcgccggagctgtctgttatgagaccacgcagtttgtggagaagaacaacgacgcactgcacatgagtctggaaagccttatctgcgaatctcgagacaaattcatccgggagctctttgagtcctccacaaacaacaacaaggatactaagcagaaggccggaaaattgtcattcatctctgtaggcaacaagttcaagactcaattgaatctgctattggataagctgaggagcaccggggcttctttcatccgctgcatcaaacccaacctcaagatgacgtcgcaccacttcgaaggcgctcagatcctaagccagcttcagtgctctgggatggtgagcgttctggacctcatgcagggagggtatccctcacgggctagctttcacgaactgtacaacatgtacaaaaaatatatgcccgacaaattagcccgtctggatcctagactattctgtaaagctctcttcaaggcattgggtcttaatgagaatgactacaaatttggtttaacaaaagtcttttttcgccctggtaaattcgccgagtttgatcagattatgaagagtgaccctgaccatttagccgagctggttaaacgagtgaaccattggctcacctgcagccgctggaagaaggtgcagtggtgttcgttgagtgtcattaaattaaagaataagatcaaatacagggcagaggcctgcatcaagatgcagaaaaccatccgcatgtggctgtgtaagcgcagacataagccgagaatcgacggccttgtaaaggtcggaacactgaagaagagactggacaagtttaacgaagtggtgtctgtcttgaaggacggcaagcctgagatgaacaaacagattaaaaacctcgaaatttccattgataccctgatggccaagatcaagagcacgatgatgactcaggagcagatccagaaggagtacgacgctttggtgaaaagtagcgaagaactgttgagcgctcttcaaaagaagaagcagcaggaagaagaggccgaacgtcttcgaagaatacaagaggaaatggaaaaggaacggaagaggagagaagaagatgagaagaggcggagaaaggaagaggaggagagacgcatgaagctggaaatggaagcaaaacgcaaacaggaggaggaagaacggaaaaagcgagaggacgatgagaaaagaattcaagccgaggttgaagcccaattggccaggcaaaaagaggaggagtctcagcagcaggccgtcctggagcaggagcgcagagaccgcgagctcgcacttagaatcgcgcaaagtgaagccgagctcatctccgacgaggcccaggcagatctcgcactgcgcagatacttagatagctatccagtgactagcaaaaatgacggcacaagacccaaaatgacaccagaacaaatggctaaggagatgtccgagtttctttccagagggccagccgtcttggccaccaaggctgccgctgggaccaagaaatacgatttgtctaagtggaaatatgctgaacttagggatacaatcaacacctcttgcgacattgagctcttggctgcatgtagagaggagttccatcggagactgaaagtgtaccacgcctggaagagcaagaataaaaagcgtaacaccgagaccgagcaacgggcaccaaagtcagtcacagactacgctcagcagaacccagctgctcaaatccccgcaagacagcgagaaatagaaatgaaccggcagcagcggtttttccggatacctttcatccgacctgcagaccaatacaaagacccacagtctaagaaaaaagggtggtggtacgctcactttgacggaccatggatcgcgaggcaaatggaacttcaccccgataagccccctattctcctggtagctgggaaggacgacatggagatgtgtgagctgaacctcgaagaaacgggcttgactcgaaagcgtggagccgagatcttgcccaggcaatttgaagagatctgggaacgatgcggaggtattcaatatttacagaatgcaatagagtctcgccaggcacgacccacttacgcaacagccatgcttcagtcactgttaaaatag

SEQ ID NO: 231644 - DNA, 3789 bp, synthetic construct
  misc_feature 1..3789: note = Description of Artificial Sequence: Synthetic coding sequence
  source 1..3789: mol_type = other DNA
atggaggatggtaagcctgtttgggctccacaccctaccgatggattccagatggggaacatcgtggatataggacctgatagcctcactattgagccccttaatcagaaaggcaaaactttcctggccctcataaatcaagtcttcccagccgaggaagactcaaagaaggacgtggaggataactgctcactaatgtacctgaacgaggccacgttgctgcacaatatcaaggttaggtattccaaggatagaatatatacttacgtcgcaaacatcctcatagccgtcaatccttacttcgacattcctaaaatctacagttccgaagccattaaatcttatcagggcaaaagcctgggcactagacctccccatgtcttcgctatagccgacaaggcattccgagacatgaaggtactcaaaatgtctcagagcatcatagtgtcgggtgagtccggagccggaaagaccgagaacacaaaattcgtcctacggtatttaacagaaagttatgggaccggccaggatattgatgaccgcatcgtggaggctaaccccctccttgaggcttttggcaacgccaaaaccgtccggaataataactcctcgcgctttggaaaattcgtggaaatccactttaatgaaaaatcgtcagtcgtcggtggtttcgtgagtcattatcttttggaaaaaagccggatatgtgtgcagggcaaggaagagagaaattatcacatcttttatcgtctctgcgccggtgcaagtgaggacatccgggagaaactccacctcagctcgcctgacaatttccgttacctgaatagaggatgtaccagatacttcgctaacaaagaaactgataaacagatcctgcaaaacagaaagtctccagaatacctgaaggccggttccatgaaagacccgctcctggatgaccacggagacttcatcagaatgtgtaccgccatgaaaaagattggccttgacgacgaagagaagctcgacttattccgtgtcgtggccggagtgctccatctcggaaacatagattttgaggaagctgggagcacctctgggggttgtaacctgaagaataaaagcgctcaatctctggaatattgcgccgaactgctgggacttgaccaggacgatctgagggtatctctgactacacgggtgatgctgaccactgccggtggcacaaaggggaccgtgatcaaagtgccactgaaagtggaacaggccaacaacgcgagggacgcactagccaagaccgtctattcacatcttttcgatcatgtggtcaaccgcgtcaaccagtgttttccattcgaaacctcctcttatttcattggtgtacttgatatagcgggtttcgagtacttcgagcataacagctttgagcagttctgtattaattactgcaacgagaagcttcagcagtttttcaatgagcgaatcctcaaggaggaacaagaactttaccagaaggagggactcggagtgaatgaagtgcattacgtggacaatcaggattgcatcgatctcattgaagctaagctcgtggggatcctagacatcttggacgaagaaaatcggctgccacagccatccgaccagcatttcacaagtgcagttcatcagaagcacaaagaccacttccgcctcaccatcccacgcaaatcaaagttggccgtgcaccggaatatacgcgacgatgagggctttatcatacggcattttgcaggcgctgtgtgctacgaaacaacacaatttgtggaaaaaaacaacgatgcgcttcatatgtccctcgagtccttgatctgcgagagtcgagacaaatttatcagggagctgttcgaatctagtacaaataacaacaaggatactaagcagaaagccggaaagttgtcattcatttctgtcggaaacaagtttaagacacagctaaacctacttcttgacaagttaagatcaaccggggctagcttcatcaggtgcatcaaaccaaatttgaaaatgactagccaccatttcgaaggagcccaaatactgtcacagctacaatgttctggaatggtgagcgtgttggacttaatgcagggcggataccccagccgggctagtttccacgaactgtacaacatgtacaagaaatacatgcccgacaagctggcgcgactggacccaaggcttttctgcaaggcactcttcaaggccctgggattgaacgagaacgattataagttcgggctgacaaaagttttctttcgccctggtaagtttgccgagtttgaccagatcatgaaatctgacccagaccatctcgcagaactggtgaagcgggtgaaccattggctgacctgtagtcgctggaagaaagtacagtggtgctccctgtcggtcataaagttgaagaacaaaattaagtacagagccgaggcgtgtataaagatgcaaaagacaattagaatgtggctctgcaaaagacggcacaagccgaggatcgacgggctggttaaggtagggaccttaaaaaaacgattggacaaatttaatgaggtcgtctccgttcttaaggacggtaagcctgaaatgaacaaacaaatcaagaatcttgagatatcaattgatacactcatggccaaaatcaagtcgacaatgatgacccaagagcagatccaaaaagaatatgatgcgctggtaaaatcaagtgaggaacttctttcagctttgcagaagaaaaagcagcaggaggaggaggccgagcgattgagaaggatccaagaagagatggagaaggaaaggaagagacgggaagaggacgaaaagcgccgaaggaaggaggaggaggagaggcgaatgaaactggaaatggaggcgaagaggaagcaggaggaggaagagaggaagaaaagagaagacgatgagaagcggatccaggctgaagtggaagcacagttggctcgccaaaaggaggaggaaagccagcagcaggcggttcttgaacaagagcgacgggaccgcgagcttgctctgagaatagcccagtcagaggctgagttgatctcagacgaggcccaggctgacctggcactgcgcaggggccctgcagtcttagctacaaaagctgcagctggcacaaaaaaatatgatttgtctaaatggaagtacgccgagctgcgagatacgattaacacatcgtgtgatattgaactccttgccgcatgcagggaggaatttcatcggagactgaaggtgtatcatgcgtggaagtctaaaaacaagaaacggaataccgaaaccgagcagcgagctccgaaatccgtgaccgactacgacttcgcaccatttctgaataattccccacaacagaaccccgcagcccaaatccctgccagacagagagagattgagatgaacaggcagcagagattctttcggattcctttcatccgtcccgctgaccagtacaaggaccctcagtctaagaagaaaggctggtggtatgctcactttgacggtccgtggatcgctagacagatggagctacatccagacaaaccccctatccttctggtggcgggaaaagatgatatggaaatgtgcgagttaaacctggaagagacagggctgacaaggaaaaggggtgccgagatcctcccccgtcaattcgaggagatctgggagcgctgtggcggtatccagtatttgcaaaatgcgatcgagtcacgacaagccagacctacatatgccacagcaatgctgcagagtttgctgaagtag

SEQ ID NO: 231645 - DNA, 3888 bp, synthetic construct
  misc_feature 1..3888: note = Description of Artificial Sequence: Synthetic coding sequence
  source 1..3888: mol_type = other DNA
atggaggacggtaagcccgtctgggcccctcatcctaccgacgggtttcagatggggaacatcgtggacataggaccagattcgcttacaatcgagccactcaatcagaaaggcaagaccttcctcgccctcatcaatcaagtgtttcccgctgaagaggattccaagaaagacgtggaagataactgctcacttatgtacctcaatgaagctacattgttacacaacatcaaagttcgatactccaaagacaggatttatacgtatgttgccaatatcctcatagcagtgaatccatactttgatattccaaaaatatattccagcgaggctatcaaaagctaccaggggaagagtttggggactcggccaccccatgtgttcgctatcgctgacaaggccttccgggacatgaaggtcttgaagatgagccagtcaattattgtgtcgggggagagtggtgccggaaagaccgagaatacaaagttcgtactgcgctatctgaccgagtcctacggaactggtcaggacatagatgatcgtattgtggaggctaatccactcctagaggcattcggaaatgctaaaaccgtgcggaacaataatagctcgcgattcggtaagtttgttgaaatccactttaatgagaagagctctgtcgtgggaggcttcgtcagtcactatctgttggaaaaatcacgtatttgtgtgcagggaaaggaggaacgcaactaccatatcttctacaggctttgcgccggtgcgtcagaggatatacgcgagaagctccacttatctagtccggacaatttccgctacctcaaccgcggttgcactagatattttgcaaacaaggagactgataagcagattttgcagaatcgcaaatcgcctgagtacttgaaggcaggcagtatgaaggaccccctgttagacgatcacggagactttatccgtatgtgtacagcaatgaagaaaataggccttgatgacgaagaaaaactggatcttttcagagtggtggctggcgttctccacctgggcaacattgattttgaggaggcgggttccaccagtggcggatgcaacctgaaaaacaaatcagcccagagcctcgagtattgtgccgaattgctggggctggaccaagatgatctgcgcgttagcctgacaactcgcgtgatgctgactaccgccggtggcacaaaaggtaccgtgatcaaggtgccactgaaggtggagcaggcaaacaatgcccgagatgccttggcaaaaacagtgtactcgcacctctttgaccatgtggtgaacagagtgaatcaatgcttccctttcgaaacctccagttacttcatcggggtcctggatatcgcgggatttgagtacttcgagcacaattcattcgagcagttctgcataaactattgcaacgaaaaactgcaacagttttttaatgagcggatcctgaaagaagaacaggaactgtatcagaaggaaggcctgggcgttaatgaagttcactatgtggacaatcaggattgtatcgatctcatagaggctaagcttgttgggatattagatatactggatgaggaaaacagacttcctcaaccatccgatcagcactttaccagcgcagtgcatcaaaagcacaaagaccatttccgcctcacgatccctcgaaaaagcaagctggcagtgcatcgaaatattagggatgacgaaggctttataatccgccatttcgcaggagcggtctgttacgagaccacccaattcgtggagaagaacaatgatgctttacacatgagcttagaaagtctgatctgtgagtctagagacaagttcattcgtgagctgtttgaaagctctacgaacaacaataaggataccaagcagaaagccggaaagctgtcctttataagtgtcggtaacaagttcaaaacacaactgaacctgctgctggataaattgcgctcaaccggcgcttctttcataagatgcatcaagccgaatctaaaaatgaccagtcaccactttgaaggcgctcagatactcagccaactccagtgttctggcatggtgagcgtccttgatttgatgcaaggtggttatccgtcacgcgcaagcttccacgagctctacaacatgtataaaaaatacatgcccgacaagcttgcgcgacttgacccgcgtcttttttgcaaggcgttgttcaaagccctaggtctgaatgaaaatgattacaaatttgggctgactaaggtcttcttccgcccagggaagtttgcggagtttgatcaaattatgaagagtgatccagatcatctcgccgagcttgtcaaacgggttaatcactggttgacctgttcacggtggaaaaaggtccagtggtgcagcctctccgtgattaagctcaaaaacaaaattaaatatagggctgaagcatgcatcaagatgcaaaagaccatcaggatgtggctttgcaagcggcgacataagccaagaatcgacggactggtgaaagtgggcactcttaagaagcggttagataagttcaacgaggttgtgtccgttctcaaggacggaaaaccagaaatgaataagcaaattaagaaccttgaaatcagtatcgacactctgatggctaagattaagtcaacaatgatgacccaggagcaaatccagaaggagtacgatgccttagttaaaagcagcgaggaactcctgtccgcattacaaaaaaagaaacagcaggaagaagaggcagaacgcttgcggaggatccaggaagagatggagaaagaaagaaaacggagagaagaggatgagaaacgtcgcagaaaggaggaagaagaacgacggatgaagttggagatggaggcgaagcggaaacaggaggaggaggagaggaagaagcgtgaagacgacgagaagagaatccaggccgaggtcgaagcccaattggctaggcaaaaagaagaagagtcccagcagcaggcggtcttagagcaggagagaagggaccgcgagctggcactccgcatcgcacagtcagaagcggaattaatctctgacgaggcacaggccgacctggccctccgaaggtacttggactcttatccagtaacatcaaagaacgatggaactagacccaagatgacgccggaacaaatggctaaggaaatgtccgagttcctgtcccgcggacctgccgtcctcgccacaaaggcagctgcaggcactaagaaatacgacttaagtaagtggaagtatgccgaattgcgggacaccattaatacatcttgtgacatagagctcctcgccgcttgccgcgaggagttccaccgccgactcaaggtttatcatgcctggaaaagtaagaacaagaagcgcaataccgaaaccgagcagcgcgcaccaaagagcgtaacagactatgattttgctccatttttgaacaattcccctcagcagaatcccgctgcccagatacccgctcgtcagcgagaaattgagatgaacaggcaacagagatttttccgcatcccctttatccgcccagcggaccagtacaaagaccctcagagtaaaaaaaaaggatggtggtatgcccattttgacggaccatggatcgcaagacagatggagctgcaccccgacaaaccgccaattctgctcgtagccggaaaagatgacatggagatgtgcgaattgaacctggaagaaaccggtttaacccgaaagcggggtgccgagattctgcctcgacagttcgaggaaatttgggagagatgcgggggtatacagtacctgcagaatgccatagaatctaggcaagcaagaccaacctacgcaaccgccatgcttcagagtttgcttaaatag

SEQ ID NO: 231646 - DNA, 525 bp, synthetic construct
  misc_feature 1..525: note = Description of Artificial Sequence: Synthetic coding sequence
  source 1..525: mol_type = other DNA
aagcgacgcgaggaggacgaaaagagacggaggaaggaggaagaggagcgccgtatgaaactggagatggaggccaaacggaagcaagaagaagaagagcgaaaaaaacgggaggatgatgaaaagcgcatccaggccgaagtggaggcacagctcgcacgccagaaggaggaggagtctcagcagcaggcagttttagaacaagagaggagggatagagagctggccctccgaatagcccaaagtgaggccgaactgatttcagatgaagctcaggctgacctggccctgcgatcactggattcatacccggtgacctctaagaatgacgggacacgacccaaaatgacacccggacccgctgtgctggcaacaaaggcagcagcaggcactaagaagtatgatctgtcgaaatggaaatacgctgaactgcgtgacacgattaacacctcatgtgatatcgaactattggccgcttgcagggaggagtttcatcgcagattaaaagtatatcatgcttggtag

SEQ ID NO: 231647 - DNA, 6275 bp, synthetic construct
  misc_feature 1..6275: note = Description of Artificial Sequence: Synthetic coding sequence
  source 1..6275: mol_type = other DNA
gccctgctgcagaagggagaccacgtgtggatggatctcaggctcggtcaagagtttgatgtgcctatcggcgctgtggtcaaattatgcgacagcgggcaggtacaggtagtggacgatgaggataatgagcactggatctcaccgcagaatgccacccacattaagcccatgcatccgaccagcgttcacggtgttgaggatatgatccgcctgggagacctcaatgaggccggaatcctgagaaacctgctcattagataccgtgaccatttaatatacacttataccgggagcatcctggttgccgtgaacccctaccagctgcttagtatctactcacccgaacacattcgccagtacaccaacaagaagataggcgaaatgccgccacatatttttgcaatcgccgataactgctattttaacatgaagcgcaactctagggaccaatgttgcatcatctctggtgagtcaggagcagggaaaactgagtccaccaaactcatcttacagtttctggccgctatctctggccaacactcttggatcgagcagcaggtcctggaggccactcccatcttggaagctttcggcaacgccaagaccatccggaacgataattccagtcgcttcggaaaatacatcgacatccatttcaacaaacgcggtgcaattgagggtgctaaaatcgaacagtacttgctcgaaaagagccgtgtctgccggcaggctctcgatgagcgaaattatcacgtgttctactgtatgctcgagggaatgtccgaggatcagaaaaagaagctggggctcggccaggcctccgactacaattatctggccatggtcaatccacccgacctcatgtcttgcctgacaagccggacactgattacccgcggtgagacagtcagcacacccctgtcacgggaacaggccctggatgtgagggatgcctttgttaagggaatctatggcagattattcgtctggattgttgataaaattaatgctgccatctacaaaccccctagtcaggatgtgaaaaattctcgcaggtcgatcgggctgttggatatttttgggttcgagaattttgcagtgaattcttttgaacagctttgcatcaactttgccaacgagcatctgcagcaattcttcgtcaggcatgtgtttaagctggagcaggaggagtacgatttggagagcatcgactggttacatatcgagtttaccgataatcaggacgcactcgacatgatcgcaaacaaaccaatgaatattatttccttgatcgacgaggagagtaaatttcccaaattcctggaaaagaacagagacacgctccatggcgatatcatccagctcgtgcacagcagtagaaataagttcatcaaacagattttccaagctgatgtcgccatgggagctgaaacacgaaaacgaagtcccacgttgtcatcccagttcaagcggtcgcttgaattgttgatgaggaccctgggggcttgccagccattctttgtccggtgtatcaaaccaaatgagttcaagaagcctatgctttttgacagacacttgtgcgttcgccaactgaggtatagcggaatgatggaaaccatacgcatccgacgggcaggctatcctattaggtactccttcgtggagttcgtggagaggtacagagtcctcctaccaggggtgaaaccagcatacaagcagggcgacctgcggggaacctgccagcgcatggcggaagctgtcttaggcacccatgacgactggcagattggcaagactaaaatctttttgaaggatcaccacgatatgttgctagaggtggaacgcgacaaggccataaccgatagagttatcctcctgcaaaaggtaattcgtggtttcaaagaccggagcaatttcttaaagctcaagaacgccgctaccctgatccagagacattggcgcggacataattgccgtaaaaactatggcttaatgcgtctaggattcctccgtctgcaggcactgcaccgatcaagaaaactgcaccaacagtacagattggctcgtcagcgcatcatccaattccaagccaggtgccgcgcatacctggtgcgaaaagcgttccggcatcgcctgtgggcggtgctgacagttcaggcttacgcgaggggaatgattgctagacgcctgcaccagagactacgtgcagagtacctctggcgcctggaagctgagaagatgcgactggcagaggaagagaaattacggaaagaaatgtctgccaagaaagccaaagaggaggcggagcggaaacaccaagagcgcctcgcccagcttgcccgtgaagatgctgaacgggaattgaaggagaaggaagccgctaggcgcaaaaaggagttgctggagcagatggagcgcgctcggcatgagcccgtgaaccacagtgacatggttgacaaaatgttcgggttcctggggacctccggcggactccctggacaggagggccaggccccttccgggtttgaagacttagaacggggaaggcgagagatggtggaagaggatttagatgccgcactgccacttccggacgaggacgaggaggatctgtccgagtataagtttgccaagttcgcggcaacctatttccagggcaccactacccactcatacaccaggcgacccttgaagcagcctcttctctaccacgatgacgaaggggaccaactggccgcactggccgtctggattaccatactacgcttcatgggtgatttgcctgagcccaagtatcacaccgcgatgagtgacggaagcgaaaaaatccctgttatgacaaaaatctacgagacattaggtaagaaaacttacaagcgcgaactccaggcactacagggggaaggtgaagctcaactgcccgagggacaaaaaaaaagtagtgttagacacaaactcgtgcacctgacactcaaaaagaagagcaaacttactgaggaggtcacaaaacgcttacacgatggagagtctaccgtccaaggaaatagcatgttggaggatcgcccaacatctaacctggaaaagctgcacttcattattggcaacggcattcttcgaccagcactgcgggatgagatttattgccagatatctaaacaactgacccacaatcccagcaagtctagctatgcacgcggttggattctggtgtctttgtgtgtaggatgctttgcccctagtgagaagttcgttaaatacctgcgcaactttatccatgggggtccacctggatacgctccatattgcgaagagcgccttcgcaggacgttcgtcaacggtacacggacacaaccgccaagctggctggaactgcaagccaccaagagcaagaaacccattatgctccccgttacttttatggacggaactaccaaaactctgctgaccgattccgccacaacagccaaggagctgtgcaacgccctggcagacaaaatcagcttgaaagatcgattcggcttcagcctgtacatcgcactttttgacaaggttagcagtctgggttcagggagcgaccacgtcatggacgccatttctcagtgtgagcagtatgcaaaggaacaaggggctcaggagcgcaatgcgccatggaggctgtttttccggaaggaagttttcaccccctggcactcccctagtgaagataatgtggccaccaacctgatatatcagcaggtggttcggggagtcaaatttggcgagtacagatgcgagaaagaggatgatctggctgagctagctagccagcagtatttcgtcgactatggatccgagatgattcttgaacgccttcttaatctagtgcccacttacatacctgatcgagaaatcacaccactcaagaccctggagaagtgggcgcaactggccatcgccgctcataaaaaagggatatacgctcagcgcagaactgacgcacaaaaggtcaaggaggacgtggtgtcatatgcacgcttcaaatggccactgctgttctcgaggttctacgaagcatataagttctcagggccatcactgcccaagaatgacgtaatcgtcgcagtaaattggaccggcgtgtactttgtcgacgaacaggagcaagtcctgctggaactgtctttccccgaaattatggctgtcagctcctctcgcgagtgtagagtgtggcttagcctcggctgcagcgatctcggctgtgccgctccacattcggggtgggcaggtctgactccagcaggtccttgctcaccctgctggagttgccgaggtgcaaaaacaacagctccttctttcacgttggccaccataaagggggacgagtataccttcactagctccaacgccgaggacattagggacttggtggtaacctttttggagggattgagaaaacggtccaaatacgtggttgctctgcaggataaccccaacccagcgggagaggaaagcgggtttctctcctttgccaagggtgacttgattattctggaccatgacacgggcgagcaggtgatgaatagcgggtgggccaacgggattaacgaacggacgaaacagcggggagatttcccaaccgatagtgtctatgtgatgccaacagtgactatgccacccagagagatagtggcgctggttaccatgacccctgaccagcgacaagacgttgtgcggttactgcagctgcggacagcggagccagaggtgagggccaagccttatacactagaagaattctcatatgattatttcagaccccctcctaaacacaccctcagtagagtgatggtgtccaaggcgcgagggaaagaccggctctggtctcacacaagagaacccctgaagcaggccttactcaaaaaactcttgggtagcgaggaactgagccaggaagcatgcctcgcgttcatcgcagtattaaagtacatgggtgactacccatccaagcgcactcgatctgtcaacgagctgacagatcaaatctttgaaggacccctgaaggcagagcctctgaaggacgaggcgtatgtccaaattctgaagcagctgaccgataaccacatccgttactccgaggagagagggtgggaactgctttggctgtgcaccggtttatttcccccttccaacatcctgctccctcacgtgcagcggttcttgcagtcccgcaagcactgtcccctcgctatagactgtctgcagaggctccagaaggcattaagaaacgggagtcgcaagtatccccctcacctcgttgaagtcgaggctattcagcacaagaccactcagatcttccataaagtatattttcccgacgataccgatgaggcatttgaggtcgagtctagcaccaaggctaaggacttctgccagaacattgctaccaggctgctactgaaatcatccgaagggttttccctttttgttaaaattgccgacaaggtgctttccgtgcccgaaaacgatttttttttcgactttgttcgccacttgactgattggattaagaaggctagacctatcaaggatggtattgtccccagcctgacataccaggtctttttcatgaagaagctatggacaacaaccgtgcccggtaaggaccccatggctgattcaatttttcattactaccaagagctgcctaaatatctcagggggtaccataaatgcacccgtgaggaagtacttcagctcggggctttaatttaccgcgtcaagtttgaagaggacaagtcatattttcctagcattcccaaactcctgcgcgaactggtcccacaagatctgatacgccaggtgtctcccgacgattggaagcgcagcatcgtcgcctactttaacaaacacgctgggaaatcaaaggaagaagcgaaactggccttcctgaagctgatctttaaatggccaacttttggtagcgcattctttgaagtcaaacagaccaccgagcccaatttcccagagatcctattgatcgctattaacaaatacggggtcagccttattgacccaaagacaaaggatattctaacaacccacccgtttacgaagatttcaaactggagctctgggaacacctacttccatattaccattgggaacctcgtgcgcggaagcaagctcttatgtgaaacctcgctggggtacaaaatggacgacttactcactagttacatttctcaaatgttgactgcaatgagcaaacaaaggggatctcgctccggtaagta

SEQ ID NO: 231648 - DNA, 6554 bp, synthetic construct
  misc_feature 1..6554: note = Description of Artificial Sequence: Synthetic coding sequence
  source 1..6554: mol_type = other DNA
gctctgctgcagaagggggaccacgtgtggatggacttgaggctgggtcaagagtttgacgtgcctattggcgctgttgtcaaactctgcgatagcggacaggttcaagtggtggatgatgaggacaatgagcactggattagcccccagaacgccacgcacataaagcccatgcatccaacatctgtgcacggagttgaagatatgatccgcctgggagatctaaacgaggccggaatcctcaggaatctgctgatcaggtaccgagaccatctcatctacacatatactggaagcattttggtggctgtaaacccttatcaattgctttccatttacagccccgagcacatccgccagtacaccaataagaagattggggaaatgccgcctcatattttcgctattgcagataactgctacttcaacatgaagagaaacagtagggaccagtgttgcatcatcagtggcgaatcaggcgctggcaagacagaaagcaccaaactgattctgcagttcctcgcagcaatttctggtcaacactcttggatcgaacagcaggtgctggaagcaacaccaatccttgaagctttcggcaacgcaaagacaattagaaatgataattcgtctcgcttcggtaagtatatagatatccatttcaacaaaagaggcgctattgaaggggcaaaaattgagcagtatctgctcgagaaaagcagggtttgccggcaagccttagacgaacgtaattatcatgtgttctactgcatgttagagggcatgagcgaagaccagaagaagaagctgggactggggcaggcatccgactacaattaccttgcaatgggcaattgtattacgtgtgaaggccgtgtggacagccaagagtacgccaatattaggtcagcgatgaaagtcctgatgttcacagatactgaaaattgggaaataagcaagcttcttgcggcaattctgcatctaggcaatctccagtacgaagcccgaactttcgaaaatctggacgcctgtgaggttctgttttctcccagtctggccaccgccgcttccctcctagaggtgaacccccctgacctcatgagctgtctgacgtcaagaaccctgattactaggggcgaaactgttagcaccccgctgtcaagagagcaggccctggatgtgcgtgacgcatttgtcaaagggatatatggtaggcttttcgtttggatcgtcgataaaatcaatgccgcaatttacaagccccctagccaggatgtgaaaaatagccggaggtcaattggccttctggacatttttggatttgaaaatttcgcagtcaactcgttcgagcagctgtgcattaatttcgccaacgagcacctgcagcaattttttgtgcgccatgtgttcaagctcgaacaggaggagtacgatctcgaaagcatagactggctccatatcgaattcaccgacaatcaggacgctttggacatgatcgcgaacaaaccaatgaacatcatcagccttattgatgaagaatccaagtttccaaagggaactgacaccaccatgctccataagctgaattcacagcacaagctgaacgcaaactacattccacccaagaacaatcacgagacgcagttcggcattaatcactttgcagggatcgtgtattatgagacccagggctttctggagaaaaaccgagacaccctccacggcgatattattcagttagtgcacagcagcagaaacaagttcataaagcagattttccaagccgatgtggctatgggtgctgagactaggaagcgtagcccaactttatccagtcaatttaaaagatcgttagaattacttatgcgcaccctgggtgcctgtcagcccttctttgtgcgctgcatcaagcccaacgaattcaaaaagcctatgttatttgatcgacatctttgcgtgcgccagttacggtacagtggcatgatggaaaccataaggatcaggagagccggttatccaatccgatattcatttgtggaatttgtggagcggtacagagtactcctgcctggggtcaagcccgcatacaaacagggcgacctgcgtggcacctgccagcgaatggcagaggcagtgctcggcacccacgatgactggcagatcggtaaaactaagatatttctgaaagaccaccacgacatgctgctcgaagttgaacgggataaggcgattacagaccgagtgattctactccaaaaagttataaggggtttcaaggacaggtccaacttcttaaaactgaaaaatgccgcaactctcatccaaagacactggcggggtcacaactgcaggaagaattatggattgatgcgcttagggttcttgaggttgcaggcgctacataggagcagaaaactgcaccagcagtaccgtctggccaggcagaggatcattcaattccaagcaaggtgcagggcatatctagttagaaaagccttccgacatcgcctatgggctgtattgacagtgcaggcttatgctcgcggaatgatcgccagacgtctgcaccaaagactgcgagctgagtatctctggcggctggaggcagagaagatgcggctggccgaagaagaaaaactgcggaaggagatgagcgccaagaaggcaaaagaggaagccgagaggaagcaccaggaacgtctggcccagttagccagggaggacgctgaaagagagcttaaggagaaggaagcggctaggagaaaaaaggaactcctggaacagatggagcgcgcaaggcatgagcccgtcaaccattctgatatggtggataaaatgtttggatttctggggaccagtggaggcctgcccggtcaggagggccaggctccttcaggatttgaggatctggagagaggacgacgagagatggttgaagaggacctggacgcggcactgcccctccctgacgaagatgaagaagatctttccgaatacaaatttgcgaagtttgctgctacatactttcagggaaccaccacccattcttatacgcgtagaccgttgaaacaaccactgctttaccacgatgatgagggcgaccagctcgctgcattggccgtgtggataactattctacgattcatgggagacctgcctgagcccaagtaccatacggccatgtctgacggcagcgagaagatacctgtgatgaccaaaatatatgagaccctgggaaaaaaaacatacaaaagagagcttcaagccctccaaggcgaaggagaggttactaaacgtctgcacgacggtgaaagcactgttcaaggtaactctatgttagaggatcgcccaacctccaacttggagaaactgcacttcataatcggcaacggcattcttcgccctgcccttagagacgagatttactgtcaaatttctaagcagctgacgcacaaccccagtaagtcatcatacgccaggggctggatattggtgagcctgtgtgtagggtgcttcgcgcctagtgaaaagtttgttaaatacctgcgcaatttcatacacggcggacctcctgggtacgccccttattgcgaagagcgactgcgccgaacgttcgtgaacgggaccaggacccagccgccaagctggctcgaactccaggccacaaagtctaaaaagccaattatgctgccagtgacctttatggatgggaccactaaaaccctgctgactgattccgcaaccacagctaaagagctgtgcaatgccctggcagataagatctcattgaaagatagatttggattttccctctatatcgctctttttgacaaagtgtcttccttgggctctgggagcgaccacgttatggatgccatcagtcaatgcgagcagtatgccaaagaacagggtgctcaagagcgtaatgccccatggcgtctgttctttcgcaaagaggtgtttaccccatggcacagcccgtctgaggacaatgttgccaccaatcttatttaccagcaggtggtgaggggtgtcaagtttggcgagtacagatgtgagaaggaggacgacctcgccgaattagcaagtcagcagtacttcgttgattatggctctgagatgatactggaaaggctgctgaacctggttcctacttacattcctgatcgggagattacccctttgaagaccttggagaagtgggcacagctcgccattgccgctcacaagaagggcatatacgcgcagagacgcactgacgcacagaaagtgaaagaagatgttgtttcctatgcgagatttaagtggcctttgctatttagtcggttctacgaagcctacaaattctcaggccctagcctcccaaagaatgatgtcatagtggccgttaattggaccggggtgtacttcgtagacgagcaagagcaggtgttgttggagttgtccttccccgagattatggccgtgagcagttcccgagagtgtcgtgtgtggctgagccttggttgcagcgatcttggctgcgccgcacctcactccggctgggccggacttaccccggcagggccttgttcaccatgctggagctgtaggggtgctaagaccacagccccttctttcactttggccaccataaaaggcgatgaatacactttcacctccagtaatgccgaagacataagggatctggtggttacttttctcgaagggttgagaaagaggagtaagtatgtggttgccctgcaagacaaccctaaccccgctggtgaagagagtggctttctgtcttttgctaagggtgatctcattatcttggaccacgacacaggtgagcaggtaatgaactccggatgggcaaacggaattaatgagcgtaccaaacagagaggagacttccccaccgactccgtctacgtgatgccaacggtgactatgccaccgagagagatcgtcgctctggtaactatgacgccggaccagagacaggatgtggtgcgcctgctccagttgagaaccgcagaacccgaagtgagagctaaaccttataccctggaagagttttcttacgactactttcgccctccgccaaaacacacactgtcccgggtgatggtcagtaaggcgaggggaaaggatcgactgtggtcacatacccgagagcccctgaagcaagctctattaaagaaactgcttggctctgaagagcttagtcaggaagcctgtttagcattcatcgcagtgctgaaatatatgggcgactacccatccaagcgcactcgatcggtgaatgaactcaccgaccagatatttgagggacctttgaaggccgaacctctgaaagatgaagcatatgtgcagatcctgaaacagctgaccgacaatcacattcgatactcggaagagagggggtgggagcttctgtggttgtgtacgggtctcttcccaccctcgaacatacttttgccccatgtacaacggttcctgcagagccgaaaacattgtccactcgcgattgactgtctgcaaagattacagaaggcgttgcgtaatggatcaagaaaatacccccctcatctggtggaggtggaggctatccagcataaaactacacagatttttcacaaagtgtattttcccgatgatacagatgaagctttcgaggtggagtcctcaacaaaagctaaagacttctgccagaacatagccactcgacttctgttaaagtcctcagaaggcttcagtctttttgtcaaaatcgcggataaggtcctgagcgtcccagagaatgacttctttttcgacttcgtgcggcatctgaccgattggatcaagaaagccagacccattaaggacggaatcgtgccctcactcacctatcaggtcttcttcatgaaaaaactgtggaccactaccgttcctggcaaagaccctatggcggactctatttttcactactatcaggaattaccaaagtatcttcgaggttatcataagtgcactcgggaggaagtgctacaattaggggcattgatataccgggtcaaatttgaagaggacaagagctattttccatctatcccaaagttactgcgtgagctggttccccaggacctgatccgccaggtgtctcccgacgactggaaacgaagtatagtggcctacttcaataaacatgcgggaaagagtaaggaggaggcaaaacttgcctttctgaaattgattttcaagtggcccactttcgggtccgctttctttgaggtgaagcagaccactgaacctaatttcccagaaattctgctcatcgcaatcaataagtatggagtgagcctcattgatcctaaaacaaaagatattctgactacccatcctttcacaaagataagcaactggagctcgggcaacacctattttcacatcaccatcggaaatctggtgagaggatccaagctcttgtgcgaaacttcactagggtataagatggacgacctcctgacctcttacatcagccagatgctgactgccatgtccaagcaaaggggatcccggtcagggaagta

SEQ ID NO: 231649 - DNA, 3609 bp, synthetic construct
  misc_feature 1..3609: note = Description of Artificial Sequence: Synthetic coding sequence
  source 1..3609: mol_type = other DNA
gctctgctgcagaaaggggaccatgtctggatggacctgcggcttggccaggagttcgatgtgcctattggcgctgtggttaaactctgcgattcaggccaggtgcaagtggtggacgacgaggacaacgaacattggatctcccctcagaatgctacccacatcaagccaatgcatcctaccagcgttcatggagtggaagatatgatacgactaggggacctcaacgaggccggaatcttgcggaatttgctaattcgctatcgcgaccatcttatatacacatatacaggtagcatactggtagcagtgaatccataccagctgcttagcatttacagcccagaacatattaggcagtataccaataagaaaatcggtgagatgcctccgcatattttcgctatcgctgacaattgctattttaacatgaaacgcaacagtagggatcagtgctgtatcataagcggtgaatctggcgcagggaaaactgaaagtaccaagctaatcttgcagttcctggcagccatatctggccagcacagctggatcgaacagcaggtattggaagctacaccaatcctcgaggccttcggtaatgccaagactattaggaacgacaactcatctaggttcggaaaatacattgatattcatttcaataaaaggggggcaattgaaggagccaagattgaacagtatcttttggagaagagtcgagtgtgtagacaggcacttgatgagcgaaactaccacgtcttctactgtatgcttgaagggatgtcggaagatcagaagaaaaagttggggctagggcaggcctcggactacaactacctagcaatggggaactgcatcacctgcgagggcagagtcgattcccaggaatacgcgaacattcgcagcgctatgaaagtcctgatgttcactgacacagaaaactgggaaatatccaaactcttggctgccattcttcacctcggaaacctgcaatatgaggcacgaacatttgagaatctggacgcttgcgaggtgctgttttcaccctctctggcaaccgctgcaagtcttctggaggtgaatcccccagatctgatgtcgtgcctgacctcaagaacactcatcactagaggcgagactgtaagtacacctttatccagagagcaggcattggatgtgcgcgatgcattcgtaaaggggatttatggcaggctgttcgtttggattgtggataagatcaatgcggctatctataagccaccatctcaggatgtgaagaacagtaggcgatccatcggactcttggatattttcggatttgaaaatttcgccgtcaattcctttgaacaactgtgtatcaattttgctaatgaacacctgcagcagttcttcgtgcgccacgtttttaagttagaacaggaggagtacgacctcgaaagcattgactggctgcacatcgaattcaccgataatcaggacgctttagatatgatagccaacaagccaatgaacattatctcactgatagatgaagagtctaagttccccaaagggacagatacgactatgctgcacaagctgaactcccagcacaaactgaacgccaattatattcctccgaaaaacaaccatgaaactcagtttggcatcaaccacttcgctgggatcgtgtattatgagactcaagggtttctcgagaaaaatcgggacactttacatggcgacattattcaacttgtgcactctagccgcaataagttcataaagcagattttccaggccgacgtagccatgggcgcagagaccaggaagaggtccccaacactatcatcgcaatttaagagaagcctggaactgctaatgcgcaccctcggcgcttgccagccgttcttcgtgagatgcataaagcccaacgagttcaaaaagcccatgctgtttgaccggcacctgtgcgtgcggcagctgaggtactctggaatgatggagaccatcaggatacgaagagcgggttatcctatccgctattccttcgtggaatttgtggagaggtaccgagttctgctccccggagttaaacccgcttataagcagggggatttacgtggaacttgccaacggatggcagaagcagtgctgggtacccatgatgattggcaaattggtaagacaaagatcttccttaaagaccaccacgatatgctcctggaagtggagagggataaggctatcacggaccgcgtcatactgctacaaaaggtcatccggggtttcaaggatagatccaacttcctaaagctcaagaatgccgctaccctgattcagcgccattggcggggtcacaactgtaggaagaattacgggctcatgagattggggtttctacggctgcaagccctgcaccgatcccggaagctacaccagcaataccggctcgcacggcagcgcatcatacagttccaggctcgctgtcgagcttatctggtgaggaaagcctttcgccaccggctctgggcagtcctgactgtccaggcgtacgctcgagggatgatcgcacgtcggttgcaccagcgcctgagggccgagtacctgtggaggttagaggccgaaaaaatgcgccttgccgaagaggagaaactaagaaaggaaatgtcagctaagaaggccaaagaagaagcagaacggaaacaccaggagcggttggcccagcttgctcgcgaagatgccgaaagagaactgaaggaaaaggaggcagctcgcagaaagaaggaactccttgaacagatggagagagcgagacacgagcctgttaatcactctgacatggttgataaaatgttcggatttctaggtacctcaggtggtctgcccggtcaggaggggcaggcgccaagcggatttgaggatctcgagcgcggacgcagagagatggtggaggaagatctcgacgcagcactgccactccccgatgaggacgaggaagacctgtcggagtacaaatttgcaaagtttgcagctacatacttccaagggactactacccattcttacactagacgcccattaaagcagccactcctgtatcatgatgacgaaggcgaccagttggcagctctcgcagtgtggatcacaattcttagatttatgggtgaccttccggagccaaagtaccacacagcaatgagcgacggcagcgaaaaaattcccgtgatgactaaaatctatgaaacacttgggaagaagacctataaaagagaactccaggccctgcagggtgagggcgaagtcctgcaagcacaactgccggagggacagaagaagtcgtccgtcagacacaagctggtacatctgactttgaaaaaaaaatcaaaattgacggaagaagtcactaaaagactgcatgatggcgaatctaccgtccagggtaatagcatgttggaagaccggcctacctccaacctggaaaagctccactttatcatcggcaacgggatcttgagacccgctctgaggtcggtcccccctgagtccttactggtggccgagtggtgcctatgtcagcctagcaaacgcctgtcacaggccccaggcttcggcttcgccgcatcttag

SEQ ID NO: 231650 - DNA, 6645 bp, synthetic construct
  misc_feature 1..6645: note = Description of Artificial Sequence: Synthetic coding sequence
  source 1..6645: mol_type = other DNA
gctttactgcaaaaaggcgaccacgtgtggatggaccttcggctcggccaggagtttgacgttcctatcggagctgttgtgaagctttgtgactctgggcaggtgcaggtggtggatgacgaagataacgagcactggatctcaccccagaacgctacccacattaaacccatgcatcctacaagcgtgcatggcgtagaggacatgattaggttgggcgatcttaatgaggccggaattctcaggaacctgctgattcgctaccgggaccatttgatatatacctacactggctctatacttgtggccgttaacccctatcagcttctgtcaatctactctcccgaacatatacgccagtatactaacaaaaaaattggcgagatgccacctcatatcttcgccatagcagacaattgctattttaacatgaagcggaattcccgggaccagtgttgcatcatttcgggggaatccggcgctggcaaaacggagtccacaaagctgatcctccaatttctcgccgctatctcaggccagcatagttggatcgaacagcaggtgctggaggcgacccccatactcgaagcatttggcaacgcgaaaacgattcgtaatgacaactcaagtcgctttggaaaatatattgatatccattttaataaacgaggtgccatcgagggagccaaaatagaacagtatttgcttgaaaaaagtcgggtctgtcgtcaggccttggacgagcgaaattatcacgtcttctattgcatgttggaaggcatgtcagaggatcaaaagaaaaaactgggtctgggccaggcatctgattataattaccttgccatggggaactgcataacctgcgaggggagggttgactcccaggagtacgccaatatccgctccgccatgaaagtcctcatgtttactgacactgaaaattgggagatttccaaactgctagcagccatacttcacttgggaaatctgcagtatgaggctagaacgttcgagaacttggatgcctgcgaagtgttgttctcacccagtctcgccactgccgcttcgctgctagaggtcaatccgccagatttgatgagttgtctcacatcccggactctgattacaaggggagaaacggtttcaacacccctgagcagagaacaggccctcgatgtaagggacgcctttgtaaaagggatttatggcaggcttttcgtgtggattgtcgacaagataaatgccgctatctataagcctcctagccaagacgttaagaactctcgacgtagcatcgggctgctcgacatattcggatttgaaaattttgcagtgaactctttcgaacagctgtgcataaatttcgccaacgagcacttgcagcagtttttcgtgcgccatgtttttaaactggagcaggaagagtacgatctcgaatcaatcgattggctgcacattgaatttactgacaatcaagacgccttggatatgatcgcgaataaacccatgaacataattagcctaattgatgaagaatccaaatttccaaaaggaacagacaccactatgcttcataagctcaattcacaacacaaactaaacgccaattacattccccctaaaaataaccacgaaacgcagttcggcatcaatcactttgccggaattgtgtactatgagacgcaaggatttctggaaaaaaatcgcgacacactgcacggagatatcatacagctcgtgcactccagccgaaacaagtttatcaagcaaatctttcaggccgacgtcgcgatgggcgctgaaacccgtaaacgctcgccaaccctatcctcacaattcaaacgaagtctagagttactcatgcggactctcggggcttgtcaaccattctttgtgaggtgtataaagcctaatgaattcaagaagcccatgcttttcgatcgccatctgtgcgtgcgccaacttaggtattctggcatgatggagaccattcgcatcagaagagctggctaccccatacgctactcattcgtggaatttgttgagaggtaccgagtcctcctgccaggcgtgaagcctgcttacaagcaaggcgaccttagggggacctgccagcgaatggccgaggccgttcttggcacccacgacgactggcagatcggtaaaacaaaaatcttcctgaaggatcaccacgatatgctgctggaagtggaacgcgataaggccattaccgacagagtgattctgctgcagaaggtaatccgaggcttcaaagataggtcaaatttcttaaaactgaaaaatgccgcaaccctgatccagcggcattggcgtggtcacaactgtcgcaaaaattacggccttatgagactggggttcctccggctccaggccctccacaggtcaaggaaattgcaccagcagtaccggttagctagacagcgcataatccagtttcaggctaggtgtcgtgcctacctggtgaggaaggctttcagacatagactttgggcagtgctaacagtccaggcctacgccagaggcatgattgctaggagactgcaccaacgcctcagggccgagtatctctggaggctcgaggccgagaagatgcgcctcgcggaagaggaaaagctgaggaaggagatgagcgcaaaaaaagcaaaggaggaggcggaaagaaagcaccaggagaggctggcacagctggctagggaggatgcagaaagggaacttaaagaaaaggaggcagccaggcgcaaaaaggagctgctcgagcagatggagcgagccaggcatgagcccgtcaatcacagtgacatggtcgataagatgttcgggttcctgggcacaagtggcggattacccggtcaggaaggacaagccccttctggcttcgaagacctggagaggggacggagggaaatggtggaggaagatcttgacgccgctctcccactcccagacgaagatgaagaagacttgagcgaatacaagtttgcaaaattcgcagccacctacttccaggggactaccacgcactcatacactagaaggccccttaagcagcctttactataccatgacgacgagggcgatcagctcgcggcactggccgtctggatcacaatactacgctttatgggcgacctgccggagccaaaataccacacagcgatgtcagatggttcagagaagatacccgtgatgactaagatttacgagaccctcggtaaaaagacctacaaaagagaactgcaggccctgcagggagagggagaagcccaactccccgagggacagaagaagtcttcagtgcgtcacaaattagtacacttaacactgaaaaagaagtctaagctaactgaggaggtgacaaagcggttgcacgatggagaatcaactgttcaaggcaattctatgctcgaggacagacccacgtctaatctggagaaactacactttattattgggaacggcatattgcgacctgctctgagagatgagatctactgccagatttccaaacagctgacccacaacccctcaaagagctcctacgcgaggggctggatactggtgtctttatgcgtgggatgtttcgcccctagtgagaaattcgtgaagtacctccgcaacttcattcacggcggaccccctggttatgccccttactgtgaggaaagactacgcaggacctttgtgaatgggactcgcacccaaccgccttcttggctcgaattacaagctacgaaaagtaagaagcccattatgcttccagtcacctttatggatggcacaacaaaaacccttttgactgattccgccacaacagctaaggagctgtgcaatgctctggcagacaagatcagtctgaaagatcgctttgggttctcattatacatcgccctgtttgacaaggtgtcctcactcggatcagggagtgatcatgttatggacgcgatctctcaatgtgagcaatacgctaaggaacagggcgcacaagagcgtaatgccccatggaggctgtttttcagaaaggaggttttcaccccatggcacagtcctagcgaagataatgtggctaccaacctaatctatcaacaggtggtaagaggggtgaagttcggagagtatcggtgtgagaaagaagacgacctcgccgaacttgcctcccagcagtattttgtagattacgggtcggaaatgatactcgagaggctactgaacctagtgcctacatatattccagacagggagattacgccccttaaaacgctcgaaaaatgggcccagttagccatcgcggcacacaaaaagggcatctacgcacaacgccgaaccgacgcccagaaggtaaaagaagatgtggtctcgtacgccaggttcaagtggcccctccttttttccaggttctatgaggcatataagttctctggaccctcactcccgaaaaatgacgtcatcgttgcagtcaattggacaggagtctatttcgtggacgagcaggaacaagtgctcctggaactgtccttccccgagatcatggcagtgagcagttcaagagagtgcagagtttggctctctttaggctgctctgacctcggctgcgcggctccccactctggttgggctgggcttaccccggcaggaccttgttcgccctgctggagttgtaggggggctaagaccactgcgccaagcttcacgctggctaccatcaagggggacgagtatacatttacctcttccaatgccgaggatatacgggacctcgtagtgacttttttggagggcctacggaagcgatccaaatacgtggtggcgctgcaggacaacccaaaccctgcaggggaggaaagcggctttttgagtttcgcaaaaggtgacctcatcatcctggaccatgacaccggagagcaggttatgaacagcgggtgggcaaacggcataaatgagcggaccaaacaacggggtgattttcctaccgacagcgtgtatgtaatgcccacagtgacaatgccaccacgcgaaatagtcgcccttgttactatgaccccagatcagaggcaagacgtggtccggctgctgcagctgagaactgctgagcccgaggttcgtgcaaaaccctatactcttgaggagtttagttacgattatttccggccacctccaaagcacactctcagccgcgtgatggtgagcaaagcgaggggaaaagatcgcctgtggagccacaccagggagccattgaagcaggcactgcttaaaaaactgctggggtccgaggagctgtcccaggaggcctgcctcgccttcatcgctgtgctaaaatacatgggcgattacccttcgaagcgcacaaggtcagtaaatgagttgaccgaccagatcttcgagggcccactgaaggcagagcccctcaaagatgaggcatacgtgcaaatccttaagcaactgacagacaatcacattaggtattcagaggaaagaggatgggaactcttatggctgtgtaccggactgtttccccctagcaacattctcctcccccatgtacagcggttcctgcagtcccgcaaacactgccccctcgccattgactgcctacagagactgcagaaggccctccgcaatggatctcgaaaatatccaccacacctcgttgaggtcgaagcaattcagcacaaaacaacccagatttttcacaaggtctactttccagacgatacagacgaggccttcgaggtcgagtcaagcacaaaggcaaaggacttctgtcaaaatatcgctaccaggctcctgctgaaaagcagcgaaggttttagtctctttgttaagatagctgacaaagtattgtcagtgccagagaacgacttctttttcgactttgtccgccaccttacagactggattaaaaaggcgagaccaataaaagacggtatcgtgccttcgctcacttatcaagtattttttatgaagaagctctggaccacaactgtcccaggaaaggaccctatggctgatagcattttccattactaccaggaactgcccaagtaccttagggggtaccacaagtgcacccgcgaggaggttttacagctgggcgcactgatctatagagtgaaatttgaagaggacaagtcttatttcccatctatccctaaactgctgcgtgagctggtcccacaagatctaatacgtcaggtgagccccgatgattggaagcggagcatcgtggcctactttaacaaacacgccggaaagtccaaggaggaagcaaaactggcctttctaaagttgatctttaaatggccaacttttggatctgccttttttgaggttaaacagactactgagcctaatttccctgaaatcctgcttatagctattaacaagtatggagtgagcctaatcgatcctaagactaaggatattttgactactcatcctttcacaaagattagcaattggagtagcggaaatacctacttccacattaccattgggaacctcgtccgcggaagtaagctcctttgcgagacctctctgggatacaaaatggatgatctgctaacctcatacatcagtcagatgctgaccgcgatgtctaaacagcgaggttcccggagcggcaagtaa

SEQ ID NO: 231651 - DNA, 6647 bp, synthetic construct
  misc_feature 1..6647: note = Description of Artificial Sequence: Synthetic coding sequence
  source 1..6647: mol_type = other DNA
atggtaattctccagcaaggcgaccacgtgtggatggacctgcgtctcggacaggagtttgacgttcccatcggtgccgttgtgaagttatgcgatagtggccaggttcaggttgtggatgatgaggataatgagcattggatttctcctcagaatgccacacatattaagccaatgcacccaacatcagtgcacggggtcgaagacatgataaggctcggcgacctgaatgaggctggaattcttcgaaacctgctgataagatatcgggaccacctcatctacacctacactggatcaatccttgtggcggttaacccttatcagctgctgtctatctactcacccgaacatatccggcagtacaccaataagaaaatcggtgagatgcctccccacatatttgccatcgccgacaactgctactttaacatgaagcggaactctcgggaccaatgttgcattattagcggtgaatcaggggctggcaagacagagagtactaagctgatcctccagtttctggctgccatctctggccagcacagctggattgagcaacaggtcctcgaggcgactcccatcctcgaggcttttggcaacgccaagactattcgtaatgataattcctcacgattcggcaaatatatcgacattcacttcaacaagcgtggggctatcgagggggctaagatcgagcagtatctattagaaaaatcccgcgtctgcagacaggcactggatgaacgtaactaccatgttttttattgcatgctggaaggaatgtctgaagaccagaagaagaaactcggtttgggccaggcttccgactacaactatttagctatgggtaactgtataacgtgcgagggccgtgtggacagtcaggagtacgccaatattcgctccgcgatgaaagtcttaatgtttacggataccgaaaactgggagatctcaaagttgctcgccgctatcctgcacctgggcaaccttcagtacgaagcgcgaactttcgaaaacctggacgcttgcgaagtgctgttctcgccttccttagcaactgccgcatcactcctagaagtgaacccacctgatttaatgtcatgcctcacgagtcggacgctgattacgcgtggcgagaccgtcagtacccccctcagtagagaacaggcactagatgtccgagatgccttcgtgaaaggcatctatggccgactatttgtgtggattgtagataagatcaacgccgcaatttataagcctcccagtcaagacgtcaagaatagccggagatccattggtctccttgatatctttggatttgaaaatttcgctgtgaatagtttcgagcaactttgcatcaactttgccaacgagcatttgcaacagttctttgtgcgccacgtgttcaaactggaacaagaggaatatgatcttgagtcaattgactggttgcatatagaatttactgataatcaggatgctcttgacatgatcgcaaacaagcccatgaacatcatttccctcatcgatgaggaaagtaagttccctaagggcaccgatacaaccatgctgcataagctaaatagtcagcataagctgaatgcaaactacatacctccgaaaaacaaccatgaaacccagtttggcatcaatcatttcgctgggatagtgtattatgaaacacaaggatttctggaaaaaaaccgtgacactctgcatggggatatcatccaacttgtgcattcctcacgtaataaattcattaagcagatttttcaagcagacgtggctatgggggcagagactcggaaacgctcccctacactctccagccagtttaagcggtccctggaactgctcatgcgaaccctcggagcttgccagccctttttcgtacggtgtatcaagccaaacgaattcaaaaaaccaatgctgttcgacagacatctttgtgtccgccaactgcggtattccggtatgatggagacaattcgaattcgtcgagccggttatccaatccgatactccttcgtggaattcgtagagaggtatagggtcctgcttcccggagtgaaacctgcctataagcagggcgaccttcgcggaacgtgccaacggatggccgaagccgtcctcggcacccacgatgattggcagatcggtaaaacgaaaatttttctaaaagaccaccatgacatgctcctagaagtcgaacgagacaaagctatcacagaccgagtgatccttctgcagaaggtcattaggggattcaaggaccggtcaaattttctgaaattgaaaaacgccgctacccttatccagaggcattggcgcggacataattgccgcaagaactatgggttgatgaggttaggctttcttaggcttcaagcactgcatcgatcccgtaagttacatcaacagtatcggttggctcggcaacggataatacagtttcaggcgagatgtcgggcatacctcgttagaaaggccttcaggcaccgcctctgggcagtcctcaccgtacaggcctatgcgaggggtatgatcgcgagaaggctgcatcagaggctgagggccgaatacctgtggcggctagaggccgaaaaaatgagactcgcagaagaggagaagctgagaaaggagatgagtgccaagaaagctaaggaagaggctgaaagaaaacatcaggaaagactggcacaattagcacgtgaggacgccgaacgcgagctcaaggagaaggaagctgctcgccgaaaaaaggaactgcttgagcaaatggaacgggctcgccatgagcctgtcaaccattccgatatggtagataagatgttcggctttctggggacgagcggaggactccccggtcaggaaggccaggctccgtccggctttgaagacctggagagggggagacgcgaaatggtggaagaagatctcgacgccgcactgcccctgccagatgaagacgaggaagatctgtcagaatacaagtttgcgaagtttgcagctacttatttccagggcacaaccacacattcctatacgcgcagacccttaaaacagcccttgttataccatgacgacgaaggggatcagcttgccgctcttgccgtttggatcacaatcttgcgctttatgggcgatctgcctgagccaaaatatcacactgccatgagcgacgggagcgagaaaatcccagtgatgacgaagatctacgagactctgggaaagaagacatacaagagggaacttcaggcactgcaaggcgaaggagaggcccagctgcccgaaggccaaaagaagagtagcgtgaggcataagttggtccacctcacccttaaaaaaaaatctaaattgacagaggaggtcaccaaaagattgcatgacggggagtcaactgtgcagggcaactccatgctggaggatcggccaacctctaatctggagaagctgcactttattatcggcaacggcatcctgcgacctgccctacgggacgaaatttattgtcaaatcagtaagcaactcacccacaacccaagcaaaagctcttacgctagagggtggatacttgtgtccctttgtgttggctgcttcgcaccaagcgagaaattcgtgaaatacctgaggaacttcattcatggtggccctccagggtacgctccctattgtgaggaacggctgagacggacctttgttaatggaacaagaacacagcccccatcttggctcgagttgcaggctacgaagagcaaaaaacctattatgttaccagtaacgttcatggacggaacgaccaagaccctgctcaccgattcagccacaaccgccaaggagctttgcaacgccttggctgacaaaataagcctgaaagatcggttcggcttctctctgtatatcgctctgtttgataaagtgtcttcgctgggtagcggatctgaccatgttatggacgccatctctcagtgtgaacaatacgcaaaagagcaaggtgcgcaggagcgaaacgccccttggcggctattcttccgcaaggaagtgtttaccccttggcatagcccaagcgaggacaatgtggcaaccaacctcatctaccaacaggttgtgaggggcgtgaaatttggtgagtaccgttgcgaaaaggaagacgacctggcagaattggcgagtcagcaatacttcgtagattacggttctgagatgattctggaaagattactgaatctcgtacctacatatattcccgacagggagattactcccctgaagaccttagaaaaatgggcccagcttgccatcgccgctcacaaaaaagggatatatgcgcagcggcgaacagacgctcagaaggtgaaagaggatgttgtctcctacgccagattcaagtggcccctcctgttctcaagattttatgaagcctacaagttctcagggccatccctgccaaaaaacgatgtcatcgtagcagtcaattggactggagtttatttcgtggacgagcaggaacaggtgcttcttgaactgtcttttccagagatcatggctgttagcagttcgcgtgagtgtagggtttggctctctctgggttgtagtgatttaggttgcgctgcgccacatagtgggtgggccggactgacccctgctggtccctgttccccttgttggagctgcaggggggcaaagaccacggccccatcttttacccttgctactattaagggcgatgaatatactttcacgtcatctaatgctgaggacatcagggatctggtggttacattcctggagggccttaggaaaaggagcaagtacgtcgtggccctgcaggacaacccaaatcccgctggcgaggagagcgggtttctgagctttgcgaaaggtgacttgatcatcttagaccatgacacaggcgaacaggtcatgaattcgggctgggccaatggtataaacgagcgcacgaagcagagaggcgattttccaaccgactccgtgtacgtgatgcctacagtgacaatgcctccacgggagatcgtagcgctcgtgactatgaccccagaccagcggcaggatgtggttcgactattgcagctgaggacggccgagcccgaagttcgggcaaagccatacactctggaggaatttagttatgactacttcagaccaccaccaaagcataccctaagcagggtcatggtgtctaaggctcgcggtaaagacagactgtggtcccacacccgggaaccacttaagcaggccctcctcaagaaactcctgggatccgaagagctgagccaggaagcctgtctagctttcatcgctgtgctgaagtatatgggagactatccctcaaagcgaacccggtcagtcaatgagctcacggatcagatcttcgaggggccattgaaagccgaacccttgaaagacgaggcctacgtgcagattctgaaacagttgactgataaccacatcaggtactctgaagaacgcggatgggaacttctgtggctgtgcactggtctgtttcccccttcaaatattctgttgccccacgtacagcggtttctgcaaagtcggaagcactgcccactggcaattgactgccttcagaggcttcagaaagcattgcggaatggttcccgtaaatacccaccacacctggtggaagtggaggctatccagcataagacaactcagatatttcataaggtgtattttcctgatgataccgacgaggccttcgaagtggagagctccactaaagccaaagatttttgccaaaacattgcaacccgattgctcctgaaatcctcagaagggttttctctgtttgtgaagattgctgacaaagtgctttccgtgcccgagaatgacttcttctttgactttgtaaggcacttgacagactggatcaagaaggccaggcctataaaggacggaatcgttccaagtctgacataccaggtcttctttatgaaaaaactttggacaacaacagttccaggtaaggaccctatggctgattctatcttccattactaccaagagcttcccaaatacttacgcggttaccacaaatgtacaagagaggaggtcttacagctcggagcactgatctaccgcgttaagtttgaggaagataaatcctatttcccttctatacccaaattgttgagggagctggtgccccaggatttgattagacaggtctcccccgatgattggaagcgctctatcgttgcatacttcaataaacatgccggaaagtcaaaagaagaagcaaagttagccttcctaaaactaatctttaagtggccaaccttcgggagtgcatttttcgaggttaaacagaccaccgagcccaacttccccgagatcctgctaatcgctattaacaagtatggcgtgtctctaatagatcccaaaactaaggacattttgaccacacacccctttaccaagatcagtaattggtcctctggcaacacctactttcacattaccattggcaatttggtgcgtggaagtaagttgctctgtgagacctctttagggtataagatggacgatctgctcacttcttatatctctcagatgctaaccgctatgagcaagcagcgcggaagcaggtcaggtaagta

SEQ ID NO: 231652 - DNA, 3537 bp, synthetic construct
  misc_feature 1..3537: note = Description of Artificial Sequence: Synthetic coding sequence
  source 1..3537: mol_type = other DNA
atggtgatcctacaacagggagaccacgtgtggatggatttgcggctgggacaggaattcgacgtccctattggagccgtggtgaaactgtgtgattctgggcaggtacaggtggtcgacgacgaggataatgaacactggatctctccccaaaatgcgacccatatcaagccgatgcatccgacttccgtgcatggggtagaggacatgatacgtctcggcgaccttaacgaagctggcatcctcaggaacctgctgatccgctatagagaccacctcatttatacatatacaggaagcatccttgttgcagtgaacccgtatcagctactgtccatctatagtcctgagcacattcgtcagtatactaacaagaaaattggcgagatgccgcctcatatctttgccatcgcggacaactgttatttcaatatgaagcgcaatagtagagatcagtgctgtattatctccggagagtccggtgctggaaagacggaatcaaccaagctgatcctgcagtttctggccgcaatttctggccagcacagctggatcgagcagcaagtcctcgaggccacaccaattttggaggcatttggtaacgcgaagactatccggaacgacaactctagccggtttgggaaatacattgacatccactttaacaagcgcggagcaatagaaggagccaagattgaacagtacttgcttgaaaagtcacgggtgtgccgacaagccctcgatgagagaaactaccacgtgttttactgcatgttggagggaatgtctgaggatcaaaagaagaaactgggcctgggacaggcctcagattataactatctagcaatggggaattgtatcacctgtgagggccgagtcgactcacaagaatacgccaatatcaggtccgcaatgaaggtgcttatgtttacagacacggagaattgggagatttccaagttgctcgccgctatcctacacttagggaacctccagtatgaggccaggacattcgaaaaccttgacgcgtgtgaagtgctcttttcgccttccctcgccacagccgctagcttattggaggtgaatccccctgaccttatgtcatgcctgacgtcccggacattgatcacgcgtggagagacagtctctactcccctcagtcgcgagcaggctctggatgtgagggatgctttcgtgaaaggcatttatggacgactgtttgtgtggattgtggataaaatcaacgccgcaatttacaaacccccatctcaggatgtcaaaaactcccggcgtagtatcgggctgctagatatcttcggctttgagaacttcgctgttaactccttcgagcagttatgcataaacttcgctaatgaacatctccagcaattttttgtgaggcatgtctttaaactggaacaggaagaatacgatctggagagtatcgactggctccacattgaatttacagacaaccaggacgcactggacatgatcgccaataagcctatgaacatcataagcctgatcgacgaggagtcaaagtttccaaagggcactgatactaccatgcttcacaagctcaactcgcaacacaagctaaacgccaactacatcccgccaaagaataatcatgaaactcaatttggaattaaccattttgctgggatagtgtattacgaaacccaagggttcttggagaagaatagagacactctccatggtgacattattcagctcgtccacagctctcgaaacaaatttatcaagcagatctttcaagcggatgtggcaatgggcgctgagactaggaaaagaagcccgaccctgtcatcacaattcaaacggtctttagagctgctgatgaggactctgggggcatgccaacctttttttgttcgctgcattaaaccaaacgagttcaaaaagccaatgctcttcgaccgtcacctgtgtgtgcggcagctccgctactcagggatgatggagacgatccgaattcggcgagccggataccctattcgctactcttttgtggagttcgttgaacgatatcgcgtcctcctgcctggggttaagcccgcttataagcagggcgacctgcgcggtacttgccagcgaatggccgaagcggtccttggcacccacgacgattggcaaataggcaaaacaaagatctttctgaaggaccaccacgatatgttactcgaggtagaacgcgataaggcaattactgatcgcgtgatcctccttcagaaggtaattcggggtttcaaagacaggtccaacttcctgaaattgaagaacgccgctactctaattcagcggcattggcgaggccacaattgccggaagaattatgggctcatgcgtctaggcttcctaagattacaggcattacacagaagtagaaagttgcaccagcagtacagacttgccagacagcgcataattcaatttcaagcacgatgtcgagcctatctggtgcggaaggccttcaggcataggctgtgggccgtgctgacggtgcaggcttatgcaagagggatgatagccaggagactgcatcaaaggttacgggctgaatatttatggcgactagaggcagagaaaatgcggctggccgaagaggagaagctgagaaaagaaatgtctgccaagaaggcgaaagaggaggctgagcggaaacaccaagaacgcctcgcgcaactggcaagagaggatgctgagcgagaattgaaggaaaaagaagccgctaggcggaaaaaggaactgctagagcaaatggaaagagctcggcacgagcctgtgaatcatagcgatatggtagataaaatgtttggattccttgggacctcaggtggtctgcctggccaagagggtcaggctccttcaggttttgaggaccttgaacgcggtagacgggaaatggttgaggaggacttggacgccgctctgcccctgcctgacgaagacgaagaagacctctccgaatacaaatttgctaaattcgccgcaacttattttcagggcacgactacacacagctacacaagaagacccttgaagcagccactgttgtaccatgacgatgaaggcgaccaactagctgctctcgccgtgtggattactattctacgttttatgggcgaccttcccgaaccaaagtaccacacggctatgtcagacggcagcgagaagatacccgtcatgactaagatctatgagacactgggaaagaaaacttacaaacgggaacttcaggcactgcagggagagggcgaagcccagttacccgaaggacaaaagaaaagtagtgtcagacataaactagtacacctgaccctcaaaaaaaaatctaaactgactgaagaagttaccaagagactgcacgacggcgagagcacggtgcaaggcaactcgatgctggaggaccgtcccacgagcaatcttgagaagctgcatttcatcattggaaatgggattctcagaccagccctgaggtccgtgcccggaggaggggacaccagagcgtag

SEQ ID NO: 231653 - DNA, 6527 bp, synthetic construct
  misc_feature 1..6527: note = Description of Artificial Sequence: Synthetic coding sequence
  source 1..6527: mol_type = other DNA
atggtgatcttacagcagggggatcatgtctggatggatttgcgcttgggccaggaatttgatgtgccaattggggctgtcgtgaaactctgtgactcgggtcaggtccaagtggtggacgacgaggacaatgaacattggatttcgccgcagaatgcaacgcacataaaacctatgcaccctacctcagtgcatggagtcgaggacatgattcgcctcggcgacttgaacgaagctggtattctgaggaacttactcatcagatacagggaccatctcatttatacatataccggttcaattctggtcgccgttaacccctaccagcttctctccatctattcgccagaacacattaggcaatacacaaataagaaaatcggtgaaatgccaccccacattttcgccattgctgacaactgctacttcaatatgaagagaaattcgcgggatcagtgctgcatcatctcaggcgagagtggagccggaaaaactgagagcactaagttaattctgcagttcctcgcggctatcagtggacaacactcctggattgaacagcaagttctggaggccacccccatcctggaggcgttcggcaatgctaagactatccggaatgataatagtagccgttttggcaaatatatcgatatccactttaataagcggggtgccatcgaaggggctaaaattgagcaatacctgctagagaaatctagggtatgtaggcaggctctcgacgaaagaaattatcacgtcttttattgcatgttggaaggaatgagcgaagaccagaaaaaaaagctcggtctgggccaggccagcgattataactacctggcaatgggaaactgcattacctgcgagggacgcgtggatagtcaagaatacgccaacatcagatcggctatgaaagtcctgatgttcactgataccgaaaattgggagataagcaaactgctagctgctatactgcacctggggaacctgcagtatgaggctagaacctttgaaaatttggacgcatgtgaagtcctgttcagccccagcctcgccaccgctgcctctctcctggaagtgaaccctcccgacctaatgtcttgcctgaccagcagaacgttgattacccgaggggagaccgtctcaacccccctctctcgcgagcaggcactcgacgtgcgcgacgcctttgtgaagggaatttatggcagactgtttgtctggatcgtggataagataaacgccgctatttataaaccgccatcacaagacgtcaaaaactcccgccgtagtattggcctgctggacatcttcggcttcgaaaactttgccgtaaatagcttcgagcagctttgcatcaacttcgctaacgaacatttacagcagttcttcgtgcgccacgtctttaagctggagcaggaggagtatgacctcgagagcatagactggctgcatatcgagtttacagacaaccaagacgcattagatatgatcgctaacaaacccatgaatataatttctttaatcgacgaggagtccaaatttccaaaggggacggacacaaccatgctgcacaaactcaacagccagcacaaactgaatgccaattacattccgccaaaaaacaatcatgaaactcagtttggcatcaatcacttcgcaggaatcgtatactatgaaactcagggctttctcgagaagaaccgcgacactctgcatggggacattatccagctggtgcattcttcccgcaacaaatttatcaagcagattttccaggcagacgttgctatgggcgctgaaacccgtaagcgtagtcctaccctctcttcacagttcaagaggtctctggaactgctgatgcgcacattgggagcgtgtcagcccttcttcgttcgttgcattaagcccaatgaattcaagaaaccaatgctattcgaccgacatctgtgtgtgcgtcagcttcgctactctgggatgatggagaccattcgaatccggagagcaggttacccaataaggtattcttttgtggagttcgtggagagatacagagtgctcctaccgggagtgaagcccgcatacaaacagggggacttacgcggaacgtgccagcgaatggccgaggcagtgctcggtacgcacgacgactggcagatcggtaagaccaagatattcctaaaagaccatcacgatatgctccttgaggtagaacgggataaggcgattaccgatcgggtaatcctgttgcaaaaagtcattcggggtttcaaagaccggagtaatttcctaaagctgaaaaacgctgctactctgatccagagacactggcggggacacaactgccggaaaaattatggcctgatgcgcctcggcttcctccggctgcaggccctgcaccggtcccggaaacttcaccaacagtatagactggccagacagcggatcatacagtttcaggcaaggtgccgcgcttatctggtgaggaaagcctttcgccaccgactgtgggcagtgctcactgtgcaagcgtatgctcgcggtatgattgctaggcgcttgcaccagcgcctaagagctgagtatctctggcggctagaagctgagaaaatgcgcctcgcagaagaggagaagttacggaaagaaatgagcgcgaagaaggctaaggaggaagcagagcggaagcatcaggagaggcttgcccagttggcccgagaagacgctgagcgagagctgaaggagaaagaagcagccagaagaaaaaaggagctgttggaacaaatggaacgggctcgccacgagccagtgaaccattcagatatggtggataaaatgttcggcttcctggggacatccggcggattgccaggtcaagaggggcaagccccttctggctttgaagatctggaacggggacgccgtgaaatggtggaggaggacctggatgcggctctgccactgcccgatgaagacgaggaagatctatcagaatataaatttgcaaagtttgcagcgacctactttcagggtactacaactcattcctacactagacggcctcttaaacaacctctcttgtaccacgacgatgagggagaccagttggctgccttggctgtctggatcaccatacttaggttcatgggcgacctgcctgagcccaaatatcatacagcgatgagtgatggctccgaaaagatcccagtaatgacaaaaatttatgaaaccttgggcaagaaaacctataagagagagctgcaggccttgcagggagagggcgaagcccagttaccagaaggccaaaagaagtcatcagttcgccacaagttagtgcatttgactctaaagaaaaagagtaagcttactgaggaggtcactaaacggctccatgatggcgagtccactgtccagggaaactctatgttggaggataggccaacctcgaacctagagaaactgcactttatcatcggtaacgggattctccgacctgccctccgcgatgaaatatactgccagatatctaagcagctaacgcataatccaagtaagtcatcttacgccagaggatggatactggtatcactgtgtgtggggtgtttcgccccttcagaaaaattcgtgaagtacttgaggaacttcattcacgggggtccccctgggtacgccccatactgcgaggagaggctgcggcgaaccttcgtgaacggtacgcggacgcagcctccttcatggctggaattacaagccaccaaaagcaaaaagccaatcatgctgcctgtcactttcatggatggtacaacaaaaacactactaacagactccgctacgacagccaaagaactgtgcaacgcacttgctgacaagatctcgcttaaggacagattcggatttagtctgtacattgcactgtttgataaggtatccagtctggggtcagggtccgaccatgtgatggatgccatatcccaatgcgagcaatatgcaaaggagcagggcgcacaggagaggaacgctccctggaggctattttttcggaaagaggttttcactccgtggcattctccgtcagaggataacgttgctactaatcttatctaccagcaagtagtgcggggtgtgaaatttggcgaataccgctgcgagaaggaagatgatttggccgaactggccagccagcaatactttgtggattatggatctgagatgattttggagcgccttctcaatttagtgcccacctacatccccgacagagagattactccgctgaagactctggagaagtgggcccagttggcgatcgccgcacataagaagggcatctacgcacagaggcggaccgatgctcagaaagtaaaggaggacgtggtctcctacgctagattcaaatggccacttttgttcagccgattctacgaagcctacaagttttccgggccaagcctgcctaagaacgatgtgattgtggccgtcaattggaccggcgtctatttcgtggacgaacaggagcaagtcctgctcgaattgtctttccccgaaatcatggctgtaagcagctctagaggcgcaaaaacaacagcgccttcttttaccttggccacaatcaagggtgacgaatacaccttcaccagtagtaatgcagaagatataagggacctcgttgtgacctttctagagggcctccggaagcgaagcaagtacgtcgtggccctccaggacaatccaaacccagcaggcgaggagagcggctttctgagttttgccaagggggatttgattatcctggatcacgacaccggggaacaagtgatgaattcagggtgggccaacggaattaatgaaaggactaagcaacgcggtgactttcccaccgattctgtctatgtgatgccgacagtaactatgccccctagggagattgtagccctggtcacaatgacacccgatcagcgacaggacgtagtcagactgttgcagttgcgtacagccgagccggaggtgcgcgcaaaaccttacactcttgaagaattcagctacgactactttaggccacctccgaaacacactctctcaagagtcatggtgagcaaagctcgcggtaaggatcggctctggtcacatacacgcgagcccctcaagcaggccctgctgaaaaagcttctgggaagcgaggagctttcccaggaggcctgcttggcctttattgctgtgcttaaatacatgggggactaccccagtaagagaacgagatctgtaaacgagctgacagaccagatcttcgaaggaccactcaaggccgagcctcttaaggatgaagcctacgtgcagatcctgaaacagctcacagacaaccacattaggtactcagaagagagggggtgggagctcttgtggctgtgtaccggcctgttccctccgagtaatattttgttacctcacgttcaaagattcctgcagagtagaaagcactgccccctggccatagactgcctacaacggctgcagaaggccttgcgcaatggatcccgtaaataccccccacatctcgtcgaggtggaggctatccagcacaaaacaacccagatctttcacaaggtatatttccccgacgacacggatgaagcatttgaggtggaaagctcaaccaaggccaaagatttttgtcaaaacatcgccacgaggctcttgctcaagtcaagcgagggcttcagcctgtttgttaagatcgcagataaggtcctgtccgttcctgaaaacgattttttcttcgatttcgtaagacatctaaccgattggataaaaaaggctcgtcccattaaggatgggattgtgccaagcctaacataccaggtcttcttcatgaagaaactctggactacaacggtgcccggaaaggatcctatggcagacagcatcttccactactatcaggaactgcccaaatatctgcgcggatatcacaaatgtacacgggaggaagtgttgcagttgggggctctgatttacagagtgaaattcgaggaggataagtcttatttcccttcaataccgaagctcctccgagaactcgttccacaagacctgatccggcaggtcagtccagatgattggaagcggtccattgtcgcttattttaacaaacacgcaggcaaatcaaaagaggaggccaaactggccttcctgaagctgatttttaagtggccaacattcggaagcgctttcttcgagcagacaacagagcctaattttcctgagatcctcttaatcgctataaataagtacggggtgagccttattgaccccaagaccaaagatatcttgacaacccaccctttcacaaaaatctccaattggtccagcggtaacacttatttccatatcactatcgggaatctggtacgcggttcaaagctgttgtgcgaaacctctctgggatacaaaatggacgatctgctgacatcttacataagccagatgctgaccgccatgagcaagcagaggggaagcagaagtggcaagta

SEQ ID NO: 231654 - DNA, 2532 bp, synthetic construct
  misc_feature 1..2532: note = Description of Artificial Sequence: Synthetic coding sequence
  source 1..2532: mol_type = other DNA
ggtctcagcgtgcagtggctgctggatgggctcgcctgtttttttgccagtctgcacgtgcccctcggccgagtgcagcttcatgccagtgccagagggatccaggagaaagaggacgacctggcagaattggcttcccagcaatactttgtggattatggaagtgaaatgattctagagagactgttgaacctcgtgcccacttacatccctgacagggagatcacccctctgaagacgcttgaaaagtgggcccagctagccatagccgctcacaaaaagggaatatacgcgcagcgaaggactgatgcccagaaggtgaaagaggacgtggtgtcctatgcaaggtttaagtggccactcctgtttagtaggttctatgaagcttacaaatttagcgggcctagcctccctaagaacgacgtgattgtggccgtgaattggactggcgtgtactttgtcgatgaacaggagcaggtgctcttagagctatcttttccagaaatcatggccgtcagctcaagtcggggagcaaagaccaccgccccaagtttcactctggccactattaaaggcgatgagtatacatttacgagctccaatgctgaggatatacgcgatctggtcgtgacatttctcgagggcctgcgcaagaggtccaaatatgtggtggcactacaggataaccccaatcccgcaggagaggagtccggatttctctcattcgctaagggagacctgattatcctcgatcacgacaccggggagcaggtgatgaattccggatgggctaacggtattaacgagcgtactaagcaacgcggagacttccctactgacagtgtatacgttatgcccaccgtcacgatgccccctcgtgagattgttgcgctcgtgaccatgacgccagaccagcgacaggatgtcgtccgcctcttgcagctgaggacagccgaaccagaggtcagagctaaaccctatactctggaggagttttcatatgactacttccgccctcctcctaaacatactttgagtcgggtcatggtgtctaaggcacggggaaaagatcggctgtggtcccacacccgtgaacctctaaagcaggctctgttaaaaaaattgttgggctctgaggaactgtcacaggaagcttgcctcgcctttatcgccgttctgaagtacatgggagactacccatccaagcggacccgcagcgtaaacgaactgaccgaccagattttcgaaggacctttaaaggccgaaccgctgaaagatgaggcttacgttcagattctgaagcaactcactgataatcacataagatactcagaggagaggggttgggaacttctgtggctttgtacgggcctgtttcccccttccaatattctgctgcctcacgttcaacgatttctacaatctcggaagcattgcccattggcaattgactgcctccagcgactgcagaaggcccttcggaatggctctcggaaataccctcctcatttggtcgaggtagaagcaatccaacacaagactacccagatctttcataaagtttactttccggatgatacagacgaggcctttgaagttgaatcgtcaaccaaagccaaagatttttgtcagaatattgctacccggctgttgctcaagtcatctgaaggcttcagcctgttcgtgaaaatcgctgacaaggtcttaagtgtgcccgagaacgacttcttcttcgacttcgtgagacatctcacagactggataaagaaagctcgccctattaaggacgggatagtgccttcactaacctaccaagtcttcttcatgaaaaaactgtggactacaaccgttcccggaaaggaccccatggcagacagcatcttccattattaccaggaacttcctaagtacttacggggataccacaaatgcactcgggaagaggttcttcagcttggcgctttgatctatagagtcaagtttgaagaggacaaatcatatttcccctctattcctaaacttttgcgagagttggtgccgcaggacctgattaggcaggtctcccctgacgactggaagcggtcaattgtggcctattttaataaacacgccggaaagtcaaaggaggaagctaagttggctttcctgaaacttatctttaagtggcccacgttcggatcggccttttttgaagtgaaagtgcatcatggactgctaagagcggaagaagagggaaatagagcgctcatcaaacaccgggactcatctttgggactctgggagcgtgccatggctctggacacgtgcccgggagagggcagaagggccgctccctcagccttgtcacaactctctgtgctggctggggtgtctcctggcgacaggggaacgcggagatcaagcgcatggcagtggcggcaaacttgcaagcaggcaggagtgatggaggatgggctgtgttctgataccggcgaaccctcaccaaggtggcaaagcagcgggggaagtgcagggtgcgagaaggcgagctag

SEQ ID NO: 231655 - DNA, 4167 bp, synthetic construct
  misc_feature 1..4167: note = Description of Artificial Sequence: Synthetic coding sequence
  source 1..4167: mol_type = other DNA
atgagactcgggttcttgcgcttgcaggctttgcacagatcacgcaaactccatcagcagtaccgcctagctcgacagagaattatccagttccaggcgagatgcagggcatacctggtgagaaaagcattcagacaccgattgtgggccgtgctgaccgtgcaggcgtacgcacggggtatgatcgctaggagactgcaccagaggctacgcgctgaatacctctggaggctggaggctgaaaaaatgaggctggccgaggaagagaaactgcggaaggagatgtcagctaagaaagcaaaggaagaggccgagcgcaagcaccaggagcggcttgctcaactcgcccgagaggatgccgaacgagagctcaaagagaaagaggctgcaagaaggaagaaagagttacttgaacaaatggagagagcacggcacgaacctgtcaatcatagcgacatggtcgataaaatgttcggcttcctggggacgagtggcggactgcctgggcaggaaggccaagcacccagcggctttgaggacctggagcggggtagaagggagatggtggaggaggatttagatgcagcactcccccttccggacgaagatgaagaggacctgagtgagtataagttcgctaagttcgctgccacatattttcagggaacaacaacacattcttatacgcggcgacccctgaagcagcctctgttgtaccacgacgacgaaggcgaccaattagctgccctggcagtgtggattacaattctgcgatttatgggagatttgccagagccaaaataccatacagcaatgtcagacggttccgagaaaattcctgtcatgaccaaaatttatgagaccctgggcaagaagacctacaaacgggagctgcaggccttgcaaggagaaggtgaggcacagttgccagaggggcagaagaagtctagcgtccggcacaaactggtgcaccttacccttaagaaaaagtcaaagctaactgaagaagtgaccaaacggctccacgacggagagagtaccgtccagggaaactccatgctcgaagaccgacccacatcgaacctcgagaagctccattttattataggcaacggcatactccgcccagctctccgcgacgagatctattgccagatctctaaacagctcacccataaccccagtaagagctcttacgctaggggatggatcttagtaagtctttgtgtgggatgctttgccccttctgaaaagtttgtgaagtatctgcgcaattttatccatgggggtccccctggctatgctccctattgcgaggagcgcttaaggaggacttttgtgaacggcaccaggactcaacctccttcatggctggaattgcaggccacgaaatccaagaaaccaattatgttgcctgttactttcatggatggcaccaccaagaccctcctcacggacagcgcgaccacagccaaagagctgtgcaatgccttggccgataagatctcactaaaagataggtttggatttagtctgtacattgccttattcgacaaggtgtcttcgctaggttccggctcggaccatgtcatggatgctatctcacagtgtgagcagtacgctaaggagcagggagcacaggagaggaatgccccttggaggttgttctttcgcaaagaagtcttcactccgtggcactctcctagcgaggataacgtggccacgaatcttatttaccagcaggtcgtgcggggagtgaaatttggagaataccggtgcgagaaagaagatgacctcgcagaactggcttcgcagcaatattttgttgattacgggagcgagatgatactcgaacggctcttgaacctggtgcctacctacattcctgatagggagattacgccgctcaagactttggaaaaatgggcccagctggctatcgcagcacataagaaaggaatctacgcccagcggcgtaccgatgctcagaaggtgaaagaggacgtcgtctcatacgccaggtttaaatggcccctcctattttcaagattctacgaggcctataagttctctggaccttcactgccgaaaaatgacgtcatcgtggccgtaaactggaccggagtgtattttgtggatgaacaggagcaggtgctgctcgaactgtcattcccagaaattatggccgtgagtagtagcagaggggctaaaaccacagctccttcttttacgctcgcaactattaaaggagatgagtataccttcacatcttctaatgcagaagacattagagatctagttgtgacttttctcgaggggctgcggaagagatctaaatacgtcgtcgccctgcaggacaatccaaaccctgctggagaggaatccgggtttttgtccttcgccaagggggatctgatcatcctggaccacgatacaggcgagcaagtgatgaattctggatgggccaatgggattaatgaacggacaaagcagcggggagactttcctactgactccgtgtacgtcatgcccacagtgacaatgccacctcgggaaatcgtggccctagtgactatgacacctgatcaacgccaggacgtcgtgaggctgcttcagcttcgaacggcagagccagaagtcagagcgaagccctacaccctagaagagtttagctatgattatttccgccctcctccaaagcataccctgtcacgggttatggtgagtaaggcccgaggaaaggatcgactgtggagccacacacgcgagccccttaagcaggcactattaaagaaactcctgggctcagaggagctctctcaggaggcctgcctcgccttcattgcagtgctgaaatatatgggcgactacccaagtaagaggacacggagtgttaatgagctgacagaccaaatcttcgaagggccactgaaggccgaacccttaaaggacgaggcctacgtacaaatactgaagcagctaacagacaaccacataagatatagcgaggaacgtggatgggagctgctgtggctttgcactggcctgtttccaccttctaacatacttctgccccacgttcagcgctttcttcagtctcgaaagcattgtcccctcgcgatcgactgtcttcagaggctgcagaaagccctgcgaaacggtagccgaaaataccctccgcaccttgtagaggtcgaagcaatacagcataaaacgacacaaatttttcataaggtgtacttcccagacgacaccgacgaggccttcgaagttgaatcatcaacgaaggccaaggatttctgtcagaatattgcaactcggctcctcctcaaaagttcggaaggattctccttatttgtcaagatagctgacaaagtcctgtcagtgccggagaacgatttctttttcgatttcgtgaggcatctaaccgactggatcaagaaagctcgaccgataaaggacggcatagtcccgagcctgacttaccaggtattttttatgaaaaagctgtggactacgacggtcccgggtaaggatcccatggccgatagtattttccattattatcaggagctgcccaagtatcttcggggttatcacaagtgcacgcgggaagaggtgctccagctcggcgctttgatctatcgggtgaagtttgaagaggataagtcttacttccccagcatcccaaagctgctcagagagcttgtgccccaggatctgatccggcaggtgtctccggatgactggaaaaggagtattgttgcctacttcaataagcatgcaggtaaatctaaagaagaggccaagctagcttttctgaagctgatctttaagtggccaaccttcggctcagcgttctttgaggtgaagcaaaccactgaacccaattttcctgaaattttgctcatcgccattaataaatacggcgtgagtctgattgacccaaaaactaaggacattctcaccacgcacccttttactaaaattagtaactggtcgtctgggaatacctacttccatataactatcggcaatctagtaaggggatcgaaacttctctgcgagacttcactcgggtacaagatggatgacctgctgacttcctacatctcccagatgctgaccgctatgagtaagcagcgaggcagtcgtagcggaaaatag

SEQ ID NO: 231656 - DNA, 2580 bp, synthetic construct
  misc_feature 1..2580: note = Description of Artificial Sequence: Synthetic coding sequence
  source 1..2580: mol_type = other DNA
atgggcaggaagttagatcttagcggcctgaccgatgatgagacagagcatgtgctgcaggtggtgcagcgggactttaatctgaggaagaaggaagaggagcgcctttctgagctgaaacagaagcttgatgaagaaggctccaagtgttccatcctcagtaaacatcagcagtttgtggagcactgctgcatgaggtgttgctcccctttcaccttcttagttaacacaaagcgacaatgtggagactgcaagtttaacgtttgtaaatcctgctgctcctaccagaagcacgaaaaggcctgggtatgctgcgtatgccagcaggcgaggcttttacgtgctcaaagtttggaatggttttacaataatgtgaagtcgcggtttaaaagattcgggagtgccaaggtcctgaagaatctctacaggaagcacagacttgagtcaggggcttgctttgacatcctgggaggatcactcttcgagtctaatctggaaaacgaaggcagtatctccggaagcgactccaccttctataggcagtcggagggacattctgtcatggatacactcgcagtggcactccgcgttgcagaggaagccatagaggaggcaatcagcaaagccgaagcctacggagattctcttgataagcagaacgaggcctcttatctcagagatcataaagaggaacttaccgaggagctcgcaacaactatcctccagaaaatcatcagaaagcagaagtctaaatccgagcagcaagtggaagaagaaccaggatggccccaccctcagagctgttctactaaggttgccgatgaagggacttctgctagccctggtgggtatagggctccagcggctctgtggaggagtcagagtgcatttagtatcaccggcgaggaagcgttaaagaccccaccagttgaggctccgtcacgtcagcccagagaccagggtcagcatcctcgcgctgagtctgcgcttccaagctggaagtcggttgatcgcttggatgaaacaaatctggctccagtactgcagagtcctgacggtaactgggttgcactcaaggacggagccccaccacccacaagactgctggcaaaacccaagtcaggaacattccaggctctcgaggtggccagcagtgtcgctagcgcttacgacgagatgggctcagactcagaagaagattttgattggtccgaggcactttctaagctgtgcccccgatcccgagctcttccacgcaatcctcagcctcagcctacgcaggcacagagctccgaccaaggcccaattgccgctagtccctcatctgctctctccccaaaccctgaagccatgtgctcggactccgagacctcttcggcagggtccagtcgcgaggtcggtcaccaggcacggcttagttggctccagcgcaaggcaccgaggaatcccgcagctgagaaaatgcgtttgcacggcgaactagacgtgaatttcaacccccagctggcttctcgcgagacatctgactcttccgaacccgaagaagctccacatacaacggaccggagagcaagaagatggcggcgagcaagactgggcagtgaagaaccttcaaaggaaccctcttcacctagcgcccagctgcgagacctggatacacaccaggtgagtgatgacctgagtgaaacagacatatcaaatgaggctcgggaccctcagacgctgactgatacgacagaggagaagcgaagaaatcgcctgtacgagttggctatgaaaatgtctgaaaaggaaacctcaagtggcgaggatcaggagtccgaacccaagactgagagcgaaaaccaaaaagagagcctatcatctgaggacaactcccagtcagtccaggaggaactcaagaagaagttctcggccgtaagcctgtgcaatatttctacagaagttctgaaggtgatcaatgcaacggaagagctgattgccggatctactggtccctgggagtccccacaagtgcctcccgacagacagaagggcatgttcccacgtggcaccgaccaggtacgtcttgacgagcagctgacctcactggaggagaacgtctacctcgccgctggaacagtttatgggctggaaactcagctcacagagctggaggatgcggctagatgcattcacagcggcacagacgagacacacttggcagacctagaggaccaggtcgcgacagctgctgctcaggtgcaccacgccgaactgcagataagtgatatcgagagtaggatcagtgctcttaccattgccggtttaaatatcgccccatgtgtccgatttacccgccgaagggaccagaaacaacggacccaagtgcaaaccatcgacacaagtcggcagcagcggcgaaaactccctgccccaccagtcaaggccgaaaaaatcgaaacatccagtgtgactactatcaaaacattcaatcacaattttattttacagggcagcagtactaacagaacaaaggagagaaaggggacaacgaaggaccttatggagcccgctttggaaagcgctgtgatgtactag

SEQ ID NO: 231657 - DNA, 2313 bp, synthetic construct
  misc_feature 1..2313: note = Description of Artificial Sequence: Synthetic coding sequence
  source 1..2313: mol_type = other DNA
atgcggaaggcagcaagtgcggctagttcccgtagcaccagctccctctggtctactgctgcttgcgccgctgcaagaccctccccctcttcctccactccatcggcttctgttgagatcgcaaatagtatgagcgccagagccgctgcccctacacgatccaccaagcggccaggcagcgccgcttccgcatcaaagaggggcggtagcctcttcgagtcaaatctggagaatgaggggagcatctcaggaagcgactccacattttatcggcagtccgaaggccactccgtgatggatacgctggccgtggcactacgggtggccgaggaggcaattgaggaggccattagtaaggccgaggcatacggtgacagtctggataaacagaatgaggcatcctaccttagagaccataaggaggaactaaccgaggagctggctacgacgattctccagaagattattcggaaacaaaagtcaaagtccgagcagcaggtggaggaggaacctggatggccacaccctcaaagctgttccaccaaagtggccgacgagggaacaagcgcgtctcctggagggtacagggctccagcagcactgtggaggagccagagtgcattttccattactggggaggaggccctgaaaactccaccagtggaggcccctagccgacaacctagagatcaaggccaacacccccgagctgagagcgccttgcccagctggaaatcggtagatcgacttgatgagaccaacctcgcaccagtcttacaatcgcccgacggaaattgggtggctttgaaagatggggctccaccccctacacgtctactagccaaacccaagagcggaacttttcaagcacttgaagtggcttcaagcgtcgcttctgcctatgatgaaatggggtctgactccgaagaggacttcgattggtcagaggcattgtctaaactgtgtcctcgatctagagcgctcccccgtaatccacaaccacagcctactcaggcccagtcatcagatcaaggacccattgcagccagcccgagcagcgcactcagcccaaaccccgaggccatgtgtagtgactcagagacttccagtgccggaagctctcgcgaggtgggacaccaggccaggttgagttggctgcaacggaaggcgccaaggaacccagcagcagagaagatgcggcttcacggagagctcgatgttaatttcaaccctcagctggcatctagagaaacgagtgacagttctgaacctgaggaagctccgcacactacagaccgtcgggctcgaagatggaggcgcgctaggttaggatctgaagagccttccaaggagccatccagtccaagcgcccaactgcgcgatctcgacacgcatcaagtttccgatgatttgtccgaaaccgacatctccaatgaagcacgcgacccccagactctaacggacaccacagaagagaagaggaggaatcgtctttacgagctggcaatgaaaatgagtgaaaaagaaacctcatcgggcgaagaccaggaaagcgagccaaagactgaatctgagaatcaaaaagaaagcctatcttctgaggacaacagtcaatctgtgcaggaagagctcaaaaagaaattctcagccgtaagcttgtgcaatatctccacagaggtactgaaagtgattaacgccacagaggagctgatcgcgggttccactggcccatgggaatcccctcaagtgccacccgaccgccaaaaagggatgtttccacgcggaaccgaccaggtgaggttagacgaacagcttactagcctagaagaaaatgtctatctggccgcagggacagtgtacggcctcgagactcaactgactgaactggaggatgctgcacgctgtatacatagtggaaccgacgaaactcatcttgccgatctcgaggaccaagtagccacagcagcagctcaagtgcaccacgctgagctgcaaatcagcgatatagaatctcgcatatctgccttgacaatcgccggactgaacattgccccttgcgtgaggtttaccaggagaagagaccaaaagcaacggacccaggttcaaaccatcgacacctctagacagcagcggagaaagcttcccgctccgcctgtcaaggcagagaagattgagaccagcagcgtaaccactatcaagacttttaatcataattttatcctgcaaggttcaagtactaacaggactaaggaaagaaaggggacaaccaaggacttgatggagccagccctggagagcgcggtaatgtattag

SEQ ID NO: 231658 - DNA, 2580 bp, synthetic construct
  misc_feature 1..2580: note = Description of Artificial Sequence: Synthetic coding sequence
  source 1..2580: mol_type = other DNA
atgggcagaaagcttgacctttccggactgactgacgatgagactgaacatgtcctgcaggtagtgcagcgcgatttcaacctccggaagaaagaggaagagcgactgtccgaactgaaacagaaactcgacgaagaaggatccaaatgttccattttgtctaaacaccagcagtttgtcgaacattgctgcatgaggtgttgcagtccctttacattcctggtcaacactaaaagacagtgtggcgattgcaaattcaatgtctgtaagagctgttgttcctatcagaagcatgagaaagcctgggtgtgttgtgtatgtcagcaggcaagattacttagggcccagagtcttgagtggttttataacaacgtgaagtcaaggttcaagagattcggctctgcaaaagttcttaaaaacttgtataggaaacacaggctggaaagcggagcctgtttcgacatcctgggaggcagcctgtttgagagcaatctcgaaaatgagggcagcatctcaggcagcgactctacgttctatcgacaaagcgagggtcactccgtcatggacaccctggccgttgcattgagggtggcggaagaagcaatagaggaggctatatctaaagctgaagcctacggtgacagtctcgacaagcaaaacgaagcaagttacttgagagaccacaaggaagagctgacagaggaactggccacaacgattctgcagaaaattattagaaagcagaaatccaaaagtgaacagcaggtggaggaggagcccggatggcctcaccctcagtcatgcagcactaaggttgccgatgagggaacgtctgcaagccccggtggatatcgcgcacccgctgctctgtggcgaagccagtctgccttttctatcacgggggaagaagctcttaaaacccccccagtcgaagcgccaagccgacagccgcgagatcagggacagcatccacgagctgaatcagctctgccctcttggaagagtgtcgatcggcttgatgaaacgaacctggctccagttcttcagtcgccagacggaaattgggttgccctgaaggatggcgctccgcctcccacacggcttttagccaaacccaagtcaggtaccttccaagctctagaggtggccagtagtgtagcctccgcctatgatgagatggggagtgattcagaggaagatttcgattggtctgaagcactgagcaagctgtgtccacggagtagggccctgcctcgcaacccccaacctcagcccacccaggcacagtcttccgaccaaggaccaatcgcggcatccccaagttctgcactttcacccaacccagaggccatgtgtagtgattctgaaactagttctgctggcagtagccgcgaagtaggacaccaggcaaggctgagttggttgcagcggaaagctccccgaaatcctgccgcagaaaagatgagactccatggggagcttgacgtgaattttaacccgcaacttgctagccgggaaacctctgatagctctgagcccgaggaggctccccacacaactgaccgccgtgccaggcgatggagacgggctcgcctgggttccgaagaaccgagcaaggagccatcaagtccttctgcccagctaagagatctggatacccaccaggtcagtgacgatctctcagaaaccgacatcagcaatgaagctcgggacccacaaactctgactgacactactgaggaaaagcgaagaaatcgcttgtacgagcttgctatgaagatgtcagagaaagagacctcttctggggaagatcaggaaagtgagcctaaaacagagagcgagaaccagaaagagtccttgtcgtccgaagacaattctcaatcggtgcaagaggaactcaagaagaagtttagtgccgtctccctgtgtaacattagtaccgaagtgttgaaagttatcaatgctacggaggagttgatcgccggaagcactgggccttgggaaagtccccaagtgcctcctgatagacagaaagggatgttccccaggggcactgatcaggtgagactggacgagcagcttacaagcctcgaagagaacgtgtacctggctgccggtactgtttacggcctcgaaacacagttgactgagctggaagatgccgctcgttgcatccattccgggaccgatgagacacatctggccgacctcgaagaccaggtcgcaactgcggcagctcaggtacaccatgctgagttacaaatcagtgacatcgaatccaggatttcagcattaactattgctggcctgaatattgccccttgtgtgcggtttacacgtcggagagatcaaaaacagcggactcaagtgcaaacaatcgatacctctcgccagcagagacggaagttgcccgcaccaccggtgaaagctgagaaaatcgaaacatcgagtgtgaccaccatcaaaacttttaaccacaatttcattttacaaggatcttctaccaatcggaccaaagaaagaaaagggaccacaaaagatcttatggagccagcccttgagtccgccgtaatgtactag

SEQ ID NO: 231659 - DNA, 2019 bp, synthetic construct
  misc_feature 1..2019: note = Description of Artificial Sequence: Synthetic coding sequence
  source 1..2019: mol_type = other DNA
atggatacgttggccgttgccttgcgcgtggccgaagaagccatcgaggaggcaatcagcaaggccgaggcctacggagacagccttgataagcagaatgaggcttcctatctgcgagatcataaagaggaactcaccgaggaattggccaccactattctacagaagattatccgaaagcagaagagtaagtccgagcagcaggtagaggaggagcccggatggccccacccacaatcatgctcaacgaaagtggcggatgaaggaacaagcgctagcccaggcggatacagagctcctgctgctttgtggcgctcccagtccgcttttagcataacaggcgaagaagcattgaagacacctccagttgaggccccaagccggcagcctagggatcagggccagcaccctagagcagagtctgcattgccatcttggaaatcggtcgatcggcttgatgagacaaacctcgcacccgtattgcagagtcctgatggaaattgggtggcactaaaggacggtgctcccccaccaaccagactgttagccaaaccgaagtccggtactttccaggcattagaagtcgctagctccgtcgccagtgcttatgatgaaatgggttctgattccgaagaggacttcgactggagcgaggccctcagcaagttatgccctaggagcagagctctgccacgcaacccgcagccccaacccacacaggcccagtcttctgatcaggggcctatcgccgcaagccctagctctgctctgagcccaaatcccgaggctatgtgttccgactctgaaacttccagtgcagggagcagcagggaggtggggcatcaagccaggctgtcttggctgcagcggaaggcacctcgaaatcccgctgcagagaagatgcgactccacggtgagctggacgtgaacttcaatccgcaactcgcctctcgcgaaacatcggattcttcagagcccgaagaggcccctcacaccacagataggagagcacggaggtggagacgggctagactcggctctgaagagccctccaaagagccctcatccccctcagctcagctgagggatcttgacacacaccaagtctccgatgacctgtccgaaactgacattagcaacgaagccagggacccacagaccttgacagataccactgaggaaaagaggcggaatagactgtatgaactggcgatgaaaatgagcgagaaagagacgtcttctggggaagaccaggagagtgagcctaagacagaatcagagaatcaaaaagaaagcctctcttctgaggataatagccagtccgtgcaagaggagttaaagaagaaattctctgcagttagtctgtgcaacatcagtacggaggtcctcaaagtcatcaatgcaactgaggagctcatcgctggcagtacaggtccctgggaatctcctcaggtgccccctgaccgtcagaaggggatgttccctaggggcacggatcaggtgcgattagatgaacagcttactagcctcgaggagaacgtatatctggccgcaggtacagtgtatggtctggaaacacagttgacggagcttgaggatgctgcaagatgcatccatagcggcacagacgagacacacctagcagatcttgaggatcaggttgccactgctgcagcccaagtgcatcatgcagaactgcaaatctcggacattgagtctcgcatttcagctttgaccattgccggattgaacatcgccccttgcgttcgcttcacgcggagacgggaccagaagcagcgcactcaggttcagaccatagacacttctcgccagcagagaaggaagctccccgcaccgcctgttaaggctgaaaagattgaaacttctagtgtgacgacaatcaaaacgttcaaccataactttattttgcaaggttccagtaccaatcgaaccaaagaacgcaagggaaccacaaaggacttaatggaaccggcacttgagagcgccgtgatgtactag

SEQ ID NO: 231660 - DNA, 2886 bp, synthetic construct
  misc_feature 1..2886: note = Description of Artificial Sequence: Synthetic coding sequence
  source 1..2886: mol_type = other DNA
atgaaatacctgttaaacttcattggccagggcccagccacatatggacccttctgcgcagagagattgcgcaggacatatgcaaacggggtgcgcgctgagccgcctacctggctcgagcttcaggctgtgaaaagtaagaaacacattccaatccaggtcatccttgccaccggagagtctctgactgtgcccgtggattcagctagcacatcaagggagatgtgcatgcatatcgctcacaagcagggcctctcagatcacttagggttctctctgcaggtggcagtgtacgacaagttctggagcctagggtctggtagagatcacatgatggacgcaatagcccgatgtgaacagatggcccaggaacggggagaaagtcaacgccagtctccttggcgaatatactttcgaaaagaattttttacaccctggcacgacagccgcgaagatcctgtctctacagagttgatctaccggcaagtcctgaggggggtgtggtccggggagtactcgtttgagaaagaggaagagctggtggaactgcttgcccgacattgttacgtccagctgggagcgtccgctgagtctaaggcggtgcaggagctgctgccatcatgtatcccccacaagctctacagaacaaagccacccgaccgttgggcaagcctagtgacagccgcttgtgctaaggctccctacacacagaagcaagtcacacctctggctgtgcgagagcaggtagtcgatgccgcaaggttacagtggcctctcttgtttagccgtctgttcgaggtgattactctctccgctttcactcttccgagtctgttggccagaccccctcctgcccaggatgccggaccggctggggaagacgccgcaggaacactattccccagaggacacggatctggacaccagcaggtgagggcgttgcgtgaggatctgttcctccacaccgaaccccatcccccagctcccggtcgaacggcccatgaagtgctgcactgggggattactcggtgtacaggatcattttctctgaagcccagaagtaccaggaaaggtcagggaagcgtccagccactcgccggtacctacctggaaggcagcttcctttgccacggaagagaactggtcgcatggcgagtccaagtggtgtgggaaggcgataagggccagtgtctggccggtgctgatccccactcacatggatccccctggatttctctcactggaaatttcagcatgcccttcgggaaaagcactcagcagtccggtacgtgcatttcaggcctctgtcaagtatacagtggtcatcatagccctctcgcgacttcgccacgctcaacggacagtataactcactctgccgacgaaaggatgtctaagcttaagcacgcagaggtgcgctggctgcgggtgagcacctggcaaagccggcagctgatctcggctctgacttttgccgtgtccttgcggtgccattgcacaccggcaactagcttgtcggctcactcacagcctcacacatgggcagcccctctgagtgcttccgagaggcctaccgttgtttcaggtctggtgttagctctggccgaacagctctgcgtgctgatccgatggcggggtctgctggtgacactgagcttcattagcagggaggcccagggagggcagcgcctgctcctcagcaccatgcatgaagagtatgaatttgtttctcccagttccgtggcgatcgcagagttagtagccttgtttctggaaggattaaaggagcgttcgatttttgccatggctctccaggatcgcaaagccacagacgacaccacattactcgcatttaaaaaaggcgaccttctggtgctgacgaagaagcagggacttctggcttccgaaaattggactctgggacaaaacgacagaaccggaaagactggcctggtgcctatggcctgcttgtacacaattcccaccgttactaagccctccgctcaacttctgagcctgctggcgatgtcacctgagaagcggaaactggctgcccaagaaggccagtttactgaacctagaccagaggagccccctaaggagaagctacacacccttgaggaattcagctacgaattctttcgtgctcccgaaaaagatatggtgagtatggctgtcctccctctcgccagggccagaggtcacctgtgggcttattcatgtgaaccgcttagacagcctctcctcaagcgggtccacgccaatgtcgacttgtgggacatcgcctgccagattttcgctacccccatacttcggtacatgggggattacccttccagacaggcttggcccactcttgagctcaccgatcagatttttacattggctctgcagcaccccgctcttcaggatgaagtatactgtcagatcctgaagcagttgacccataatagtaatcgccacagtgaggagcggggatggcaacttctgtggctgtgcacaggcctttttccaccgtccaagggattactgccccacgctcaaaagttcatcgatactaggcggggaaaactgctagccccagattgctccagacgtatccagaaggtattgcgcaccgggccaaggaagcaaccccctcatcaagtggaagtggaagccgcagaacagaacgtttctcgaatctgccataagatatatttcccaaatgacacttcagaaatgcttgaggttgtggcgaacacacgtgtcagggacgtatgcgacagcatcgcaaccagactgcagctagctagctgggaagggtgctccttatttatcaagatcagcgataaagtgatctctcaaaaggagggcgattttttttttgattcactgagagagtag

SEQ ID NO: 231661 - DNA, 6353 bp, synthetic construct
  misc_feature 1..6353: note = Description of Artificial Sequence: Synthetic coding sequence
  source 1..6353: mol_type = other DNA
atgagcggctttcgcctcggcgatcacgtctggctggagccaccctccacgcataagactggagtggcaattggtggaataattaaagaagccaaacccggtaaggtgctggtcgaggatgatgagggcaaggaacattggataagagcagaggactttggagttctgagcccaatgcaccctaatagcgtccaaggcgtggacgatatgatccggcttggagacttaaacgaggccggaatggtgcacaatctactgatccggtaccagcagcacaaaatctatacgtacaccggatccatcctagttgccgtgaatcctttccaggtgttacccctgtatacattagaacaggttcagctgtactattctaggcacatgggcgagcttccaccacacgtgttcgccattgcgaacaattgctacttcagtatgaagagaaataagagagatcagtgttgtataatctctggcgaatctggggctggtaaaacagaaacaaccaaactcatcctgcaatttctggccaccatttctggacagcatagttggattgaacagcaggtactcgaagctaatcctatcttggaagcattcggcaacgccaagacaataaggaacgacaactcctcaaggtttggcaagtacattgatatctacttcaatccatcaggggttatcgaaggcgctcgaatcgaacagttcttactggagaagagccgtgtctgcaggcaggctcccgaggagcgcaactatcacattttctattgtatgctcatgggcgtgtctgccgaagataaacagcttctctcccttggcactccatcagaataccactacctcaccatggggaactgtacctcttgcgagggacttaacgatgccaaggactatgcacatatccgatcagctatgaaaattttgcagtttagcgactccgaaagctgggatgtaatcaagttgcttgcagctatcttgcacctaggcaatgtcggcttcatggcctccgtgtttgagaacctcgatgcctccgatgtcatggaaacgcccgctttcccgacagtaatgaaactcctggaggttcagcatcaagaactgagagactgtttaataaagcacacaatcctcatacggggagagttcgttacaagaagtctgaacattgctcaggccgctgatcggagggacgcctttgtgaagggcatatatgggcatctgttcctatggatcgtgaagaagattaacgcagctatctttactcctccagcccaggaccccaagaatgttcggagagctattggcctcctggatattttcggctttgagaacttcgagaacaactccttcgaacaactgtgcatcaatttcgcaaatgagcatctacaacagttcttcgtgcagcacgtttttacaatggagcaggaagagtatcgctcggaaaatatttcatgggactacatccactatacagacaaccggcctactcttgatctcctcgcccttaaacctatgtctataatcagtctgctggatgaagagtctaggttcccacagggcaccgacctcactatgctccaaaagctgaactccgtgcacgccaacaacaaagcattcctgcagccaaagaatattcacgatgctaggttcgggatcgctcacttcgcgggagaggtgtactatcaagccgaagggtttctggagaagaacagagatgtactgtccacagatatcttgacccttgtctattcctccaaaaataagttcctccgtgaaatctttaatctggagctcgcagaaaccaaactgggtcacggcactatcagacaggccaaggcaggtaaccacctgttcaaaagcgctgattctaacaagaggccatcaacattagggagccagttcaagcagagcttggaccagctcatgaaaattctcactaattgtcagccttactttatacggtgtatcaaacccaacgagtataagaagcccctgctttttgatcgcgagctgtgcctgaggcaactgcgatattccgggatgatggagacggtgcatatcagaaagagtggatttcctattcgctataccttcgaagaattctcacagcgatttggcgtcctcttgcccaatgctatgcggatgcagctgcagggtaagcttagacaaatgaccctggggatcaccgatgtctggctacgcacggacaaagattggaaggccggaaagactaagatctttctgcgggatcatcaggacacactcctggaggtccagcgatcccaggtactagaccgggctgcactgtcgatccagaaggtgctgagaggatacagatataggaaagaatttcttaggcagcgtcgcgcagcggtaaccctacaagcatggtggcgcggttactgtaatagacgaaatttcaagcttatcctggtgggctttgagagactccaggctatcgctcgatcgcagccccttgccagacaataccaggccatgcgccagcgaaccgttcagctgcaggccctgtgccggggttacctggttagacagcaggttcaagccaaaagacgagctgtggtggttatccaggctcacgctcgtggcatggcagcgaggagaaacttccaacagagaaaagccaacgcgccactggtgatcccagccgaaggccagaaatctcagggcgctctgccagccaagaaacggaggtcaatttacgacaccgtgactgataccgaaatggtcgaaaaagttttcggattcctgcctgccatgatcggcggacaggaggggcaagctagtccccatttcgaagacctcgaatcaaagacccagaagctcctcgaggtggatctcgatacggttccaatggccgaagagcctgaagaagatgtcgatggccttgctgagtacaccttccccaaattcgctgtgacctactttcagaagagtgctagtcatacacacatcagacgcccattaagatatcccctgctgtatcatgaggacgatacggactgcttggctgccctcgtcatctggaatgttatcctcagattcatgggagatttgcccgagcccgtcctttacgcacgctcaagccaacagggttctagcgtgatgaggcagatccacgatactttgggtcgagagcacggagcccaggttccgcagcacagcagaagcgcccaggttgcctcccagctgaacatcggtgaagaggctttggaacccgacggtctaggtgccgacaggcctatgtccaatctggagaaagtgcactttatagttggctatgcaattttgcgtccatcgttgcgagacgagatctattgtcagatctgtaagcagctgagcgagaactttaaaacaagttccctggcccgaggatggatcctgttatccctgtgcctgggttgttttcctcctagtgagaggttcatgaagtatcttctgaactttatcggccaggggcctgccacgtatggccctttttgcgccgagcgcctgaggcggacttacgcaaacggggtgcgggctgagccccctacttggttggaactgcaggctgtcaagtcaaagaagcacatcccaattcaggtgatactcgccaccggagagagcctgaccgtaccagttgactcggcctctacctctcgagaaatgtgcatgcatattgcgcataagcagggcctgtcagaccatctcggctttagcttgcaagtggctgtctacgacaaattttggagcctgggttctggtagagatcatatgatggacgccatcgctcggtgcgagcagatggcccaggagaggggcgagagtcaaagacagtcaccctggaggatttactttaggaaggaattctttaccccctggcatgactcccgcgaagatccggtcagcactgagctaatctaccgccaggtcttgcgcggtgtgtggtcaggagaatattcttttgagaaggaggaagagctcgtggaacttttagcacgacactgctatgtccagctgggtgccagcgccgagtctaaggctgtgcaggagttgcttcctagctgcatcccccacaagctttaccgtaccaagcctcctgaccgatgggcttccctggtcactgccgcttgcgccaaggccccttacacccagaagcaggtgaccccgctggcagtgagggagcaggtggttgatgctgcacgactccagtggcccttgcttttttcccgcctcttcgaggtgataacactgagcggtccgagactcccaaagacacaactgattctcgctgtcaactggaagggcctttgttttctcgatcagcaggaaaaaatgttgctggagctgtctttccctgaggtgatgggactggcaactaatcgcgaggctcagggcggacagcggctgctgttgagtactatgcatgaggaatatgaattcgtaagcccgagttcagtagccatcgccgagctggttgcactttttttggaaggactgaaagagcgttctatctttgcaatggccttacaagaccgcaaagcaactgatgatacaactctgctagcattcaagaaaggggacttgcttgtccttaccaaaaaacaggggctgctggcaagcgagaactggactcttggtcaaaatgaccgaacaggaaagactggtctcgtacccatggcatgcttgtacactatcccaaccgtaactaaaccttcagctcagctgttgagcctgttggccatgagccctgagaagcggaaattggccgcacaagaaggccagttcacagagccaagaccggaggagccccctaaagagaagttacatacgcttgaggaattttcttatgaattctttcgggcacctgagaaggacatggtttccatggctgtgcttcccctagcgagggcccgtggtcacctttgggcatattcatgtgagcctcttagacagccccttctcaaaagggttcacgccaatgttgacctttgggatatagcttgtcagatattcgccacaccaatcctcagatacatgggtgattaccctagccgccaggcttggcctaccctggaactgactgatcaaatctttactctggctctacagcatccagctctgcaagatgaagtttattgccaaattctaaaacagctgactcataactctaaccgccattcagaagaacgtggctggcagctgctgtggctgtgcactgggctgtttccaccctcaaagggtctgttgccccacgctcagaagtttattgatacacgccgtggaaagctgttggctcccgattgtagccgaagaatccaaaaggtcctccgcaccggccctagaaaacagccaccacatcaggtcgaggtggaggcagctgagcagaatgtgagccgcatctgccataaaatctatttcccgaatgatacatctgaaatgctagaggttgttgccaataccagagtgcgggatgtgtgcgactccatcgcgacgcgcctccagctagcctcttgggagggatgttccctgttcattaaaatctctgacaaagtgatctctcagaaagagggggactttttttttgacagtctacgcgaggtcagtgactgggttaagaagaacaaacctcaaaaagagggcgctccagtgaccttaccttatcaggtgtactttatgcgtaaactctggctgaatatttcgcctggcaaggatgtcaatgccgataccatcctccactatcaccaggaattgccaaagtacctcaggggattccataagtgttcgagggaggatgcaatacaccttgcaggcctgatttacaaagcccagttcaataatgacaggagtcagctggcatccgtccctaaaattctgcgtgagctggtgcctgaaaacttaacccgccttatgtcaagcgaggagtggaagaaaagtatcctgctggcttatgataaacacaaagacaagacagtggaagaggccaaagtggcatttctcaaatggatttgtagatggccgactttcgggtctgcctttttcgaggtgaagcagacctccgaaccttcttatccagacgttatcctaattgccatcaatagacacggagttctgctaattcatccaaagacaaaagacctgctgacaacctatcccttcaccaaaatcagttcatggtccagcggcagtacctacttccacatggcgctggggtcactcggcaggggtagccgcctgctttgtgaaacgagccttggctataaaatggacgatcttctgacgagttacgtccagcagttgctgagtgctatgaacaagcaacgcggatccaaggcgccagccctggccagcacata

SEQ ID NO: 231662 - DNA, 6350 bp, synthetic construct
  misc_feature 1..6350: note = Description of Artificial Sequence: Synthetic coding sequence
  source 1..6350: mol_type = other DNA
atgtcaggcttcaggctgggagatcacgtctggctggaaccgccatcgacccacaagaccggggtggccattggcggaatcattaaggaggccaagccagggaaggtgttggttgaagatgacgaagggaaagagcattggatccgagccgaggactttggtgtgctaagccctatgcaccccaactctgtccagggggttgatgacatgatacggcttggggatctaaatgaggctggaatggtacataacctgctgatccggtaccagcagcataagatttacacgtatacaggaagtatactcgtcgccgtgaaccctttccaggtgctgcctttgtatacacttgaacaggtccagctgtactacagcagacacatgggcgagctgccaccccacgtattcgcaattgcaaataactgctacttctctatgaaaagaaacaagcgtgaccagtgctgcattatctccggcgaaagtggcgctgggaaaaccgagaccacaaagctcatcctccaatttctagcaacgatttctggacagcacagctggatcgagcagcaggttcttgaagcgaacccgatcctggaagcattcggtaatgccaagacaatacgaaatgataactctagccggttcggaaaatacatagatatctattttaaccccagcggcgtgattgagggggctagaatcgagcagttccttctggagaaatctagagtgtgccgccaggctccggaggagcgcaactaccacatcttctactgcatgctgatgggcgtgagcgcagaggataaacagctgttaagtttgggaacacccagtgaatatcactacctaaccatgggcaactgtacctcttgtgagggtctgaacgacgctaaagactacgctcacatccggagcgctatgaaaatcttgcagttcagcgatagcgagtcctgggacgttattaagctgctcgcagctatcctgcatctcggcaacgttggttttatggcgtccgtattcgaaaacctcgacgcctccgacgtcatggagacgcctgcttttccgacagtcatgaagcttctcgaggtgcagcaccaagaactccgggactgtcttatcaaacataccatcttgatcagaggggaattcgtaacgcggagtctcaatatcgctcaggccgctgatcgcagggatgccttcgttaagggaatctatgggcacctgtttttgtggattgttaaaaagattaacgccgcaatatttacgccacctgcccaggatcctaagaatgtgcggagggccattggactgctcgacattttcggcttcgaaaatttcgagaacaatagttttgagcagctttgcattaatttcgctaatgagcacctccaacaattttttgttcagcatgtctttactatggagcaggaagaataccggtctgagaacatctcctgggactatatacactatacagataacagacctacactagacctcctcgccttaaaacccatgagcattatctccctgctggacgaagagtctcgatttcctcaaggcaccgacctcactatgcttcaaaaactgaattctgtgcacgctaacaacaaagccttcctgcagcccaagaacatccacgatgctaggtttggtatcgcgcacttcgccggagaagtgtattaccaagctgaaggcttcttggaaaaaaatcgagatgttctatcaactgacatcctcacactggtttacagctccaaaaacaagttcctcagagagattttcaatctggagctggcggagaccaagctgggccacggcaccatcagacaggctaaagctggcaaccatctgtttaagtcagccgattccaataaacgtccctcaaccctcggatcacagttcaagcagtccctggaccagttaatgaagatcctgaccaattgtcaaccgtacttcataaggtgcatcaagcctaacgagtacaaaaaaccactgctttttgaccgtgagttgtgtttgagacagctgcgctactcaggtatgatggagactgtccatattcgaaagtcaggctttccaattaggtatacttttgaggaattctcacagcgcttcggggtgctgcttcctaacgcaatgaggatgcaactgcagggaaagctacggcagatgacattgggtattacagacgtgtggctccgaaccgacaaagattggaaagcgggaaaaactaagatcttcctccgggaccaccaggacactctgctggaagtccaaagatcccaggtgttggatcgggctgcgctgagtattcagaaagtgctgagagggtacaggtatcggaaagagttcctgcgccagcggcgtgcagctgtgacacttcaagcttggtggaggggctactgtaacaggcgtaactttaagctgatcctggtggggttcgaaagattgcaggcaatagcccgttctcaacccctggcaagacaataccaggccatgaggcagcgtaccgtgcagctgcaggcactgtgccggggatatttggtgagacagcaggtgcaggctaaaaggagagctgttgtggtcatacaggcccacgcccgagggatggccgcaaggagaaatttccagcaaagaaaagcaaacgccccactggtgatccctgccgagggacagaagagccaaggtgccctgcctgccaaaaagcggaggagtatttacgacactgtgacagatacagagatggtcgaaaaggttttcgggttcttgcctgccatgattggtggacaagaaggccaagcatcaccccacttcgaggatctcgaaagcaagacacagaaacttctcgaggtcgacttggacaccgtgcctatggctgaagagcccgaggaagatgtggacggcctagcagagtatacttttcccaaatttgccgtaacctattttcagaagagcgctagtcacacacacatccgaagacccctgaggtatcccctgttgtatcacgaggacgataccgactgtctggctgccctggttatatggaacgtaattctgcgattcatgggcgatctgcccgaaccagtgctctatgcacgtagctcccaacagggaagctccgtaatgcggcagattcacgatacgttaggcagagaacacggagctcaagtgccacagcattctaggtccgcccaggtggcctcccagctgaacattggcgaagaggctctggaacccgacgggttgggcgcagacaggcccatgagcaatcttgagaaggtgcatttcatcgtgggttatgccattttacgaccatcactgagagacgagatctattgtcaaatatgcaaacaactctcggagaactttaaaacctcctctctggctagaggctggattctgctttccctgtgcttggggtgcttccccccatccgaacggtttatgaagtacctactaaacttcattgggcagggacctgcaacatatggcccattctgcgccgaaagactgcgccgtacatatgcaaatggtgtgagggcggaacctccaacatggctagagttacaggcagtgaaatccaagaagcacattcctatccaggtgatattggcaaccggtgaatctctcacagtccccgtggacagtgcttccacctcacgggagatgtgcatgcacattgcccacaagcagggtctgtcagatcacctcgggttcagcctgcaggtggcagtttatgataaattctggagtttaggatctggacgtgaccacatgatggacgcaattgctcggtgcgagcagatggctcaggaaaggggcgaatcacagcggcagtccccctggcggatttatttcaggaaggagtttttcactccatggcacgactccagggaagacccagtgtctaccgagttgatttatcggcaggttctcaggggagtctggtccggagaatatagctttgagaaggaggaggaactagtggaactgctggcccgacactgttacgtccaactcggtgcatcagcagagtcaaaagctgtccaagaactgcttcccagctgtataccccacaagctgtaccgaacgaagcctccagaccgctgggcatctctcgtcactgcagcttgcgcgaaggccccttatactcagaaacaggtgacgcctctggcggtaagagaacaggtggtagacgccgctaggttgcagtggcccctgctcttcagtcggcttttcgaggtgattacactgagtgggccacggctcccgaagacccaactcatacttgcagtgaactggaaaggattgtgtttcctcgaccagcaggaaaagatgctgcttgaactctctttccccgaagtgatgggattggctacaaaccgagaagcacaaggcggacaacggctgctcctcagtaccatgcatgaggagtatgaattcgtctctcctagcagcgtggctattgcggagctcgtggcactgttccttgagggtttaaaggagaggtccatctttgccatggctctacaagatagaaaggccacggatgataccactctgctcgctttcaaaaaaggcgatttgctggtgctcaccaagaagcagggacttctggccagtgagaactggacactgggccaaaatgacagaacaggcaagaccggcctggtcccaatggcatgcctctacacaatccctactgtaactaaacccagtgcacagctcctgtccctcctcgctatgtcacccgaaaaacgcaaacttgctgcacaggaaggccagttcactgagcctagacctgaagagcctcccaaagagaagttacataccttagaggagttcagctacgaattcttccgcgctcccgaaaaagacatggtttccatggctgtgttgcccttggctcgggctcgtggacacttgtgggcttactcttgcgaaccccttcgtcaacctttgctgaaacgggtgcatgccaatgtggacttgtgggacattgcctgtcagatattcgtcgcaatcttgaggtacatgggcgattacccctctcggcaggcttggccgaccttggagctcaccgaccaaattttcaccttagcgctgcagcaccccgctctccaagatgaagtctattgccagattctgaagcagctgacgcataacagcaataggcatagtgaggaaaggggctggcaacttctctggctgtgcacaggcctgtttccaccctctaaaggtctgcttccgcatgcccaaaaatttattgatacccgcagagggaaactgctagcacctgattgctcacgacggattcagaaggtgttacggactggaccacgcaagcagcccccacaccaggtcgaagtggaggctgccgaacagaacgtctccagaatttgccataagatatacttccctaatgacacatcagaaatgctggaagtggtggcaaacacaagggttcgagacgtgtgtgattctatcgctaccaggctgcagctggcttcctgggagggctgttccctgttcatcaaaatcagtgataaggtgatttcacaaaaagagggtgatttcttcttcgattcactgcgggaagtatctgattgggtgaagaaaaacaagcctcagaaggagggcgcacctgttaccctcccgtaccaggtctatttcatgaggaagctgtggcttaacataagtcctggaaaggacgtgaacgccgatacgattttacattaccatcaggagctgcctaagtatctccgcggtttccataaatgcagtagggaagatgccatccacctggcaggactaatatacaaggctcagtttaataatgaccgatcacagctggcctctgtaccaaagatcttgagagagctggtgccggagaacctcacgcggttgatgagtagtgaggagtggaagaagagtatcctgttggcatacgacaaacataaggataaaaccgtcgaagaggcaaaagtggccttcctgaagtggatctgcaggtggcccacgttcggctcagcattctttgaagtgaagcagacaagtgagcccagctatccggacgtcatcctgatagccataaatcggcatggggtattgctcatccaccccaagacaaaggacctgctgaccacgtaccctttcacaaaaatttcttcttggagctcaggaagcacttatttccacatggccctgggatctctggggagaggtagtagattgctatgtgagaccagcctagggtataagatggacgatctgctcacctcatacgtgcagcagctactatccgccatgaataagcagagggggagcaaggctccagcccttgccagcacata

SEQ ID NO: 231663 - DNA, 6350 bp, synthetic construct
  misc_feature 1..6350: note = Description of Artificial Sequence: Synthetic coding sequence
  source 1..6350: mol_type = other DNA
atgagcggcttccgcctgggcgatcatgtttggttagagcccccatccacccacaagacaggcgtggcaattggagggatcattaaggaggcgaaacctggaaaggtcctagtggaggatgacgagggcaaagagcactggatacgtgcagaggacttcggtgtcctttctccaatgcaccccaatagtgtccagggtgtcgacgatatgattcggctcggtgacctgaatgaggctggcatggttcataacttgctgattcgctaccagcagcacaaaatatacacctacaccggctccattctggttgccgtgaatccattccaagtgctgccgctctacacactggaacaggtgcaactttactacagtcgacacatgggggagctgccccctcacgtctttgccatcgccaacaactgttatttctcaatgaagcgcaataagcgagaccaatgttgcatcattagcggggaaagcggtgctggcaagaccgagaccaccaaactcatcttgcaatttttagctactattagtgggcagcactcctggatcgaacagcaggtcctagaagccaaccccattttggaagctttcggcaacgctaaaaccatccgaaatgataacagtagtagattcggaaagtacatcgatatatatttcaatcctagcggagtgatcgaaggggctcgtatcgagcaattccttctggagaagtctcgcgtatgtagacaggcccctgaagagcgcaactatcacattttttattgcatgctgatgggtgtgagcgccgaagacaagcagcttttatcattaggaacaccctctgaatatcattatttgacaatgggcaattgtacttcttgtgagggccttaacgatgcaaaagattacgcacacattcgctcagccatgaagatcttgcaatttagcgattctgagagctgggatgtgatcaaattgctggccgctatccttcacctgggcaatgtcggttttatggcttccgtattcgaaaacttggacgcctctgacgtcatggagacacccgcattcccaaccgttatgaagcttctggaagtccagcatcaggaactccgtgactgtcttatcaagcatactatcttgattagaggagaattcgtgaccagaagtcttaacatcgcacaagcagctgaccgtcgggacgccttcgtgaaaggaatctatggccacctgttcctgtggatcgtgaaaaaaatcaatgcggcaatcttcacgccacccgctcaggaccccaagaatgtgcgaagagccatcggcctgctggatatctttggttttgaaaactttgagaataactctttcgagcagctttgcatcaactttgccaatgagcaccttcaacagttctttgtgcagcatgtattcacgatggaacaagaagaatatcggtctgaaaatatctcctgggactacatacactacaccgacaaccgacccacgctggacttactcgccctcaaacccatgtcgatcatatctctgctggatgaggagtcaagatttccgcagggtaccgacctcactatgctgcagaaactcaactcagtacatgccaataataaggcgttcctgcagcctaagaacatccatgatgcgaggtttggcattgcccattttgccggtgaagtgtactatcaggcggagggttttctggaaaaaaacagggatgtcctgtctactgatattctcaccctggtgtattcatctaaaaataaattcctgcgggaaatcttcaacctcgagctggcagaaaccaaactcggccacggtacaatccggcaagcgaaagcaggtaaccacctgttcaaatctgctgactctaacaagagaccttcaaccctcggcagccagttcaagcaatcccttgaccagctcatgaaaattctgaccaactgtcagccgtatttcataagatgcataaaaccaaacgaatacaagaaacccttactgttcgaccgcgaactgtgcctgcggcaactacgatactctggaatgatggagaccgtgcatattcggaagagcggattccccataagatacacattcgaagaattctcccaacggtttggcgtccttctgccaaatgctatgaggatgcagctgcagggaaaactccggcagatgaccttggggattaccgacgtgtggctccgtacagataaggactggaaggcaggaaagactaaaatttttctgagagatcaccaggatacgctgctcgaggtacagagatcacaggtgttagatagggctgcgctatccatacagaaagtgctgcggggataccggtatcggaaagagtttctcaggcagcgacgggcagccgtgacgcttcaggcatggtggagaggatactgcaaccgcagaaacttcaagctgatcttggtgggtttcgagagactacaggctatagcaaggtcccagcctctcgctaggcagtaccaagctatgagacagcggacggtacagttgcaggccctttgccgtgggtatctggtgcgtcagcaagtgcaagccaaaaggagggctgtagttgtaatacaggcgcacgcccgaggcatggccgctcgcagaaactttcagcaacggaaagcaaacgcccctctggtgattccagccgaggggcagaaaagccagggggcacttcccgctaagaagcgcaggtcaatttacgacaccgttaccgatactgagatggtagaaaaagttttcggatttctgccggctatgataggcggacaggaaggtcaggccagcccacatttcgaggatttggaatctaagacccaaaaactactggaagttgatttggatacagtccccatggctgaggaacccgaggaagacgttgacgggctcgctgagtacacctttccgaagttcgcagtgacatattttcagaaaagtgctagtcacacacacataagaagaccactccggtatcctctgctttaccatgaagacgacacggattgcctggccgcactggttatctggaacgttatcctacgattcatgggggatctgccagaaccggttttatacgcaagatctagtcagcaggggagcagtgtgatgcgtcaaatccacgacactttggggagagaacacggggcacaggtgcctcagcattcacgaagtgcacaggttgcctcccagctgaacatcggggaagaggcactcgagcctgatggactcggggcagatagaccgatgagcaatcttgagaaagttcacttcatcgttgggtatgccatcctacgcccatccttacgtgacgaaatctactgccaaatttgcaaacaattgtccgagaacttcaagacatcatctctggcaaggggctggattctcctgtcactctgcctgggctgcttcccaccctctgaaaggttcatgaagtacctcctcaacttcatcggacagggccctgctacctacggacctttttgtgctgaaaggctcaggcgcacctatgccaacggcgtccgtgctgaaccacctacgtggctggagctgcaggctgtgaagagcaagaagcatatccctattcaggtaatcctggccaccggcgaaagcctgaccgtgcccgtggactcggcctctacttcccgagagatgtgtatgcacattgcgcataaacagggactgagtgatcacctcgggtttagtctccaggtcgcggtttacgacaagttttggtcactgggcagtggccgagatcacatgatggatgccatagctagatgtgaacagatggctcaggagcggggtgagtcccagcggcagtccccatggcgcatatacttccgaaaagagtttttcaccccatggcacgacagccgtgaggaccctgtcagcaccgagcttatctatcgccaagtgctgcgtggtgtctggtcgggagagtactccttcgaaaaagaggaggaattggtggagcttctcgcacggcactgctatgtgcaactgggtgcttctgccgaatccaaggccgtgcaggagctgctgccgagttgtattccacacaagttgtaccggactaaaccccctgacaggtgggcctctctggtgaccgcagcctgcgcgaaggccccttatactcagaagcaggtaactccattggctgtgcgggagcaggttgtcgatgccgctcgacttcagtggccattacttttctcacgcctgtttgaagtgatcaccctgtccggtcccaggttacctaagacccagctcatcttagctgtgaattggaaaggactttgttttctggaccaacaggagaagatgctcttagagctctccttccctgaggtaatgggactggccactaatcgcgaagcacaggggggacagcggctcctactttccactatgcacgaggagtatgagttcgtgagtccatcgtccgtggccatcgcggagctcgttgctctctttctggagggattgaaagagagatctatcttcgcaatggctcttcaggatagaaaagcgactgatgacacgacacttctcgcttttaaaaaaggcgatctgctcgttctgaccaaaaagcagggtcttctggccagcgaaaactggaccctggggcagaacgatcggaccggcaaaaccggcctggtacctatggcctgcctatatacaattcccactgtgacaaagccttcagctcaactcctctcgttgcttgctatgtcaccagagaagagaaagctagcagcacaggaaggacagtttaccgaaccacgtccagaggaacctcccaaggagaagttacatactctggaggagttctcttatgagttttttcgagccccagaaaaggacatggtgtccatggccgttttacccctcgcaagagcaaggggccatctgtgggcatactcctgcgagcccctcaggcaaccactgctgaaacgcgtccacgccaacgtggacctttgggatattgcttgccagattttcgttgcgatactgcgttatatgggagactacccatctcgccaggcttggcccacgctcgagctcacagatcagattttcaccctagccctgcaacatccagccctgcaggacgaggtatactgccagatactgaaacagctgacgcacaacagtaaccggcatagtgaggaaagaggttggcagctgttgtggctgtgcactggtctgttcccgccatctaaagggctgcttccacatgcccagaagtttatcgatactcgcagagggaaattattagccccagattgtagcaggaggattcaaaaggtgcttaggacaggaccaaggaagcagccccctcaccaggtggaggtggaggctgccgagcagaatgtgtcccggatatgccataaaatttacttccccaatgataccagtgaaatgctggaggtcgtcgccaatactcgtgtgcgggacgtgtgtgattccatagccacaaggcttcagctcgcatcctgggagggctgctctctgtttattaagatttctgataaggtgatcagtcaaaaggaaggggactttttcttcgatagcttgcgggaggtgtctgactgggtcaaaaagaataagcctcagaaagagggagctcccgtgactctgccataccaagtctattttatgcggaagctctggctcaatatttccccaggtaaggatgtgaacgccgatacaatcctgcattaccaccaagagcttcctaagtatttgcgtggattccacaagtgttcccgcgaagacgctattcacctcgccggacttatctacaaggcccagttcaataacgacagatctcagctcgccagcgtccctaaaatactgagagaattggtcccagagaatctgacccgactcatgtcctctgaggaatggaaaaagtccatcttactcgcttacgacaagcacaaggacaaaaccgtggaggaggccaaagttgcttttctgaaatggatctgtaggtggccgaccttcggaagcgctttcttcgaggtcaagcagacatcagagccctcataccccgatgtgatactaatcgctataaatcggcacggcgttctgctgatccaccccaagaccaaggatctgctgacaacataccctttcactaaaatttcctcttggtcctctggcagcacatattttcatatggcactcgggagccttggccgagggtcacgtttgctttgcgaaacgagcctgggctataagatggatgatctacttacttcatacgtccagcagctactctccgccatgaacaagcagcgtgggtctaaagcgcctgctctcgcttctacata

SEQ ID NO: 231664 - DNA, 4248 bp, synthetic construct
  misc_feature 1..4248: note = Description of Artificial Sequence: Synthetic coding sequence
  source 1..4248: mol_type = other DNA
atgccagatcagttcgatcaggcagtggttctgaatcagctcagatactctggtatgctggaaacagtgagaattcgcaaagcaggctatgcagtgcggagaccttttcaggatttttataagagatataaggtcctcatgaggaacttggccctgcctgaggatgtgaggggcaaatgtactagtcttttgcagctgtatgacgcatccaactcagagtggcaactcgggaaaactaaagtcttcttgcgcgagagcctcgagcagaaacttgagaaaagacgagaagaagaagtcagtcacgcggctatggtgatccgagcccacgtgctcggattcctggccaggaagcagtaccggaaggtgctctactgcgttgtgataattcagaagaattaccgcgcatttcttctcagaaggcggttccttcatctcaagaaagccgcaattgtgttccagaagcagctccgcggtcagatagcaaggcgcgtgtaccggcaactgctggccgagaagagggagcaagaggagaagaagaaacaggaggaagaggagaagaagaaacgcgaggaagaggaaagagagcgggaacgggagcggcgagaggccgaactgagagcgcagcaggaggaagaaacccgtaagcagcaggaattagaagctctgcaaaaatcccagaaggaggctgaattaaccagagagctggagaagcagaaagagaacaaacaggtggaagagattttaagattggagaaagagatagaggacctccagcggatgaaggagcaacaggaattgagcctgacggaggcatcattacagaaattgcaggaaagacgcgaccaggaactgaggcggctcgaagaggaggcatgccgggctgcccaggagtttctcgagtctctaaacttcgacgagattgacgagtgtgtgaggaacattgagcgttctttgtctgtgggaagtgaattcagctccgaattggcagagtccgcctgtgaggagaagcccaatttcaacttctcccagccgtaccctgaggaggaagtggatgaaggcttcgaggcggatgatgacgcgtttaaagacagccctaatccaagcgagcatggacatagtgaccagcgaacaagcggcataagaacctccgatgattcatctgaagaagacccatatatgaatgacacagtggtgcctactagcccgagcgcggactccaccgtacttctggctccctctgtccaggactctggtagcctgcacaattcatccagcggcgaaagcacatactgcatgccacagaacgccggagacttgccgtctccagatggggactatgattacgaccaagatgattatgaagacggtgcgatcacaagtgggagtagcgtgaccttctcgaattcttacgggtctcagtggtcccccgactacaggtgcagcgtgggaacatataactcctctggtgcgtatcgcttcagcagcgaaggcgctcagtcttcattcgaggactcagaagaggatttcgattcccggttcgataccgatgatgaattatcgtatagaagagacagtgtgtatagttgtgtcactctgccttacttccactcatttctgtacatgaagggaggactgatgaactcatggaaacggcgttggtgtgtgctcaaggatgaaaccttcctctggttccgtagtaagcaggaggccctcaagcaaggatggctgcacaaaaaaggcggaggatctagcacgctgagtcgaagaaattggaagaagagatggtttgtacttagacagtcaaaactgatgtattttgagaatgacagcgaggagaagctgaaggggaccgtggaggttcgcactgccaaggaaattattgacaataccaccaaagaaaatgggatcgatattattatggctgacaggacctttcacctcatcgcagagagccccgaagacgcgtcccagtggttctctgtgttgtcacaggtgcatgctagcaccgaccaggaaattcaggagatgcatgatgagcaggctaatccccagaacgctgtcggcacgcttgatgtgggactgattgattcagtgtgcgcatcagacagtcccgacaggcccaatagttttgtcatcataaccgctaacagagtactgcattgcaatgctgacactccagaggagatgcaccattggataacccttctgcagcggtcaaagggagatacacgcgtagaagggcaggaattcatcgtaaggggttggttgcataaggaggtgaaaaattcgcctaagatgtcttcactcaagctgaagaagcgttggttcgtgctgactcataactcgctggactactataaatcctcggaaaagaacgcgcttaaattgggcaccctagtcctgaacagcctgtgctcagtcgtaccacccgatgaaaaaatcttcaaggaaacggggtattggaatgtgactgtttacggaagaaagcattgctatcgcctgtataccaagttgctgaatgaggcaactcgttggtcctccgccatccagaacgtcacggataccaaagccccaatcgacacacccacacagcagctcattcaagacattaaagaaaattgcttgaattcagacgtggtggagcagatctacaaacgcaatcctattcttcgatatacacaccaccctcttcacagcccactgttgccactgccctacggggacattaacctgaatctgctgaaggacaaaggatacactacgctgcaggacgaagccatcaagatatttaattccctccagcagctagagagtatgagtgatcctatccctattatccagggcatcctccagactggacacgacctgcgccctctgcgagacgagctgtactgccagttgataaagcagacgaacaaggtaccccaccccggatctgttggtaatctctattcctggcagattctcacatgcctctcttgcacatttctccctagtcgcggaattcttaagtacctcaaattccatctgaagcgtattcgcgaacagttccctggatctgagatggagaaatatgcactcttcacctacgaaagtctgaaaaaaaccaagtgtagggagtttgtgccatctagggacgagatcgaggctctgatccacagacaagaaatgacttcaacggtgtactgtcacggtggaggttcctgtaaaattaccataaattcacatacaaccgctggtgaagtggttgaaaaactaattcgtgggctggctatggaggacagccggaacatgttcgcgctgttcgagtacaatgggcatgtagataaggcaattgaatcccgcaccgtcgtggctgatgtactggccaaattcgagaagcttgcagcaacctcagaagtcggagatctcccctggaagttctattttaaactgtattgctttcttgatacagacaacgttcccaaggattccgtcgaattcgcttttatgtttgagcaggcacatgaagccgttattcacggacaccatcccgctccagaagagaacctgcaagtcctggcagcgttgcgcctgcagtatctgcagggggactatactctccatgcagctattccaccattggaggaggtgtacagtcttcagaggcttaaggccagaatctcccaatctaccaagaccttcacaccttgtgagcgactcgagaaacgaagaactagtttcttggaaggcaccttacggaggtcgttcagaactggatctgtcgtgaggcaaaaggtggaagaagagcagatgttagacatgtggatcaaagaggaagtgtcgagtgcacgggcatcaatcatagataaatggaggaagtttcagggaatgaatcaggagcaggccatggcaaagtacatggcactgatcaaggagtggccagggtatggttctaccctcttcgacgttgagtgcaaggaaggcggttttccacaagagctctggctgggagtctctgccgacgcggtcagtgtgtataaacgcggtgagggcagaccactcgaggtcttccagtatgagcatatattgtccttcggggcaccattggctaatacgtataagatcgttgtggacgaaagagaattactgtttgagacgtcagaagtggtggatgtcgctaaactcatgaaggcctatatctctatgattgtaaagaaaagatacagcacaacccgctccgcctctagtcagggatcttcaagatag

SEQ ID NO: 231665 - DNA, 4248 bp, synthetic construct
  misc_feature 1..4248: note = Description of Artificial Sequence: Synthetic coding sequence
  source 1..4248: mol_type = other DNA
atgcccgaccagttcgaccaggctgtcgtgctgaaccagctgcgatattccggcatgctggagaccgtgcggattcgcaaggccggttatgctgtgcgcaggcctttccaggacttctacaagaggtataaggtcctaatgaggaacctggccctgccagaagacgtgaggggcaagtgcacaagcctcctgcagttgtatgatgcttccaatagcgagtggcagctgggtaagactaaggtgttcttgcgcgagagtctggagcagaaactggaaaagcgccgagaggaggaggtgtcccatgcagccatggtgatcagagctcatgtgctgggcttcctcgccaggaaacagtacagaaaggtgctgtattgcgtcgtgataatccaaaagaactaccgggcttttcttctccgtcgcaggttcctgcacctcaagaaagccgcaatcgttttccagaaacaactgcgaggccagattgcacgtcgagtctatcgccaacttctggctgagaagagggagcaggaagagaagaagaagcaagaggaggaggagaagaagaagagagaagaggaagagcgcgagagagagagagaaagaagggaggccgagcttcgagcgcagcaggaagaggagactagaaagcagcaggaattggaggctctccagaaaagtcagaaggaggctgagctcaccagggagttggaaaaacagaaggaaaacaaacaggtggaagagatccttagacttgagaaggaaattgaagaccttcagcgtatgaaggagcagcaggagctgagccttaccgaagccagcttgcaaaagcttcaagaaaggagagatcaggaactccgacgattggaggaagaggcctgccgcgcagcccaggagttcctggaatccctgaacttcgacgagattgacgaatgcgtccgaaacattgagaggtcactaagcgtcggaagcgaattttcttctgagctagctgagtccgcatgtgaagaaaaaccaaacttcaacttcagccagccttacccggaggaggaagtcgacgaaggctttgaagcagacgacgacgctttcaaggatagcccgaatcctagcgagcatggccactccgatcaacggactagcggcatcaggaccagcgatgacagcagtgaggaagacccatatatgaatgacaccgtggtccctacctctcccagtgctgatagtactgtgctcctcgccccttctgtgcaggactctggctctctccacaattccagtagcggagagtccacttactgtatgcctcaaaatgcaggagacctgccctcccccgatggtgattatgactatgatcaggatgattacgaagacggggctattacctctggcagtagcgttactttcagcaactcttatggcagccagtggtccccagattaccgctgcagcgtcgggacttataatagcagtggagcctataggtttagctcagaaggcgctcaatccagtttcgaggatagcgaggaggactttgacagcaggtttgatactgacgacgagttgtcatacaggagagacagcgtgtactcatgtgtcaccctgccctatttccactcttttctctacatgaagggaggcctcatgaatagttggaaaaggcgatggtgtgtgctgaaggatgagacctttctgtggttccgatccaagcaggaggcgctgaaacaggggtggcttcacaaaaaggggggaggcagtagcactctctcaagaagaaactggaagaagaggtggttcgtactaagacagtcaaagctgatgtacttcgaaaacgattccgaggagaagctgaagggtaccgtggaagtcaggactgctaaggaaattatcgacaatacaaccaaagaaaatggcatcgatattattatggcggaccggactttccacttgattgctgagtcccccgaggacgcctcacagtggttttccgtgcttagccaggtacacgcttccactgaccaggagatccaggaaatgcacgacgaacaagccaatccgcagaatgcagtcgggacacttgatgtaggtctgattgactcagtttgcgcctcagattcaccagacaggcccaattcatttgttattattactgctaaccgcgtgctacattgcaacgcagacacacctgaggaaatgcaccattggatcaccttactgcagagaagtaagggggacacccgagtcgagggccaggagttcatagtgagagggtggctccataaagaagtgaaaaattctcctaaaatgtcatctctcaagttgaagaaacggtggttcgtgttaacccataacagcctggattactataaaagtagcgagaagaacgcccttaaattgggcacattggtgctgaactccctgtgctccgttgtgccccctgacgaaaaaatctttaaggagactgggtactggaatgttacggtgtacggacgcaagcactgctaccgtctgtacaccaagctcctgaatgaggccactcggtggagcagtgcgatacagaatgtgaccgacacaaaggctcctatagacacccccacacaacagctgattcaggacattaaagagaactgtctcaattccgacgtggttgagcaaatctataagagaaatcctatactgagatacactcaccaccctctgcatagccctttactgccgttgccctatggggatataaacctcaatctgctgaaggataagggatacacaactctgcaagacgaggcgattaaaatcttcaactcactgcagcagctggaatctatgtccgatcctattcccatcattcaggggattctccagacggggcacgatctgaggcctctcagggacgagttgtattgtcagctcattaagcagactaataaggttccgcacccgggatctgtgggtaacctttacagttggcagattctgacctgcttatcttgcacattcctgccgagcaggggcattctcaagtatctcaaatttcacttgaagcggattcgagaacagttccccggatccgagatggaaaaatacgcgttgttcacttacgaatctctgaagaaaacgaaatgtagagaatttgtgccgtctagggatgaaatcgaagccctgattcatcgccaagaaatgacatccactgtctattgccacgggggtgggtcatgtaagatcaccataaactcgcatacaacagcaggcgaggtcgtggaaaaattgatacgcggactggcaatggaagatagccgaaacatgttcgccctgttcgaatataatggtcatgtggacaaagcgattgaatctcgcacagtggtggcagacgtgctggcaaagtttgagaagctggctgccactagtgaggttggcgacctcccctggaaattctacttcaagctttattgttttcttgacaccgacaacgtccctaaggatagtgtcgagttcgccttcatgttcgaacaggctcatgaggctgtgatccatgggcaccaccctgccccagaggaaaatctgcaggtgctcgctgccctccgactccagtatctacaaggtgactatactctccatgctgctatccctccactggaggaggtttattccctgcagaggctgaaggccagaatctcacagtctaccaagactttcacaccatgcgaacgtctggagaaacgccgaacctcctttttggagggaactctgcgtcggtcattcagaaccggatcagtagtccgccaaaaggtcgaagaggaacagatgcttgatatgtggataaaagaagaggtgtcttctgcccgtgcaagtattattgacaagtggcggaagtttcaggggatgaatcaagaacaggccatggccaaatatatggccctgatcaaggaatggcccggttatggaagcacactcttcgatgtggagtgtaaggaaggcggatttccccaggagctctggctgggcgtgtcagctgatgcagttagcgtgtataagaggggggaggggcgaccactcgaagtgttccagtacgaacacatactgtcttttggggcaccgctcgccaatacctataaaattgtggtggatgaaagggaacttctctttgaaacctccgaggtagtggacgttgcaaagctaatgaaggcttacatttctatgatcgtgaagaagcggtattctaccacccgaagtgccagttctcaaggaagcagccggtag

SEQ ID NO: 231666 - DNA, 4194 bp, synthetic construct
  misc_feature 1..4194: note = Description of Artificial Sequence: Synthetic coding sequence
  source 1..4194: mol_type = other DNA
atgctggaaacggtgaggatccgcaaggccggatatgccgtgaggaggccattccaggatttttataaacgctacaaggtccttatgcgtaaccttgccctgcccgaggatgtgcggggtaaatgcacttcccttctccagctgtatgacgcatctaactctgagtggcaactgggcaagaccaaggtatttttacgagagtcccttgaacaaaagctggagaagcgccgagaggaagaagtttctcatgccgcaatggtgattagagcgcacgttttgggttttcttgctcgaaagcagtacagaaaggtgctttattgcgtggtcatcatccagaagaattaccgcgcttttctcctgagaaggcgattcctgcatctaaaaaaggctgctatcgttttccaaaaacagcttcgcggtcagattgcgcgaagggtgtataggcagctactcgctgagaaaagggagcaggaggaaaaaaagaagcaggaagaagaagagaagaaaaagagagaagaagaagagcgtgagcgggagagagagcgcagagaagcagaactgcgcgctcagcaggaggaggagacccgcaagcagcaggaacttgaggctctgcagaagtcccagaaggaggcggagctgactcgcgaattggaaaagcagaaagagaacaagcaagtggaggagatcttgcggcttgaaaaggagattgaggacttgcagcgtatgaaagagcagcaggagctgagcctgactgaagccagcttgcagaagctgcaggagcgacgcgatcaggagttgcgcagattggaggaggaggcttgcagggccgcacaggagttcctcgagtcattgaatttcgatgaaattgacgaatgcgtgcggaacatcgaacgctccttatctgtcggctcagagttctcatccgaactggccgagagcgcttgtgaagaaaagcctaatttcaattttagccagccttaccccgaggaggaggtggatgagggctttgaggccgacgatgacgcctttaaggactctcccaatccaagtgagcatggccactctgaccagcgcaccagtgggatccggacaagtgacgatagctccgaggaagacccctatatgaacgatacggttgtgccaaccagtcccagcgctgactccaccgtgctgctggccccttccgtacaagattcgggctcgctccacaatagctctagtggggaatccacctactgcatgccgcaaaatgctggcgacttgccatctccagatggcgactatgactacgatcaggacgattacgaggatggagccatcacatcaggttctagtgtgacattcagtaattcctatggatcacaatggtctccagactacagatgttctgttggaacctataacagtagcggtgcctatcgcttctcctctgagggggcacagagctcgtttgaagattcggaggaggattttgatagtaggttcgacacggacgacgaactgagctatcggcgagatagtgtgtacagctgcgtgaccctgccatacttccactcttttctctacatgaaagggggacttatgaattcgtggaagcggagatggtgcgtgctcaaagatgagacctttctgtggttcagatcgaagcaagaagccctgaagcagggatggctccacaaaaagggcggtgggagctcaacactgagccggagaaattggaagaagcggtggttcgtgctaaggcagtccaagcttatgtatttcgaaaatgattccgaggaaaagcttaaggggactgttgaggtgcggaccgccaaagaaataatcgataataccactaaggaaaacggtatcgatatcatcatggccgacaggacatttcatcttatcgcagagtctcctgaagacgcatcacagtggttcagcgtgctaagtcaagttcatgcctccactgaccaagagatacaggagatgcacgacgagcaagctaacccacagaacgctgtgggtacactcgacgtgggtttgattgactctgtttgtgcatccgactccccggataggcctaattctttcgtgattattaccgcgaaccgagtgctgcattgcaatgcagatacacccgaggagatgcaccattggatcaccctcctccaaagaagcaagggagatactcgcgtggaagggcaggagtttatcgttagaggctggctgcataaggaagtgaaaaatagtcccaaaatgagcagtctcaagctgaaaaagaggtggttcgtactcacgcataacagcctggactattacaagtcctccgaaaagaacgcactgaaactaggtacattggttctaaacagtttatgctctgtcgtgccccctgacgagaaaattttcaaagagaccggctactggaacgtaactgtgtacggccgtaagcattgttatcggttatatactaaattgctcaacgaagcaactaggtggagctcagctattcagaatgtcaccgacacgaaggcacccatcgatactcccacccagcaactaatccaggatatcaaagagaactgcctgaatagcgatgtcgttgaacagatttataagaggaatccaatcctccgatatactcatcacccactacacagtccattgctgccactaccatacggggacatcaacttaaatctcttaaaagacaaggggtacacaacgctgcaagacgaggccatcaaaattttcaatagtcttcaacagttagaatcaatgtccgaccctattcctatcatccagggcatcctgcagactggccatgatctaaggcctctccgggatgaactatactgtcagctaattaagcagactaacaaagtgcctcacccaggctcagttgggaatctgtactcctggcagattctcacttgtctgagttgcacattcttgccaagtagaggcatcctgaagtacctcaagtttcatttaaagagaattcgagagcagttcccgggatcggagatggagaagtatgcgttgttcacatacgaatcacttaaaaagaccaagtgcagagagtttgttccgtcgcgggatgaaatcgaggccctcatccataggcaagagatgacttccaccgtttattgtcatgggggaggctcctgtaagataacaatcaattcacatactacagccggagaagtcgtcgagaaattgatcagggggctcgccatggaggatagtcggaacatgttcgccctgttcgagtataacggacatgtcgacaaggccatagaatcacgtaccgtcgtggcggatgtacttgccaaatttgaaaagctcgcagctaccagcgaggttggtgatttaccctggaagttttattttaaattgtattgttttctagatacagataacgtacccaaggactcagtcgagttcgcctttatgttcgaacaggcccatgaggctgtgattcatggccaccacccagcaccggaagaaaacttacaggttctggcggctctgaggctgcaatatctgcagggggattacactctgcatgcagctatccctcctctcgaagaagtttacagcctgcagcgtctcaaggcccgaatcagccagtccacgaaaaccttcaccccctgtgagagacttgagaagcggagaacttccttcctggaggggaccctgaggagatcttttcgcaccggctcggtcgtccggcagaaggtggaagaggagcagatgctagacatgtggatcaaagaggaggtcagctccgcaagggcgagcatcatagataaatggcgcaaattccaaggcatgaatcaggaacaggccatggccaagtacatggcacttataaaagaatggcccggatacggatccacgttgttcgacgtggaatgcaaagagggcggtttccctcaagaactatggttgggcgtttccgcagacgcagtgagtgtgtacaaacgaggagaagggagacctctcgaggtattccagtatgaacacatcctgagctttggagcccctctcgctaacacctataagatagtggtggacgagcgagagcttctcttcgagactagtgaggtcgtggatgttgctaagcttatgaaagcttacatcagcatgatagtcaagaagaggtattcaactacccggtccgcaagttcacaggggagttccaggtag

SEQ ID NO: 231667 - DNA, 6176 bp, synthetic construct
  misc_feature 1..6176: note = Description of Artificial Sequence: Synthetic coding sequence
  source 1..6176: mol_type = other DNA
atggataacttttttacagaaggcacacgggtctggctccgagaaaacggacaacacttcccatccacggtgaacagctgtgcggaaggaatcgttgtcttcagaacagattacggacaagttttcacgtacaaacagtctaccatcacacatcagaaagtgaccgccatgcatcccacaaatgaagagggcgtggatgatatggcatctctgacggagctgcatggagggtcaatcatgtacaacctgttccagagatacaaacggaaccagatctatacatacatcggctcaatcctggccagcgtcaatccctaccaacccatcgctgggctctatgagcccgctacaatggagcagtactccaggcggcacctaggggaattgcctccgcatatctttgctatcgcaaatgaatgctatcggtgtttgtggaagcggcacgataaccagtgcatactgatatcaggcgagtctggcgcaggcaagacagaatccacgaaattaatcctcaaattcctgtccgtgatttctcagcagagcctggaactcagcttgaaagagaagaccagctgcgtggagcgtgccattctcgagagcagtcccatcatggaggcttttggcaatgctaagacagtttataataacaatagcagccgttttggaaaatttgtgcagcttaatatctgccagaagggcaacatccaggggggtcggattgttgactatctactggagaagaaccgcgtggtgagacagaacccgggagagcggaactaccacatcttttacgccctcctggctggcctagagcatgaggagagagaggaattctatttatccacccctgaaaactaccactaccttaaccagtccggatgcgtcgaggataaaactatcagtgaccaggagtcattccgtgaagttattactgcaatggatgtgatgcaattttccaaagaggaagtacgcgaggtcagccgtctgctagcaggcattttgcaccttggaaacatcgaattcatcactgccggaggggctcaggtcagcttcaaaaccgcgctgggcaggtccgcagagttgctggggcttgaccctacccagctgactgacgccctaactcagagatcaatgtttcttagaggagaggagattttgacaccattgaatgtgcagcaagccgtggatagccgcgactctctggccatggccctctacgcctgctgcttcgagtgggtcattaagaagattaattctcgcatcaaggggaacgaggactttaagtcaattggcattctcgacatctttgggttcgagaattttgaggtcaatcacttcgagcagtttaacattaattacgcaaacgagaaactgcaagagtacttcaacaaacacatcttttcccttgagcaactagagtacagtcgcgaaggcctggtttgggaagatatcgattggatcgacaacggcgagtgtctcgatcttattgagaaaaagctgggcctcctggccctgatcaacgaggaaagtcacttcccccaggccaccgactcgacacttcttgagaaactgcactcacaacacgcaaacaaccacttttacgtgaagccacgggtcgctgtgaataattttggcgtaaaacactacgcaggtgaagtacagtatgatgtgagggggatcctggaaaagaacagggacacctttagggacgacttgctgaacctgctcagagagtctaggtttgatttcatctacgacctgttcgaacacgtgtccagtagaaataatcaggacaccttgaaatgcgggtcaaagcatcggcgtccaacggtgagcagccaatttaaagactcattgcactctctcatggccacactttcctcatccaatccctttttcgtcagatgtatcaagccgaatatgcagaaaatgcctgaccagttcgatcaagctgttgttttgaaccagctaagatactccggaatgctcgagactgtgcgtattaggaaggccggttacgccgtccggagacccttccaggacttttataaacgatacaaggtgctgatgaggaatcttgctctccccgaggacgtccgaggaaaatgcacaagcctcttgcaattgtatgatgcctctaattccgaatggcagctcggtaagaccaaggttttcctccgggaaagtctcgagcagaaactagagaagcgcagggaggaagaagtgagtcacgctgctatggtgattagagctcacgttctcggattcctggcacgaaaacagtacagaaaggtgctatactgtgtggtaattatccagaagaattatcgggcttttctgctgcggagaaggttccttcacctgaaaaaggctgcgattgtcttccagaaacagcttcgaggtcagattgcaagaagagtctaccggcaactgctggccgaaaaaagagagcaagaagagaaaaaaaagcaggaggaggaagaaaagaaaaaacgggaggaggaagagcgagaaagggaacgggagaggagagaggctgaactccgggctcagcaagaggaagaaacgcgaaaacaacaagaactggaggctctccagaagtctcagaaggaggctgagcttaccagggagttggagaagcagaaagagaacaaacaggtggaggaaatcttaagactggaaaaggagatcgaggacctccagagaatgaaggagcagcaggagctgtctttaaccgaagctagtctgcaaaaactgcaggagagacgcgatcaggagcttaggcggcttgaggaggaagcatgtagggctgcgcaagaatttttggaatctctgaattttgacgagatcgatgaatgtgtgcggaatatcgaaaggtccctctcagtcgggtccgaattttcttcagaactagccgagagtgcttgcgaagaaaaaccgaatttcaatttttcccagccctacccagaggaggaggtggacgagggttttgaggcggacgacgacgcgttcaaagattctccaaatccttctgaacacggccattccgaccagcggacaagcgggatccgaacatcagacgactcctctgaggaggatccatacatgaacgatacagttgtccctactagcccatcagctgactctacggtcctcttggcgcctagcgtgcaggactctggctccctgcacaattcgagctccggcgaatctacctactgtatgccacaaaatgcaggcgatctgccctcccccgacggtgactacgactacgatcaggacgactatgaggatggcgctattacttctgggtcttcagtaactttctccaacagctacgggtcacagtggtcccccgactacagatgtagcgtgggcacatataacagcagcggagcgtaccgattttcctccgagggcgcacagtcttcgttcgaagattctgaagaggatttcgactctcgcttcgatactgacgacgagctctcttatcgacgtgatagtgtctatagctgcgtgacccttccatatttccactctttcctttatatgaaagggggacttatgaactcatggaagcgccgatggtgcgtactgaaggacgaaacatttctttggtttaggtcaaaacaggaggctctgaagcagggatggctccataagaaaggaggcggttcctccaccctctctaggagaaactggaaaaagaggtggttcgttttgaggcagtcaaagctgatgtacttcgaaaacgacagcgaagagaaactcaaaggcaccgtcgaggtacgcactgcaaaggaaatcatcgataatacgacaaaagagaacggcatcgatatcattatggccgatcgaactttccacctgatcgccgaaagtccagaggacgcatcacaatggttctcagtactgagtcaagtccacgcctccaccgatcaggaaatccaggagatgcacgatgaacaagccaatccgcaaaacgctgttggaaccttggatgtcggcctaattgactccgtgtgtgcctctgacagccctgatagacccaattcatttgtgatcatcacggcgaatcgagtgcttcactgcaacgctgacactcctgaggagatgcatcactggattacactgctccagaggtccaaaggtgatacgcgggtagaggggcaagaattcattgtgagaggctggttgcacaaggaagtaaagaactccccaaagatgtcaagcttaaaactaaaaaagcgctggttcgtgcttacacataattctctggattactataagtcatcggagaaaaacgccttaaagctcggcacactggtattgaacagcctttgcagtgtggtgcccccagacgagaagattttcaaggagactgggtactggaatgtcacagtgtacgggaggaagcactgctaccggctatacaccaaactgctgaacgaggccacacgatggtcatccgctatccagaacgtcaccgacaccaaggctccaatcgatacccccacccagcagttgatccaggacatcaaggaaaattgcctgaactcagatgtggtcgagcagatttacaagcggaatcctatactgagatacactcaccaccctcttcattctcctcttctgcccctgccatatggggatattaacctgaacctgctcaaagacaaaggctacaccacgttgcaagacgaggcaattaagatcttcaattcgctgcagcagctcgaatctatgagtgacccaataccaatcattcagggcatcttacaaaccgggcacgatcttcggcctctccgggacgagctttactgtcaactcatcaaacagaccaataaggtaccacacccagggagcgtcggtaacctgtattcgtggcagatcttgacgtgcctgagttgtacgttcttgcctagccgcggtattctgaagtatctgaaattccatctgaagagaatccgggaacagttcccaggcagcgagatggagaagtatgccctctttacctatgagtccttaaagaaaaccaaatgtcgggagtttgtgccttcccgggatgaaatcgaggctctcattcataggcaggaaatgaccagtactgtgtattgccacggtgggggatcttgtaaaattactatcaacagccataccactgcgggagaggtggtcgagaaactcatacgaggactggccatggaggacagtagaaatatgttcgcgttgtttgagtacaacgggcacgtcgataaagccattgaaagcaggaccgtcgtagcagatgtgctggcaaaattcgagaaattagctgccacttccgaagtgggtgacctaccatggaaattttatttcaagctgtactgttttcttgacactgataacgttcccaaagacagcgtcgaattcgccttcatgttcgagcaggcccatgaggcagttattcatggtcaccatcctgctcctgaagagaatctgcaggtgttagctgcactcagattgcagtatttgcagggtgactacaccttgcacgccgctatccctcccctcgaagaagtttactctctgcaaagactgaaagctaggattagccagagcaccaaaacgttcaccccctgcgaacgccttgagaagcgacgcacctcctttctggagggaacactccgtcgaagctttaggaccggctccgttgtgaggcagaaggtggaggaagagcaaatgctggatatgtggatcaaagaagaagtttcctcagccagagcttctatcatcgataaatggcgcaaatttcagggcatgaatcaggaacaagccatggccaaatatatggccctaattaaagaatggccgggttacggctccactctattcgatgtcgaatgcaaggaaggaggtttcccgcaggaactgtggcttggagtgtccgccgatgccgtgagcgtttacaaacggggtgagggaaggcccctagaggtgtttcaatacgaacacatcctgtcttttggagccccactggccaacacatacaagattgtggtggacgagagagagcttctgtttgaaacttcggaagttgtggatgtcgcaaagctaatgaaggcatatatctcaatgatcgtgaagaagcgatacagtactacccgctccgcatcatctcaggggagctcacggta

SEQ ID NO: 231668 - DNA, 4194 bp, synthetic construct
  misc_feature 1..4194: note = Description of Artificial Sequence: Synthetic coding sequence
  source 1..4194: mol_type = other DNA
atgctcgagacagtgaggatcaggaaagccggatacgctgttaggaggccgtttcaggacttctataagaggtacaaagtgctgatgcgcaacctggccctccccgaggacgtcaggggaaagtgcactagccttcttcaactgtacgatgcctctaatagcgagtggcagctcggcaagaccaaggtgtttctgcgcgaatcccttgagcagaagttggagaaaaggagagaagaggaggttagtcacgctgccatggtgataagggctcatgtgcttggttttttggccaggaaacaataccgcaaggtgctatattgcgttgtcataatccagaagaattatcgggctttcctgctccggagacggtttctgcacctgaagaaggctgctattgtgttccagaaacaacttcggggacagattgcccgtagagtctaccgccagcttctcgccgaaaagcgggaacaagaagaaaagaaaaaacaggaggaggaagaaaagaagaaaagggaggaggaagaaagggaaagggaacgtgagcgcagggaggcagaactgagggctcagcaagaagaagagactcgcaaacagcaagagttggaggctctccaaaagagtcagaaggaggctgaactaacccgggaattggaaaagcagaaagagaacaagcaggtggaagagatactgcgtctggaaaaggaaattgaagacttgcaacgaatgaaagagcagcaggagcttagtctgacagaggccagcctacagaaacttcaggagcgcagagatcaggagcttaggcgcctcgaagaggaagcctgtcgagcagctcaggagttcctcgagtcactgaatttcgatgagatcgacgaatgtgttcgaaacatcgaacgaagtctctccgtaggctccgaattttcatcggagcttgccgaatccgcatgtgaagagaaacctaatttcaatttctcacagccttatccagaggaagaggtcgacgaaggcttcgaagcagacgatgacgcctttaaggactcccccaacccctcggaacatggccactccgaccaacgcacatctggcatcagaacctctgatgatagttccgaagaagacccgtacatgaacgacaccgtcgtacccaccagcccttctgcagattccaccgtgctgttggctccgtcagtgcaggacagtgggtccctccacaacagctcatccggcgaaagcacctactgcatgccgcagaatgcgggagacttgcccagccccgacggtgactacgattacgatcaggacgactatgaagatggggctataactagcggcagttctgtaacattctccaactcctacggaagtcagtggtcccctgactaccgttgtagcgtggggacgtacaacagctcaggcgcttatcggttcagctcggagggggctcagtcttcttttgaggatagtgaggaagactttgacagtaggttcgatactgatgatgagctgagttaccgcagagatagtgtttactcttgtgtaactttgccttacttccattctttcctgtatatgaaggggggactaatgaattcgtggaaacgcaggtggtgcgttctcaaggacgagacattcctctggttcagaagtaagcaggaggccctgaagcagggctggcttcacaagaagggtggcggttcatcgacgttgtctcggagaaattggaaaaaacgttggttcgtcctgcgccagtctaaacttatgtacttcgaaaacgattcagaggagaagctcaagggaaccgtggaggtgaggacagcgaaggagatcatagacaataccacaaaggagaatggaatcgacattatcatggctgacaggaccttccacttaattgctgagtcacctgaggacgcatcccaatggttttctgtcctctcccaggtgcatgctagcacagaccaagaaatccaggagatgcacgacgaacaagcgaaccctcagaatgccgtaggcacactcgatgtgggactcatagattcggtctgcgcctcagatagtcccgatcgccctaacagctttgtcatcattaccgcaaacagggtgctgcattgtaacgcggatacccctgaagaaatgcatcactggattacactcctgcagcgtagcaagggggacacaagggtggagggtcaggagtttattgtaaggggttggttacacaaagaggtaaaaaatagtcccaaaatgtcttctctcaaactgaaaaagcggtggttcgtactgactcacaatagcctggattactacaaatctagcgaaaagaacgccctcaaattgggaacgctcgtcctgaattccctgtgcagcgtggtccctccagatgaaaaaatctttaaggagacggggtattggaatgtcaccgtctacggaagaaagcactgctacaggttatacacaaagttgctgaatgaagctacgaggtggtcttccgccatccagaatgtgacggatactaaagcccctattgatacaccaactcaacagctcatccaggatataaaagagaattgccttaactctgacgtggtcgagcaaatctacaagagaaaccctatcctgcgttatacacatcatccactgcactctcctctgcttccactgccatacggcgacatcaacctgaacctccttaaggacaaaggctacactaccttgcaggacgaggctattaagatattcaatagcctgcagcagcttgagagtatgagtgaccctattccaattatccagggcattctccagacagggcacgacctccgcccattgcgggatgagttgtattgtcaactgattaagcagactaacaaggtccctcacccgggtagcgtggggaacctgtatagctggcagatcctgacatgtttgagttgtacatttttgccatctagaggaatacttaagtacctgaagtttcatttaaaaaggattagagagcagttccccggttctgagatggagaagtatgccctattcacatatgaaagtcttaagaaaaccaaatgcagagaatttgtcccaagcagggatgagatagaagctctgattcaccgtcaggaaatgacctcaactgtttattgtcacggtggaggcagttgtaagattactatcaatagccacacaactgcgggagaggtcgtggaaaaactgattcggggtttggcaatggaggacagccggaacatgttcgccctattcgaatataatgggcacgtcgataaggccatcgagtcccggacggtagtagcggatgtcctggccaaatttgaaaaattggcggctactagtgaagtcggagatctcccttggaaattctactttaaattgtactgctttctggacaccgataatgtgcctaaagattccgtggaattcgcatttatgtttgagcaagcccatgaggctgtaatccacggtcaccatcccgctccagaagaaaatctgcaagttctggctgccctgcgactgcagtatcttcagggagactacaccctgcatgctgccattcctccactggaagaagtttattccctgcagaggctgaaagctcggattagccaatctacaaaaacattcacaccttgtgagaggcttgagaaaagacgcactagcttcctggagggaacgctccggaggagcttccgtactgggtccgtggtccgacagaaggtcgaggaggagcaaatgctggacatgtggatcaaggaagaagtgtcttccgcaagggcaagtataatagacaaatggagaaaatttcagggaatgaatcaggagcaggctatggctaaatatatggccctcatcaaggaatggcctgggtatggatccacattgtttgatgtcgagtgtaaggagggaggatttccccaggaactgtggctcggggtaagcgccgacgccgtaagcgtgtacaagcgtggtgagggccgacctttggaggtcttccaatacgaacatattctcagtttcggtgctcctctggctaacacctataaaatagtcgttgatgagcgggaactgttattcgaaacaagtgaagttgttgacgtggctaagctaatgaaggcgtatatttccatgattgtgaagaaacgttactctaccacacgaagcgctagtagtcagggcagctctaggtag

SEQ ID NO: 231669 - DNA, 552 bp, synthetic construct
  misc_feature 1..552: note = Description of Artificial Sequence: Synthetic coding sequence
  source 1..552: mol_type = other DNA
atggagaacggagccgtgtactctcccaccaccgaagaagaccccggacctgccaggggtcccaggtctgggctcgctgcctacttttttatgggcagattgccacttctccgcagagtgctgaaaggacttcaactcttgctttctctgctggccttcatctgcgaagaggttgtttctcagtgcactttatgcggtggactttacttctttgagttcgttagttgcagtgcctttctcctgtccttgctaattttaattgtgtattgcacacccttttatgagagggtggacaccacaaaggttaaaagtagcgacttttacattaccttaggcacaggatgcgttttcctactggctagtattatttttgtttctacacatgaccggacctctgcggaaattgcagcaattgtgttcggcttcatcgcgtcctttatgttcttgttggactttatcactatgctgtatgaaaaacggcaagagagccagttgcgtaagccagaaaatacgactcgcgctgaggctcttactgaacccctaaacgcttag

SEQ ID NO: 231670 - DNA, 1437 bp, synthetic construct
  misc_feature 1..1437: note = Description of Artificial Sequence: Synthetic coding sequence
  source 1..1437: mol_type = other DNA
atgctggaatttgcccagaagtattttagagatccccaacgacgcccacaggacgggctgcgcctgaaatctaaggagcctcgagagtcaagaacactggaagatatgctttgtttcacaaagacacccctccaggagtccctgatcgaactgtcagacagcagcctgtccaaaatggccaccgatatgttcttggcagtgatgaggttcatgggtgacgcacctctcaaagggcagtctgacttggatgtgctctgcaatctcctgaagctctgcggagaccatgaagtaatgcgggacgagtgctactgtcaggtagtcaagcagataacagacaacacatcatccaaacaggatagctgccagagaggttggcggcttctatacatagtcactgcttaccactcgtgcagcgaagtgttgcatcctcatctaacacgtttcttgcaggacgtgagtaggacacccggtctgccttttcagggcatcgccaaagcctgtgaacagaatctacagaaaacactgaggttcggcggacgccttgagctgccctcatccatcgaactcagggccatgctggcaggaagaagttccaagcggcagctatttctgctaccgggtgggttggagagacacctgaagatcaaaacctgcacagtggccctggatgtggtggaggaaatctgtgctgaaatggctctgaccagaccagaggctttcaatgagtacgtcattttcgtcgtcacaaataggggacaacatgtgtgtcccctcagccgtcgcgcttacatcctcgacgtggcctctgaaatggagcaggtggacgggggttacatgctctggtttagaagggtgttgtgggaccaacccttgaagttcgagaacgagttgtatgtgaccatgcactacaatcaagtcttgcctgattatctgaaagggctattttccagtgttcctgcatcccgaccttccgagcagctcctccagcaagtgagcaagctcgcctccctgcagcatcgggctaaggaccacttctacctaccgagtgtacgggaagtccaggaatatatccctgcacaattgtatcgcaccactgccggttccacctggcttaatcttgttagtcagcatcggcagcaaactcaggccctcagtccgcaccaggcacgggcacaatttctcggactattgtcagccctgccaatgttcggcagttcttttttctttatacagtcgtgctcaaatattgcagtgccagcaccttgcatcctggccattaaccacaacgggcttaattttctgtccacggagacgcacgtgtcaggcctctctctggcccttccgtcccccccatccgtcccttggtctcctactccgtccaaaaggccccgaccaccagccgctgaagcacagtttcattgcctccccccttcttag

SEQ ID NO: 231671 - DNA, 555 bp, synthetic construct
  misc_feature 1..555: note = Description of Artificial Sequence: Synthetic coding sequence
  source 1..555: mol_type = other DNA
atgaatatgctgtcttcactgagtccgacagtagtgctacctgattaccttaaaggtctcttctcctccgtgcccgcatcccggccatctgagcagctgcttcagcaggtgtctaagttagcatccctgcaacaccgtgcgaaagatcacttctacctgccctctgtgcgtgaggtgcaagaatatattcccgcacagctctataggactacggccggatccacttggctcaacttagttagtcagcatcgccagcagacgcaagccctgtctcctcatcaggctcgcgctcagtttcttggactcctatccgctcttccgatgttcggctctagttttttctttattcaaagttgcagcaatatagccgttccagccccatgtattctggccatcaatcacaacggactgaacttcttgagtacagagactcacgtgagcggattgtcgctggccctcccctctcctcccagtgtcccatggtccccaaccccttccaagcgtccacggccacccgcagcagaagcccaatttcactgtttgccacctagctag

SEQ ID NO: 231672 - DNA, 735 bp, synthetic construct
  misc_feature 1..735: note = Description of Artificial Sequence: Synthetic coding sequence
  source 1..735: mol_type = other DNA
atgagagatgagtgttactgccaggttgtgaaacagattacagacaacacatcatccaaacaggattcatgtcagcggggatggcgcctgctgtacattgttaccgcgtatcactcatgttccgaagttctgcatcctcatctgactcgctttctccaggacgtttccagaactcccggtctcccttttcagggcatagctaaagcctgcgaacagaatctgcaaaaaacccttcgctttggagggcgactggagctgccaagcagtatcgagctccgggctatgctcgctggtagatcttccaagcgacagttgtttcttcttccgggtgggttggagcgccatctcaaaatcaagacctgtaccgttgctcttgacgttgtagaagagatctgtgcagaaatggcactcacccgtcccgaagcctttaatgaatacgttatatttgtagtcacaaatcgcggtggcaagagcagatctacttctcagccctccagcaccgtacagaggcaggctagacccggatccacttggagtgccagcactggctctagacaccgcaggtccgcgcctactaggccagtaccatcattctgggcctcgtctgccccttatctctgctccgctcctccttccagttcaagtcgggcagcagcgaccttactgtgccagccccttgcctccttgccttcaactactatggcttcaactttttcagcacaaagactcatgtag

SEQ ID NO: 231673 - DNA, 429 bp, synthetic construct
  misc_feature 1..429: note = Description of Artificial Sequence: Synthetic coding sequence
  source 1..429: mol_type = other DNA
atggtgaaaggcggtcaggaagcaggagggcagctgcgcgtcctgagggcttactccttcgcagacatactgttcgtcactatgccttcacaaaacatgcttgaattcaacctggccagcgaaaaagtgatacttttttctgcccgagcccaccaggtgaaaaccctggtcgatgactttatcctggagcttaagaaagacagtgattatgtggtagctgtcagaaatttcttacccgaagatcctgctctgttggcatttcataagggggatatcattcatctccagccattggaaccgcctcgggtcggatactcagctgggtgtgtggtgcgacgtaaggtggtatacctagaggaacttcggagacggggtccggattttggggtttgcccaaggacatggaatccaataaggggggcttcttag

SEQ ID NO: 231674 - DNA, 6164 bp, synthetic construct
  misc_feature 1..6164: note = Description of Artificial Sequence: Synthetic coding sequence
  source 1..6164: mol_type = other DNA
atgttcaacctgatgaagaaggacaaggacaaagatggaggacgcaaggagaagaaggagaaaaaagagaaaaaggagcggatgagtgcagcagaactcaggtctctggaagaaatgagtctgcggagaggtttcttcaatctgaacaggagtagcaagcgggagtcgaagactcgactcgaaatcagtaacccaataccaattaaagttgcttctgggagcgatctccacctgaccgatattgacagcgacagtaacaggggatccgtgattctggactccggacatctgtcaactgcaagttcctccgacgacttgaagggagaagaaggctcattccggggaagcgtgctccagcgggctgccaagtttggtagtctagcaaagcagaacagccagatgattgtgaaaagattctcgttctcacagaggtcgagagacgagtccgcatctgagacaagtactccttccgaacactcggcagcaccctcaccccaggtggaggttcgcactcttgaggggcagctggtccagcaccctgggccaggcattcccaggcctgggcatagaagccgggctcctgaactggtgacaaaaaagttccccgtcgacctgaggttgcccccagtcgtccccctgccaccgcctacgctgcgagagcttgagctgcaaaggaggcccacgggcgatttcggattcagccttaggcgaactactatgcttgaccgaggccctgagggccaggcctgccgccgagtggtgcacttcgccgagcccggtgcaggtaccaaggatttggcgctaggactggttccaggggaccggctcgtggagattaatggacataatgtagaatcgaagagcagggatgagatcgtcgaaatgataagacagtcgggtgactctgtgcgactcaaagtgcaaccaattcctgagctctccgagctgtcccgcagctggctgcgctctggcgaaggtcctcggcgagaaccatcagacgccaaaacagaggagcagattgccgcagaagaggcttggaacgagacagagaaagtatggcttgtccatagagatggcttctcacttgccagtcagctcaaaagtgaggagctgaacctccctgagggaaaagtgcgagtcaagctggatcatgacggtgctattctcgatgtggatgaggatgatgtagagaaggcgaatgccccatcctgtgatagattggaggaccttgcatctctcgtgtatctcaacgaaagttcggtgctgcacacgctaagacagcggtacggcgcatctttgcttcatacctacgccggaccctctctgctggttctgggtccgaggggtgccccagccgtgtattctgaaaaagtgatgcacatgttcaaggggtgtcggcgagaagacatggccccacacatctacgcagtggcccagacggcgtatcgggctatgcttatgtctcggcaggatcagtccatcatcctgctgggctcctccggcagcggaaagaccacctcatgccagcatcttgtccagtacctcgcgaccatagccggaatttctggcaacaaggttttctccgtggagaagtggcaagctttgtacaccttgttagaagcttttggcaattccccaactattataaacggcaacgctacccggttttcgcaaatattatccttggattttgaccaggcgggacaagttgcaagcgcctctatccagacaatgttgttggagaagctgagggtcgctagacgtcctgcttccgaagcaacattcaatgttttttattaccttctggcctgcggggacgggaccctcagaaccgagctgcacctgaatcacttggctgagaacaacgtgttcggtatcgttcccctagcaaagccagaagaaaaacagaaggcagcacagcagttcagtaaactgcaagcagccatgaaggtgctgggtatatccccggacgagcaaaaggcatgctggttcatcttggccgctatctatcacctcggggcagccggtgcgaccaaagtccactctactgcgggtcggaaacagtttgcgaggcatgagtgggcccaaaaagccgcttacttactgggatgctccctggaagaattgtcctccgctatcttcaagcatcaacataaagggggaaccctgcagcgctccacctcatttagacagggacctgaagaaagtggcctgggtgacgggaccggtcctaagctcagcgcactcgaatgcctggagggaatggccgctggcctgtactccgagctgtttaccctgttggtgagcttggttaatagagcacttaaatccagtcaacactctttgtgctccatgatgatcgtcgacaccccagggttccaaaaccccgaacagggcggttcggcccgtggggcttcattcgaagaattgtgtcataattatacgcaggataggctgcagagattgttccatgaacgcacgttcgtgcaagagttggagagatacaaggaggaaaatattgaactggccttcgatgaccttgagccgccaaccgacgattcggtcgccgctgtcgatcaagcaagccatcaaagtctggttcgaagcctggcacgcacagacgaggcgagagggctcctctggttgctggaagaggaggccttggtgcccggtgcctcagaagatacgctgctagagcgccttttctcttactacggtcctcaagaaggggataaaaagggtcaatcaccacttctgcattcatctaagccgcaccactttttactaggccattcacacggcactaactgggtagaatataatgtaacgggctggttgaactacactaagcagaaccctgccactcagaacgctccaagattgctccaagactctcagaaaaagatcatctccaaccttttcttgggcagagcaggcagcgccacagtcttatcgggctctatagctgggctagaaggcggatcccagctggccctgcgtcgtgctacatcaatgcgcaaaacctttaccaccggcatggcagcagtcaaaaagaagtccctttgcattcagatgaagcttcaggtcgatgcactgatagatacgatcaagaaaagcaaactgcacttcgtgcattgttttctcccagtcgcagaaggctgggctggggagcccaggagcgcatcttcgagaagggtgtctagctcttcagaactggacctcccatcaggagaccattgcgaggccggactcctgcagctcgatgtgcctttgttgcgcacgcagctgcggggttccagacttctggacgcaatgagaatgtatagacaggggtacccagaccatatggtctttagcgagttcaggcgccgattcgacgttctggcgccacacctgacaaagaagcatggacgtaactacatcgtcgtagatgagaggagggccgtcgaggaactgctggaatgtctcgacttagagaagagttcctgttgcatggggctttcgcgggtatttttccgcgcaggaacactggcacgactggaggaacagcgggatgagcaaacgagcaggaatctaacgctcttccaggccgcttgtagaggatacttggcccgacaacattttaaaaaacggaaaatccaagacctcgctatccgttgcgtacagaagaacatcaaaaagaacaagggtgttaaggattggccctggtggaagctttttaccactgtgcggcctctgattgaggtccagctgagcgaggagcagataaggaacaaagatgaggagattcagcaactgcgcagcaaacttgaaaaagcagaaaaagagcgaaacgagctgaggttgaattctgaccgcctcgaaagtagaatcagcgaactaacgtctgaactgacagacgagcgcaataccggggaatctgcttcccagctgctggacgccgaaaccgctgagcgcctgcgtgccgaaaaggagatgaaggaactccagacccaatatgatgcactgaagaagcaaatggaagtcatggaaatggaggttatggaggcccgattaataagggccgctgaaattaatggagaagtagatgacgatgatgcagggggagagtggcgcctaaaatacgaaagagctgtcagagaggttgattttactaaaaaacgtctccagcaggagtttgaggacaagctggaagtggaacagcagaataaaagacagctggagcgccgtttgggcgatttgcaggccgactcagaggagtctcagcgggctctgcagcagctgaagaagaagtgtcagcgactgacagctgagctgcaggacacaaagctgcatttggagggccagcaagtacggaatcatgagcttgagaagaaacagcggagatttgatagtgagctttcccaggcccatgaggaagcgcaacgagagaagttgcagagagagaaactgcagcgagagaaagatatgctgttggcggaagccttcagcctcaaacaacagctagaggaaaaagacatggatatagcaggatttacccagaaggttgtatctttagaagcggagctgcaggacataagttcccaagagtctaaagacgaagccagcctggctaaagttaagaaacaactaagagatctggaggccaaagttaaggatcaggaagaggaactcgacgagcaagcaggtacgattcagatgctggagcaggccaaattgcgcctggaaatggaaatggagagaatgcgccagacacactcgaaggagatggaatcacgggatgaagaagtggaggaagccaggcagtcctgtcagaaaaaattaaagcaaatggaggtgcagttggaggaggagtacgaagacaaacagaaagttttgcgagagaaacgagaacttgagggcaaactcgctaccctctccgaccaggtcaatagacgcgatttcgaatctgaaaaaagactgaggaaggatcttaaaaggaccaaggcactcttggcggacgcccagctgatgctggaccacctcaaaaactcagcccctagcaagagagagatcgctcagttgaaaaatcagctggaggaatccgagttcacctgcgcagcagctgtcaaagccagaaaggcgatggaggttgagatagaggacctgcatctgcagatcgacgatatcgccaaggccaagaccgctctcgaggaacagctaagccggctacagcgggagaaaaacgaaatacaaaaccggctcgaagaggaccaggaagacatgaacgaactaatgaaaaaacacaaagcagccgttgcacaggccagtcgcgatcttgcacagattaacgatctgcaggcccagctcgaagaagcgaacaaagagaagcaggaactccaggagaagctgcaggcactgcagtcacaggtcgagtttctggagcaatccatggtcgataaatctctggtcagtcggcaagaggcaaaaatcagggagctggaaacgcggctggagtttgagcgtacacaagtcaagcgcttggagtcattggcgtctcgcctcaaggaaaacatggagaaattaacggaggagagagatcagcgtatcgctgccgagaaccgggagaaagagcagaataagcggctacagcgacagctgcgcgacacaaaagaggagatgggtgaattagcgaggaaagaggccgaggcctcaagaaagaagcatgaattggaaatggacctggaatcactggaagcggctaatcaaagcctgcaggccgacctgaaactagcctttaagcgcattggcgacctccaggccgcaattgaagatgagatggaatccgatgagaacgaagacttaattaattccctccaagatatggtgaccaaataccagaagagaaaaaataagctcgagggtgattccgatgtggactctgagctggaggaccgcgtggacggggtgaaatcatggctttcaaagaataaaggcccttccaaagctgcttctgatgacggtagcttgaaatcgtctagccccaccagctactggaagtctctcgcccctgataggtcagatgatgagcacgacccgttagacaatacctccaggccacgttattcccactcttacctgtcagattccgatacagaggcaaagctaaccgagaccaatgcata

SEQ ID NO: 231675 - DNA, 6008 bp, synthetic construct
  misc_feature 1..6008: note = Description of Artificial Sequence: Synthetic coding sequence
  source 1..6008: mol_type = other DNA
atgtttaacctcatgaaaaaggacaaagataaggatggcggaagaaaagagaaaaaggaaaaaaaagaaaaaaaagagagaatgagcgccgctgagttgcggtcgttggaagaaatgtccctccggagaggatttttcaatctgaacagatcctcgaaaagggagtccaaaacgcgcctggagatctccaaccctatcccaattaaggttgcctccggctctgatttgcacctcactgatatcgactcagacagtaaccggggaagcgtgatcctcgattccggtcatctctctaccgccagttcgagcgacgatctcaaaggggaggagggcagtttcagaggctccgttctgcagcgcgctgcgaaattcggttctctggctaaacagaattcacaaatgatagtgaagcgcttttctttttcccagcggagcagagacgaatccgcaagtgaaacaagtaccccctctgagcactctgccgctccgtccccacaggtggaagttcgaacgctcgagggccaattagtgcagcatccaggcccaggaatacccaggccgggacaccggtctagggcacctgagctcgttacaaagaagtttccggttgacttgagacttccccctgtggttcctcttccaccgcctaccctgcgtgaacttgagctacagagacggccaactggtgactttggatttagccttcggaggacgacaatgctcgataggggtcccgaaggtcaggcatgtcgaagagtcgttcattttgccgagcccggtgctggtacgaaggacctcgcactcggattggtgcctggcgaccggctcgtagagatcaatggacacaacgttgaaagcaaaagtcgggatgaaattgtggagatgatccgacaatcaggcgatagcgtgaggctgaaggtgcaacccattcccgaactgtccgagttatcaagatcttggctccgctcaggagagggtcctcggagggaaccgtccgacgctaagacagaagagcagatcgcagccgaggaagcctggaatgaaactgaaaaggtgtggctggtgcaccgcgacggcttcagtcttgccagccagctgaaatccgaggagctcaaccttcctgaaggcaaagtaagagttaaactggatcacgatggggcaatcctggatgtagacgaagacgacgtcgagaaagccaacgcaccttcttgcgataggttagaagacctcgcatcactagtgtacctgaacgaatcaagtgtgctgcacacattgcggcagcgatacggcgcatcgctgctccatacgtacgcgggtcccagcttgcttgtgttgggaccacggggagcacctgccgtgtactcagaaaaggtgatgcacatgtttaagggttgtcgccgagaggatatggcgccacacatatacgctgtggcacagaccgcatatagggccatgcttatgtcaaggcaagatcagtcaataatcctgctgggctctagtggctcggggaagactacctcatgccagcatttagttcagtatctggccacgatcgccggaatcagcggaaacaaggtgttctccgtggagaaatggcaggcactctacaccctcctggaagccttcggcaattcgcctactattatcaacgggaatgccaccaggtttagccaaattctttcactagacttcgatcaggccggacaggtggcatctgcatccatacagaccatgctgctggagaagctgagggtggctcggcgacctgctagtgaggccacgtttaacgtattctactacctgcttgcctgcggcgacggtaccctgcgaaccgagctccacctaaatcatttggcagagaacaacgtctttggtatcgtgccgcttgctaagccagaagagaagcagaaggcggctcaacaatttagcaaactgcaggccgctatgaaggtcctggggataagcccagacgagcaaaaggcctgctggtttattctggccgcaatctaccacctgggagcagctggcgctactaaggtgcatagcacagcagggaggaaacagttcgccagacatgagtgggcacaaaaggctgcctacctgttgggttgctctctcgaggagctcagctccgctatctttaaacatcagcacaagggaggcaccctgcagcgcagtacgtccttccgtcagggacctgaggagtctggacttggcgacggcaccggtccaaaactctcagcacttgaatgtctggaaggcatggccgctggtctgtactcagagctcttcacgcttctggtgtctttggttaaccgagccttgaagtcttcacagcattcactttgctctatgatgattgtagatacacccggattccagaacccggagcagggcggttcagccaggggggcttccttcgaagagctgtgtcacaattatacgcaggatagactacagcgcttgtttcacgagaggacattcgttcaggagcttgagaggtacaaggaggaaaatatcgagcttgcctttgatgacttggagccaccgactgatgatagtgtggcagctgtggatcaggcctcacaccagagcctcgtacgatctttagcacggactgatgaagctaggggcctactgtggctcctagaggaagaagctcttgtgccaggcgcatccgaggacaccctgcttgagcgtcttttctcttactacggtccccaggaaggcgataagaaaggacagtccccattgctccattcttcaaaaccccaccactttctgctcggtcattcacacggcaccaattgggtggagtacaatgtgaccggctggttaaactatacgaagcagaaccccgcaactcaaaatgcaccacgtcttctgcaggacagccagaagaagatcatctctaacttgttcctgggaagagcaggatcagcaacagtgctatctgggagcatcgccggactcgagggaggctcccaactggcgctccgtagggctaccagtatgaggaagacctttacgactggcatggccgcagtgaaaaaaaagtcactgtgcatccagatgaagctgcaggtggatgccctgattgacacaatcaagaaaagcaaactccatttcgtgcattgctttctcccggtggcggaggggtgggctggcgaaccacgcagcgctagttcccgtcgtgtgtctagctccagcgaactggacctgcccagcggggaccattgtgaagcgggactactgcagttggacgtgcccctgctgagaacacaacttcgagggagccgcctgttggacgcaatgaggatgtatcgacagggttaccctgatcatatggtcttctcggaattcaggcggaggtttgatgtgctggcaccacatctcacaaagaagcatggacgaaattacatagtggttgacgaaaggagggccgtcgaggaattactcgaatgcctggatctggaaaagagctcttgttgcatggggctcagcagagtgttctttcgcgcaggcacgctggctaggctagaggagcagagggacgagcaaaccagtcggaacctcaccttgtttcaggccgcttgccgaggctacctggcaagacagcatttcaaaaagagaaagattcaggatctcgccattcggtgcgtgcagaagaatatcaagaaaaacaaaggcgtgaaagactggccctggtggaagttattcacgaccgtgagaccacttatcgaggtccaactgtctgaagagcagatccggaacaaggatgaggagattcagcagctgaggagcaaactggagaaggctgagaaggaacgcaatgagctccggctgaattcagaccgcctggagtctcggatcagtgagctgacaagcgaattaacagatgaacggaacacaggcgaatccgccagtcagctcctggatgctgaaaccgcagagagactgagagctgaaaaagagatgaaagaattgcagacccagtacgatgccctaaagaagcagatggaagtgatggaaatggaggtaatggaggcacggctgatccgagctgccgaaattaacggtgaggtagatgacgacgacgctggaggcgagtggcgactgaagtatgaacgggctgtgcgggaagtggatttcacaaaaaagcggctccagcaagaattcgaggataaactcgaggttgagcagcaaaacaaacgacaactagaaagaagactcggtgacctccaagccgacagcgaagagtcacagagagcccttcaacaattgaagaagaagtgccaacgattaactgctgagctccaggacaccaagctccatttagaaggccagcaggtccgtaaccacgagcttgagaagaagcaacgacgctttgattctgagctttcccaggcccacgaagaggcccaacgcgagaagctgcagagagaaaaactccagagagaaaaagacatgctgctggccgaggcgttctctctgaaacagcagcttgaagaaaaggatatggatattgccggtttcactcagaaagtcgtgtccctggaggctgaactgcaggacatttcctcgcaggagagcaaagatgaggcttcactggccaaggtcaaaaagcagcttcgggaccttgaggcaaaagtgaaggatcaggaggaggagctggacgagcaggctggcactattcagatgctcgagcagttgaagcagatggaggtgcagctggaggaggaatatgaggataagcagaaggtcctgcgcgaaaaacgagaactggagggcaaactagctactttatctgaccaggtgaacaggcgtgatttcgagtccgagaaaaggttaagaaaggatttgaaaagaacaaaggccttgctggccgacgctcagctgatgctggaccacttgaaaaattctgctccatctaagcgagaaattgcacaactgaaaaatcagcttgaggagagcgaatttacttgtgctgcagctgtcaaagcgagaaaagcaatggaggtggagatcgaagacctgcatctgcaaatagacgacattgctaaggctaaaactgccctcgaagagcagttaagtagactccagcgcgagaaaaacgagatccaaaaccggcttgaagaggatcaagaagacatgaacgaattgatgaaaaaacataaagccgctgtcgcacaagccagcagggacctggcccagattaatgatctgcaggcccagcttgaggaggctaacaaagaaaagcaggaactccaggaaaaactgcaggccctgcagagccaggtggagttcttggagcaaagtatggttgataagtctctcgtgtcccgtcaagaagccaagatccgagagcttgagaccagattagaatttgaacgtacacaggtgaagcgcctggaatccctcgccagccggctgaaggaaaatatggaaaagctcacagaagagcgcgatcagcgcattgctgccgaaaatagagagaaggaacagaataagcgactgcagcgccaactgcgcgatacgaaagaagaaatgggcgagttagcaaggaaggaggctgaagcaagccgaaagaaacacgagttggagatggatctggagagcctggaagccgctaatcagagcttgcaggctgatctgaaactcgcgttcaagagaatcggagatctgcaggccgcaatagaagatgaaatggaaagcgatgagaacgaggatttaatcaatagcgagggggactccgacgttgactccgaactggaggatcgtgtcgatggggtcaaaagctggctcagcaagaataaaggacccagcaaggcagcctctgacgacggtagcttgaagtcttcgagccccacatcgtactggaaatctttagcgcctgatcggtcagatgatgaacacgaccctctggacaacaccagcagacccaggtattcacatagctatctgtctgactccgacacagaagccaagctgacagagacgaacgccta

SEQ ID NO: 231676 - DNA, 4929 bp, synthetic construct
  misc_feature 1..4929: note = Description of Artificial Sequence: Synthetic coding sequence
  source 1..4929: mol_type = other DNA
atggaggggcctagaacaacaaagttggaggggtcaagcaaagagggcagcggtccgagtcgttcacctcaacctccaacatcacccatccctcccgagacaagccagcgagccagaagtcctgctccgacacttgccatgaacggacctggggctgcaactgccgagggtttgagcgaagaggcacccgctgtctactcggaaaaagttatgcatatgttcaaggggtgcagacgagaagacatggcccctcacatttacgcagttgcgcagaccgcctaccgggcaatgctgatgagtagacaggaccagtcgatcattttgcttggcagctctggtagcggcaagacaacctcctgccagcatcttgttcagtacctggccacaatagctggcattagcggcaataaggtcttcagcgtcgagaaatggcaagcactttacaccctactggaggcattcgggaactctcccactatcattaacggaaatgccactcgtttctctcagatcctctctctggattttgaccaggctggccaggtcgctagtgcatctatacagactatgctgttggaaaagctgagggtggcccgaaggcccgctagcgaggccaccttcaatgtgttttattacttactcgcatgtggtgatggcacgcttcgcactgaactccatctaaatcatctggccgagaataatgtgtttggaattgtgcccctggcaaaaccggaggaaaagcagaaggctgctcagcagtttagcaagcttcaggctgccatgaaggtgctaggcatctcaccggatgagcaaaaggcatgctggtttattctggcagccatttaccatctcggcgcagcaggggcaacaaaggaagccgcagaggccggacggaaacagttcgccaggcatgagtgggcgcagaaggccgcatatttactgggttgtagccttgaggaactatcttccgccattttcaaacaccaacacaaaggcggtacactccagaggagcaccagcttccggcaaggccctgaagagagtggcctcggcgatggaacagggcctaaattaagcgcgctggaatgcctggagggtatggctgcaggcctgtactctgagctattcaccctgctcgttagcctagtcaatcgggcattgaaaagcagtcagcatagcctgtgctccatgatgatagttgatacgccaggttttcaaaacccagagcagggtggcagtgcacgtggcgctagtttcgaggagctgtgtcacaactacacgcaggatcgactacagagactttttcatgaacgtacctttgtccaagaactggaacggtataaggaagaaaacatcgaactcgctttcgatgatctggagccacccacagatgatagtgttgcagccgtagatcaggccagccatcagtctcttgtgcgctcccttgctcggactgatgaagccagaggtctgctgtggttgctcgaagaggaggccttggtgcccggagctagcgaggacaccttacttgagcgcctgttcagctattatggaccacaggagggagataaaaaggggcagagtcctctcctgcactcttcaaaaccacaccactttttgctgggtcactcccatggcaccaactgggtcgagtacaatgtcaccggatggttgaattacactaagcagaatccagcaacccagaacgccccacgcctgcttcaggacagccagaagaagatcatctcgaatttattcctaggacgggctgggtctgccactgtcctgtcaggatccattgcgggtctggagggcggaagtcagctggcactcaggcgggctacgagcatgagaaaaacattcacaaccggcatggcggcagtgaaaaaaaaatccctgtgcattcaaatgaagctccaggtcgacgctttaatcgacaccataaagaagtcaaagctgcactttgtgcactgttttctgcctgttgccgagggatgggcgggtgaacctaggtcagcttcctcaaggagggtcagttccagcagtgagttggatcttccatcaggtgaccactgtgaagcaggcctgctccagcttgacgtgcccctgcttcggacacagctgcgcggaagcagattgttggacgccatgcgcatgtatcgtcaaggctaccctgaccatatggtgtttagcgaatttcgtagaaggtttgatgtgctggcacctcatctgaccaagaaacacggtagaaattacatcgtagtagacgaacggagggccgtcgaggaactgcttgagtgtctggacctggagaagagctcctgctgcatggggttgtcccgcgtgttttttcgtgccggaacactcgcaaggctggaggaacagagggatgaacagaccagtcgaaatctgaccctatttcaggctgcttgtcgcggatatctcgctagacagcacttcaaaaagcgcaaaatccaggacctggccatccgttgtgtccagaaaaatataaaaaaaaataagggggtgaaagattggccatggtggaagctgttcacaaccgtccgacccctgattgaagttcagctgtccgaagagcaaattcgcaacaaggacgaagaaatccagcaactgcggagtaaactggaaaaagctgagaaagagaggaacgagttacggctgaattctgaccggctcgagtctcgcatctcagagctaacatctgaactgaccgatgagcggaacacaggggaatctgcctcacagctgctggatgcagaaaccgctgagcggctgcgggcagagaaagagatgaaagagctgcagacacagtacgacgcactgaagaaacaaatggaggtgatggagatggaagttatggaagccagacttatccgagcagccgaaatcaacggtgaagtcgatgacgacgatgcaggcggagaatggcgcctcaagtatgagagagctgtgagggaggtagactttaccaaaaagcggctgcagcaggagtttgaggacaagctcgaggtggagcaacagaacaaacggcaactggagcgacgattgggcgatttgcaggcagattcagaggagagccagagagctctgcagcaactaaagaaaaaatgtcagcgactaacggccgagctgcaagacacaaagctgcacctggaagggcagcaggtgagaaaccatgagctggagaagaagcagcgcaggtttgacagcgagctcagtcaggcccatgaggaagcccagcgggagaagctgcagagggagaaactgcagcgagaaaaggatatgcttctcgctgaggccttttctctcaagcagcagttagaggagaaggacatggacatcgccggtttcacccagaaggtcgtttccctcgaggcggaactacaagacatttcgtcccaagagtccaaggatgaggcatcgctggccaaagttaaaaagcagctgagagatctggaagctaaggtgaaggatcaggaggaagaattggacgagcaagccaaactgaggttagagatggaaatggagcgtatgcggcagacgcactccaaggagatggagtctcgcgatgaagaagttgaagaagcccgacagtcttgtcagaaaaaactcaaacaaatggaagtgcaactggaagaggagtatgaggacaaacagaaagtgctccgcgaaaaacgtgaactcgagggaaaactggccacactcagcgaccaagtcaatcgtagagattttgagtctgaaaagcgccttaggaaggatcttaaacgtacaaaggctctgctggctgatgctcagttaatgttggatcacctgaaaaattctgcccctagcaaacgggagatagcccagctgaagaatcagttggaagaaagcgaatttacctgcgcggctgccgttaaggctcggaaagctatggaagtcgagatcgaggacttacacctacaaatagacgacattgccaaagcaaagaccgctctggaagaacagctgtcaagattgcagagggagaagaatgagattcaaaaccgccttgaagaggaccaagaggatatgaacgagctgatgaaaaaacacaaggccgctgtggcgcaggcctcccgggatctcgcacaaataaatgatctacaggcacaactggaggaggccaataaagagaagcaggagttgcaggagaaactgcaagcactgcagtctcaggtcgagtttctggaacaaagtatggtcgataagtccctcgtgtccagacaggaagcgaagatccgggagctggaaactagactagagttcgaaagaacccaggtgaaacgactagagtccttagcatcgcgactgaaggagaatatggagaaactgaccgaagagcgggaccagcgaatcgccgctgagaaccgtgagaaggagcagaacaaacgacttcagcgccagctacgtgatactaaggaggagatgggtgaacttgcccgtaaagaggcagaagcaagtcggaaaaaacatgagctggaaatggatctggaatctctggaggcggcaaatcagtccctacaggccgatctgaagctcgcatttaaacggatcggggatcttcaggcagcgatagaggatgagatggaaagcgacgagaatgaagatcttattaattctgaaggagactctgacgtcgacagcgagttggaagaccgggtggacggggtgaagtcttggctttcgaaaaataagggaccctctaaggctgcgagcgatgacggttcacttaagtcttcaagtccaaccagctattggaaatccctagctcctgatcgctctgatgatgagcacgacccattggacaacacatctcggcctcggtacagccatagttatctgtcagattccgatacagaggcaaaactcacggagacgaacgcttag

SEQ ID NO: 231677 - DNA, 6164 bp, synthetic construct
  misc_feature 1..6164: note = Description of Artificial Sequence: Synthetic coding sequence
  source 1..6164: mol_type = other DNA
atgttcaacctcatgaagaaggataaagataaggatggaggacggaaggagaagaaagagaaaaaggagaagaaggagcgtatgtctgccgcagaattgaggtcactcgaagagatgtcactaagaagggggtttttcaacctgaatcggtcttctaagcgcgagtctaagaccagacttgaaatatctaaccctatccctattaaagtggccagtgggtcggatcttcatctcaccgatatcgattccgatagtaatcggggtagcgtcatacttgactctggccatctttcgaccgcaagttcttctgacgacctgaaaggagaagagggatcctttagaggttcagtcctgcagagggccgctaagttcggctctctcgccaaacagaacagccagatgatcgtcaaacgtttttcattcagccaaaggtctcgagacgagtcagcatccgagactagtaccccatctgaacactcagctgctccttctccacaagttgaggtaagaaccttggagggtcagctggtgcagcatcctggaccaggaatccccagacctggacatcgttcccgggctccagaacttgtcacgaaaaaattccctgtggatcttcggctgccacccgtggtgcctctgccccctcccaccctgcgggaactggagctgcagagacgcccaacgggagactttggtttcagcctgcgtcgtacaactatgctggaccgaggcccagagggacaggcctgtagaagagtggtccacttcgctgaacccggagcagggacgaaggatctcgcactgggactggtgcctggcgaccgtctggtggagatcaatgggcacaatgtcgaatctaagtctcgcgatgaaattgtagaaatgatccgtcagagcggcgactccgtacgccttaaggttcagccgatccccgaactttctgaactgtctcgttcctggctgaggagcggcgagggaccaaggcgggagccgtccgacgccaaaaccgaagagcagattgccgctgaagaagcttggaatgagaccgagaaagtatggctggtccaccgggacggcttcagcctggcttcccagctcaaaagtgaggagctgaacctgcccgagggcaaggtcagagtgaaactggatcacgacggcgcaattctggacgtcgatgaagacgatgtggaaaaagcgaacgctccatcgtgtgatagactggaggacctggccagcttagtgtacctaaacgagagctctgtgctgcataccctccgccaacgctatggggcaagtctgctgcacacttatgctgggccaagcctgctggtgttaggtccaaggggggcacccgctgtgtatagtgaaaaagtgatgcacatgttcaagggttgccggagggaggacatggctccgcatatttacgccgtggcccagactgcatatcgagccatgctgatgtcacgtcaggaccagagcattatcctccttggatcctcaggctcaggcaaaactacaagctgtcagcatttagtgcaatacctggccaccattgctggcatctcaggcaacaaggtgttttccgtagaaaagtggcaagctctgtacactctgctagaggctttcggtaatagtccaaccattataaatggtaacgcgacccgcttttctcagattcttagtttggattttgaccaggccggacaggtggcgtccgcctccatccagacgatgttactggagaaattgcgtgtcgctcggaggcctgcatccgaggccactttcaatgtcttttattacctcctggcctgcggcgatggaaccctacggacagagctacacctgaaccatttagccgaaaacaatgtctttggcattgtgcccttggctaagccagaggaaaagcagaaggcagctcaacagtttagtaaactgcaagctgccatgaaagtactcggaatcagccccgacgagcagaaggcatgctggtttatcctcgcggcaatttaccatttgggcgctgcgggagccactaaggaggcagctgaggccggaaggaaacaatttgctcggcatgagtgggcacagaaggcagcctacttactcggttgcagcctggaagaactctcctctgctatttttaaacatcagcacaaaggcggaacgctacagaggtcgacttcctttcggcagggtcctgaggagagcggactgggggacggaaccggcccaaagctaagcgctctcgagtgccttgagggtatggctgccggtctctattccgaactgttcaccctgcttgtaagcttggtcaatcgtgccctcaaaagctcacagcacagcctttgttccatgatgatagtggacacacccggtttccagaaccccgagcagggtggctccgctagaggtgcgagttttgaggagctgtgccacaattatacacaagatcgcctgcagcgcctctttcacgaaagaaccttcgtacaggaattggagagatataaagaggagaatattgaactcgctttcgacgacctggaacctccaaccgatgacagcgttgccgctgtggatcaggctagccaccagagcctcgtgagaagtctggccaggaccgatgaagcaagaggtctgctctggctcctggaagaggaagctcttgtaccgggtgccagtgaggacactctgctggagcgtcttttttcttactacggacctcaggagggggataagaaggggcagtccccattattacacagctccaagcctcatcactttcttttgggccactcccatggtaccaattgggtcgagtacaatgttaccgggtggctaaactatacaaagcagaatccggctactcagaacgcccctagactgctccaggacagccagaaaaagattataagtaacctatttttgggtcgggctggttcggccaccgtgctgtcgggtagtatcgcaggcttggagggcggatctcagttagccctgcggagagcgaccagtatgcggaaaaccttcacaactgggatggctgccgtgaaaaagaaatccctgtgcatccagatgaagcttcaggtcgacgccctgatagacactataaagaagtcaaagctgcactttgtgcactgcttcttgcccgtggccgagggatgggccggagagccacgcagtgcctcttcacgccgtgttagctctagttctgaactggacctaccttctggggaccactgtgaggctggtcttttgcagctggatgttccactgttgcggactcagttgcgagggagtcgcctgctagacgctatgaggatgtaccggcagggctaccctgaccatatggtgttcagtgaatttagaaggaggttcgatgtgctcgctcctcacctgactaagaagcacggcaggaactatattgtggtagatgaaagaagggctgtggaggagctgctcgaatgcctagacctcgagaaaagctcatgttgtatgggactcagtagagtgttcttccgggctggtacactcgcgagactggaggagcagcgagatgagcagaccagccggaacctgacgttatttcaggcagcatgccgcggatatctggccagacagcattttaaaaaacgaaagatccaagacctcgcaattagatgtgtgcagaagaacataaagaaaaacaaaggtgtcaaagactggccgtggtggaagctcttcaccactgtgcgcccactcatcgaggtccagttaagcgaagagcagatccgaaataaagacgaggagatccagcagctcaggagcaaattagagaaggcggagaaggagcgcaacgagctacggctgaactctgatagactcgaatcgaggattagcgagttgacgtctgagctaaccgacgagagaaatacaggcgagagtgcatcccaattacttgacgcagaaacagctgaacggctgcgggctgaaaaagaaatgaaggagcttcagactcagtacgacgccctgaagaaacagatggaggttatggagatggaggtcatggaagcaagactgattagggctgccgaaatcaatggagaggtggacgatgacgatgcgggtggggaatggaggctaaagtacgagcgtgccgtgagagaagtcgatttcaccaaaaaacggctgcagcaggaattcgaggacaaactggaagtcgagcagcagaacaagcggcagctggaacgcaggctcggagatctccaggctgattccgaagaaagccaacgcgctttgcagcagctgaagaagaaatgccaaagactcacagccgagctgcaggacactaagctccacttggagggacagcaagtgcgcaaccacgagctagaaaaaaagcagcgacgctttgatagtgagttatctcaggctcatgaggaggctcaacgcgaaaagcttcagcgtgagaagctgcagcgggagaaggacatgctgctcgcggaagccttttctcttaaacagcagctggaggaaaaagacatggatattgctggcttcactcagaaagtcgtaagcctggaggcagaacttcaggacataagcagccaagaatccaaagacgaggcctccctggccaaagtgaaaaagcaactgcgagatctggaagccaaggtgaaagaccaagaagaagaacttgatgaacaagcaggtaccattcagatgctggagcaggcaaagttgcggctggagatggagatggagaggatgaggcagacgcatagcaaagaaatggagagccgggatgaagaggtcgaagaagctcgccaatcctgccagaagaaactaaaacagatggaggttcaactggaagaggagtacgaagataaacagaaggtactgagagagaagcgcgagctagaaggaaaacttgctactctgagcgatcaggtaaatcggagagactttgagagtgagaaacgccttcggaaagacttaaagcgcaccaaggcactgctggccgacgcccagctgatgttggatcacctgaagaattctgccccatctaaacgcgagatcgcacaactgaagaatcagctggaggagtctgagttcacttgtgctgcagccgtgaaggccagaaaggcaatggaagtggagatcgaggacctgcacttgcagattgacgacattgcaaaggcaaaaaccgccttggaagagcagctaagtcggctccagagggaaaagaacgagatccagaatagactggaggaagatcaagaagatatgaacgagttaatgaagaagcacaaggccgcagtcgcccaggctagccgcgatctggcccaaattaatgatctgcaggcgcagctggaagaagccaataaagagaagcaggagctgcaggaaaagcttcaagcccttcagtcccaggttgagttcctggagcaaagcatggtggacaaaagcctagtcagccgtcaggaggctaagatccgggaactcgagacacgccttgagtttgagcgcacccaggtgaaacgtttagagtccctggcgtcacgactgaaggaaaacatggaaaagctgacagaggagcgggatcagaggattgctgcggagaatcgcgaaaaggagcaaaacaaacgtctgcagcgccagcttagggatacaaaggaagaaatgggcgagcttgcaagaaaggaggctgaagcttctcgcaagaagcatgagttagagatggacctcgagagcttagaagcagcaaaccaaagcctgcaggcagacctgaaactagccttcaagcgaattggcgatttgcaggctgcaatcgaagacgaaatggaaagcgacgaaaacgaagatttgatcaattcattacaagacatggtgaccaaataccagaagagaaagaacaagctggagggtgatagcgacgttgactcagagctggaggatcgcgtagatggcgtgaaaagttggttgtcaaaaaataagggcccaagtaaggcagcctctgacgatggcagcctgaagtcgtcctcccctacatcctactggaaatccctggccccagacagaagcgacgatgagcatgatcctctggataataccagcaggccccgatattcacactcatatctgagtgattccgatacagaggccaagctgacagaaacaaacgccta

SEQ ID NO: 231678 - DNA, 2808 bp, synthetic construct
  misc_feature 1..2808: note = Description of Artificial Sequence: Synthetic coding sequence
  source 1..2808: mol_type = other DNA
atgaggatgtatagacaagggtacccggaccacatggtgtttagtgagttccgacgaaggttcgatgtcttagcacctcatcttaccaagaagcatgggaggaattacatcgtcgtggacgagcgcagggctgtggaagaactgctggagtgcctggatcttgaaaagtcctcttgttgcatgggcctgtcacgagtgttcttcagagctggtacactggcacgtctagaggagcagcgggatgagcagacatctagaaacctgacacttttccaagcggcttgtcggggttacctggcacgacaacacttcaagaagaggaagatccaagacctggcaatcagatgtgtgcaaaaaaatattaagaagaacaaaggggtcaaggattggccctggtggaagctgtttaccactgttaggcccctgattgaggttcagctgagcgaagaacagatacgcaacaaggatgaagaaatccagcaacttagaagcaagctggagaaggcagagaaagaacgcaacgagctccgattgaactcagacagacttgaaagcaggatctccgaactcacaagcgagctgacagatgagagaaacaccggtgagtcagcgtctcagctcctggatgccgagactgcagagcgtcttcgcgcagagaaggagatgaaagaacttcagacacaatatgacgctcttaagaaacagatggaagtcatggaaatggaagtcatggaggctagactcattcgggctgcagagatcaacggcgaggtggatgatgacgacgctggcggtgagtggcggttaaagtacgaaagagccgtgcgggaggtcgactttacgaagaaacgactgcagcaggagttcgaggacaagttggaagtggagcagcagaataagagacaactggagcgaaggctgggggacctgcaagctgactccgaggaatcccagcgggcactgcaacagctgaaaaaaaagtgtcagcggctgacagctgagctccaggacaccaagctccatctcgaaggccagcaggtgagaaaccacgagttggagaagaagcagcgtcgcttcgacagcgagttatctcaggcccatgaggaggcacagcgtgagaaactgcagagggagaagcttcagcgagagaaggacatgttgctagcggaagcattctctctgaaacagcaactcgaggagaaggacatggacattgcagggtttacacagaaggttgtgtcactcgaagcggaactgcaggatatctcttcacaagaatctaaggatgaggctagcttagctaaggttaagaaacagctgcgcgacttggaggccaaagtcaaagaccaggaagaggagcttgatgaacaggcagggacaattcagatgcttgaacaggccaagctcaggcttgagatggaaatggagcgaatgagacaaacccacagtaaagagatggaaagtcgggatgaagaggttgaggaggcccgacaatcttgtcagaaaaagctgaagcaaatggaggtgcagctggaggaagagtacgaggacaagcaaaaggtgctgagggagaagcgtgaactggagggaaagctcgctacattgtcagatcaggtaaaccggagagattttgaatctgagaaacgtctaagaaaggatctgaagcgcaccaaagcccttctcgcggacgcgcaacttatgctggatcacctaaagaactctgcacctagcaagagggaaattgcacagctgaagaaccaactggaggaatcagagtttacatgcgccgcagcagtcaaggctagaaaagctatggaagtggaaatcgaagatctgcatctgcagattgatgatatagccaaagcaaagaccgctctggaggaacagttgagccgcctgcagagagagaagaatgagattcagaatcggctggaggaggaccaggaggatatgaacgagctgatgaaaaagcataaggctgctgtggcccaagcatcccgagacttagcccagataaatgacctgcaagctcagcttgaggaagcaaacaaggagaaacaggagctgcaggagaagctgcaggcattgcagtcgcaggtcgagtttttagaacagtccatggtcgataaaagcctggtgtctagacaggaagccaagattcgggagctggaaactagacttgagttcgagagaactcaggttaagcgcctcgaatccttagcatcccggttgaaagaaaatatggaaaaattgacagaagagagagatcaaaggatagcagcagaaaatcgggagaaagagcagaataaacggctgcagaggcaactgcgagatacaaaggaagagatgggggaactagctagaaaggaggccgaagcctccaggaaaaaacacgagctcgaaatggacctcgaaagtctggaggctgccaatcagagcctgcaggctgatctcaaacttgcttttaagaggatcggagatcttcaggccgctatcgaagacgagatggagagcgacgagaacgaggatctgatcaacagtgaaggtgattctgatgttgattcagagctggaggatcgggtggatggagtgaaaagctggctatcgaaaaacaaagggccttcaaaggccgcttccgacgacggtagcctcaaatcatcttcaccaaccagctattggaagtctttggccccagacaggagcgatgacgagcatgaccccttggacaacaccagccggccaaggtatagccactcatacctttctgactccgacacagaagccaagcttacagagacaaatgcttag

SEQ ID NO: 231679 - DNA, 6119 bp, synthetic construct
  misc_feature 1..6119: note = Description of Artificial Sequence: Synthetic coding sequence
  source 1..6119: mol_type = other DNA
atgttcaacctgatgaagaaagacaaagacaaggacggcggacggaaggaaaagaaagaaaagaaggagaagaaggagcggatgtctgcagccgagttgaggagtctcgaggaaatgagtctacggagaggattcttcaatctgaaccgaagctctaaaagagaatctaaaaccaggctggagatctcaaaccccattccaatcaaagtcgccagcggttccgaccttcacctgaccgacattgactccgacagtaacaggggctccgttattctggactccgggcatctgtcaacagcttccagctccgacgacctgaagggggaagagggcagcttccgtggcagcgtgttgcaaagggctgccaagtttggaagcttagccaaacagaacagccagatgatagtgaagaggtttagcttctcccagcggtctagagatgaatccgcctccgagaccagcactcctagtgaacacagcgccgcaccttcgcctcaagtggaggttcggacgctggaaggtcaactcgttcagcaccctggacccggaattcctcgaccaggccatagaagcagggcccctgagctggtgaccaagaaattccccgtcgacttacggctccctcctgtagttcccctgccccctccaacgctgcgagaactggaactgcaacgccgtccaaccggagatttcggctttagcctgaggcggactacaatgttggacaggggccctgaaggacaggcatgtaggcgtgtggtgcatttcgctgagcccggagcaggaacaaaggacttggcgttaggtctcgtccccggagaccgactggtggaaattaacgggcataatgttgagtccaaaagcagggatgagattgtcgaaatgattagacagagtggtgattctgtgaggctgaaagtgcagcccatccccgagctgtccgagttgtcccgaagttggctgcggtccggtgagggccctcggcgtgaacccagtgatgccaaaacagaagagcagattgcggcagaggaggcctggaatgagaccgagaaggtttggctggtgcaccgcgacggttttagcttggcttctcagctcaaaagcgaagagctgaacctcccagaaggtaaagtgcgtgttaaactggatcacgatggagccatcttagacgttgatgaggacgacgtggagaaagccaacgccccatcatgtgacaggttggaagacctggcaagcttagtttatctgaacgaatcctctgtcctacacacactcagacagcggtatggggcaagcctgcttcacacctatgccggaccatccctgcttgtcctgggacctcggggtgctccagctgtatactctgaaaaagtgatgcatatgtttaaaggatgtcgcagagaagatatggcccctcacatctacgcagtggcgcagactgcctacagagctatgctgatgagcagacaggatcagtcaataatcctgctgggatcctcagggagcggcaagacgacaagctgccaacacttggtgcagtacctagctaccattgccggtatctcaggcaataaagtcttctctgttgagaagtggcaggctttatatactttgttggaagcattcggaaacagtccaaccatcattaatggtaatgctactcggttttcccaaattttgtctctggacttcgatcaagctggacaggtggcttcagcatccatccagactatgttgctggagaagctgagggtagccagacgcccagcctctgaggcaaccttcaatgtgttttattatctcctggcatgtggggatggaactctccgcactgagctgcatctcaaccatctggcagagaataacgtgtttggaatcgtgcctcttgcaaagcctgaagagaaacagaaagccgcacagcagttctccaagctgcaggccgctatgaaagtgctaggaatcagtcctgacgagcagaaggcgtgctggtttatcctggcagctatataccacttaggtgccgctggcgcaacaaaagaggcagcggaggccggaaggaagcagttcgctcgacacgaatgggcccagaaggccgcttatttgctgggttgctcacttgaggagctgtcatcagccatttttaagcaccagcacaaaggtggcacattgcagcgcagcacttcatttcggcagggcccagaggagtcaggactcggcgatggaacagggcctaaactgtcagcgctggaatgtttggagggcatggccgcaggcctgtactcagaactattcaccctgctagtgtcattagtaaatcgtgcattaaaatcttcacagcactctctgtgcagcatgatgatcgtggacacacctggattccaaaaccctgagcagggagggtctgctaggggcgctagcttcgaggagttatgtcacaattacacacaagatcgcctgcagaggctcttccatgaacgcaccttcgtgcaggagcttgaacgctataaggaggagaacatcgaacttgcctttgacgatttggagcctccaacagacgatagtgtggccgctgtggaccaagctagtcatcaatccttagtacggagcttggcacgcactgatgaagctagaggactgctgtggttgctagaggaagaggctctggtgcctggggcaagtgaggatactctgctggagcggctttttagctattatggtcctcaggaaggcgacaagaagggtcagtcacctcttctccactccagtaagccacaccacttcctgctgggacactcacacgggacaaattgggtagagtacaacgttactggctggttgaattacactaagcagaatcctgcgactcagaatgcccctaggctcttgcaagattcacagaaaaagatcatatctaacctgttcctgggccgagccggttccgctaccgtcctatctgggtccatcgcgggactcgaaggcggtagtcagctcgctttgcggagagccacatccatgagaaaaacctttactacaggtatggccgctgtcaagaaaaagagcctgtgtattcagatgaaacttcaggttgatgcgctgattgacacaataaagaaaagcaagctgcactttgtgcattgttttttgcctgtcgcagaaggctgggccggagagccacggagtgccagctcccggagagtctcctcctcaagtgaactcgacttgcctagtggagatcactgcgaggctggcctcctgcagttggacgtaccccttctgcggacacagcttcgtggctcccggcttcttgacgctatgcgcatgtaccggcaggggtatccagaccacatggtgtttagcgagttccggaggcggtttgatgtgctagcccctcacttgaccaagaagcacggcagaaattacatcgtggttgacgagagaagagccgttgaagaattgttagagtgcctcgacctagaaaaatcaagctgctgcatggggctaagccgtgtcttctttcgcgctggcacactggccagactggaggagcaacgggatgaacagactagccggaaccttacccttttccaggcggcttgccggggatatctagctcgacaacactttaagaaaagaaaaattcaagatctggctatccgatgtgtacagaaaaacattaagaagaataaaggggttaaagactggccttggtggaaactcttcactacggtgaggccacttatcgaggttcaactttccgaggagcagatccgcaataaggacgaggagatccagcagctccgatctaaactagaaaaagccgagaaagaaagaaacgagctacggttgaattctgaccgtctggagtcgagaatttcagagcttacctctgaattgaccgatgaacggaataccggagaaagtgcttcccagcttctggacgccgaaaccgccgaaagattaagagccgagaaggaaatgaaggagctgcagacccagtacgacgcattgaagaaacaaatggaggtgatggagatggaggtaatggaagcgcgactaattagagccgcagagatcaacggggaggtggatgacgatgacgcaggtggcgagtggcgcctgaagtacgaaagagcagttagggaggtggacttcaccaaaaaaaggctgcagcaggagtttgaggacaagttggaggttgagcaacagaacaagagacagctcgagcgccgacttggagacctccaagcagatagcgaggagtcccagcgggcactgcagcagctgaagaaaaagtgccagaggctcaccgccgaattgcaggatacaaagttgcaccttgaaggtcagcaggtgagaaatcatgaactagagaaaaagcagaggcgctttgactcggaactgtctcaggcccacgaagaggcacagagagagaaactacagagagagaagctgcagcgggagaaagacatgctcctggctgaggcctttagtctgaaacagcagctggaggagaaggacatggatattgctggttttactcagaaagtggtaagcctggaggcggagttgcaggacatctccagccaggaatccaaggacgaggcttccctggccaaagtcaaaaaacagctgagggacctcgaagctaaagtgaaggatcaggaagaggagctcgacgagcaggctgggacaattcagatgctggaacaagcaaagctccgactggagatggagatggaaaggatgaggcagacacactccaaagaaatggaatccagggacgaagaagttgaagaggccaggcagtcttgtcagaagaaactgaaacaaatggaggttcagctggaggaggagtacgaagataagcagaaggtactgcgcgagaagagagaactggagggaaaactcgcgacattatctgaccaggtaaataggcgggacttcgagagcgaaaaaagattgcgaaaagatttgaaacgaaccaaagcgctcctcgccgatgcacagctgatgttggaccatctgaaaaacagcgcgccaagcaagagagaaattgcccagttgaaaaaccaattggaggaaagcgagtttacatgtgcagccgctgtcaaggcacgcaaagcaatggaggtggaaatcgaggatctccatttacagatagacgacatcgcgaaggctaagactgcccttgaggaacaactaagtagacttcagcgggagaagaatgaaatacaaaaccgattagaggaagaccaggaagatatgaacgagctcatgaaaaaacacaaagcagccgtggcacaggcaagtcgcgacctggctcagatcaatgatctgcaggcccagctggaagaggctaataaagaaaagcaggagctgcaggaaaagcttcaagccctccaaagccaggtggagttcctcgagcagagcatggttgacaaatctttggtgtctagacaggaggctaaaataagagagcttgagaccagactggagtttgaacggacccaggtgaagcgacttgaaagcctggcctcacgactcaaagaaaacatggaaaagctgacagaggagcgagatcagaggatcgcagctgagaaccgtgagaaggaacagaataaaaggctccaacgtcaactgagagacactaaagaagagatgggggagcttgctaggaaggaagccgaagcctctaggaagaaacacgagttagagatggatttggaatcgctggaagccgctaatcaaagcctacaagccgacttgaagctggctttcaaacggattggcgatctgcaggcagccatcgaagatgaaatggaaagtgatgaaaacgaagacttgatcaattctgagggcgattcagacgtggatagcgagctagaggatcgagtggacggagtgaaatcttggctcagtaaaaacaaggggcctagtaaggccgcatcggatgacgggagtctgaagtcttcatctcctactagctactggaagtccctggccccagaccgcagtgatgatgagcacgaccctctggacaacacaagcaggcctcgctattcccacagttacttgtccgacagtgacacagaggccaagttgaccgagacaaatgctta

SEQ ID NO: 231680 - DNA, 6008 bp, synthetic construct
  misc_feature 1..6008: note = Description of Artificial Sequence: Synthetic coding sequence
  source 1..6008: mol_type = other DNA
atgtttaatttaatgaaaaaggataaggataaggacggcggacgcaaggagaagaaggaaaaaaaggagaagaaggaaaggatgagtgccgcagagcttcgtagcctggaagagatgagtctaaggagaggctttttcaacctaaatagaagtagcaaaagagaatctaaaactcgactcgaaatttccaacccaatacctattaaggtagccagcggcagcgatcttcacctcacagatattgacagcgactcaaatcgcggaagtgttatcctcgatagtggccatctgtccaccgctagcagctccgatgacttaaaaggagaagaagggagttttagaggatctgtcctgcagcgggcagccaaattcggctccttagcaaaacagaacagccagatgattgtaaagcgcttcagctttagccagaggagccgggacgagagtgcatccgaaacgtctacaccatctgaacatagcgccgcaccctcccctcaggtcgaggttaggacgctggagggccaactggtgcagcatcctggacccggtatccctcggccaggccataggagccgggctccagagctggttaccaaaaagttcccagttgatctaagactccctcccgtagtgcctctgccacctcccactctgagggagctggaactccagcgcaggcctacgggcgacttcgggttctccctgcggagaacaacaatgctcgatcgtggtccagaggggcaggcctgtcgccgagtagtgcatttcgccgaaccaggagcaggcactaaagacctggccttaggtttagtgcccggagaccgactggtggaaatcaacggccacaatgtcgaatctaaaagccgcgacgagatcgttgaaatgattagacagtctggcgatagcgtgcggctgaaggttcagcctatcccagaactgagtgagcttagccggtcctggctccggagtggcgaaggtccacgcagggaaccctccgatgcaaagacagaggagcagatcgccgctgaagaggcctggaatgaaaccgaaaaggtctggcttgtacacagggacgggttttcgctcgccagtcagctaaagagtgaggaactgaatctgcccgaggggaaggtgagggtgaagctcgatcacgatggcgcaatcctggacgtcgatgaagacgacgtcgagaaggccaacgccccatcttgtgatagactcgaagacctggcgagtctcgtgtatctgaacgagtcttcggtgctgcataccttacggcagcgatatggtgcatccctgctgcatacttatgcgggtccaagcctactggtgctggggccacgcggagccccagctgtttacagtgagaaggtgatgcatatgtttaagggttgtaggagggaggacatggcacctcatatctacgccgtggctcagactgcttatagagcaatgcttatgtcccgccaggaccagtcaattatcttgctggggtcatctggctccgggaaaaccacaagctgccagcatctggtacaatacttggcgacaatcgcagggatctctggcaacaaagttttttcagtcgaaaagtggcaagccctgtacaccctactggaagcattcggcaactctcccacaattatcaatgggaatgctacccggttttcccagatcctttccctcgacttcgaccaggcaggccaggtggcttccgcaagtatccagactatgctcttggaaaagctgagagttgccaggcggcctgcatccgaggccacctttaacgtcttctactacctgttagcatgcggcgatgggaccctgagaacggagctgcacctgaatcacttggctgagaacaatgtttttggcatcgtgcccctcgcaaaacctgaggagaagcagaaggcggctcagcagttctcaaagctccaagccgcaatgaaggtcctgggaatcagtccagacgagcagaaggcttgctggttcatcctggcagccatataccacttaggggctgccggtgctaccaaagaggcagccgaggccggtagaaagcagttcgctcggcacgaatgggcacagaaggctgcctatctactgggatgtagtctcgaagagttatcctctgccatattcaaacatcagcataaaggcggaaccctgcagagatccacctccttccgccaggggcctgaggagtctgggctcggcgatggtaccgggccaaagctgtccgcccttgaatgcctagaaggtatggccgctgggctttattctgaactctttactttacttgtgtcactcgtgaatagagctctgaaaagctcccagcactcgctttgctcaatgatgatcgtagacacgccaggatttcaaaatcctgaacagggagggagcgcaagaggcgcatcatttgaggagctttgtcacaactatacccaagatcggctgcagagactcttccacgagagaacgttcgtgcaggaattagagcgatacaaggaggagaatatagaactggcttttgacgacctcgagcctcccaccgatgactctgtggccgcagtagaccaggcttcccatcagagcctggtccgcagcctcgcccgtaccgatgaagccagggggttactctggctcttggaggaggaggcactcgttccaggtgcttctgaggacactctcctggagagactattttcctactacggcccacaggagggcgacaagaagggacagtctccactgctgcattcatccaagcctcaccacttcttgcttggccattctcatggaacgaactgggtcgagtacaatgtgacagggtggcttaattatacaaagcagaatccggcaacgcagaacgccccacgactccttcaggactctcaaaaaaagatcattagtaatttgtttctgggacgggctgggagcgctactgtgctgtccggttctattgccggactcgagggaggctcgcaactggccttgaggagagcgacaagtatgaggaaaacatttaccacgggaatggctgctgttaaaaaaaagagcctttgcatacagatgaaacttcaggtcgatgcccttatcgacacaatcaagaaaagtaagctgcactttgtgcattgtttcttaccagtcgctgagggttgggctggcgaaccgaggtccgcatcctcacgtcgcgtgtcttcgtcctcggagctggatctgccatctggtgatcactgcgaggctgggctgttacagcttgatgtacccctcctacgcactcagctgaggggctctagactcctcgacgctatgcggatgtacagacagggatacccagaccacatggttttctccgaattccgacggcgtttcgacgttctcgcaccacacttgaccaaaaagcatggaagaaattatatagtggtggacgagcgccgagctgtcgaagaactcttagagtgtctcgatcttgagaaatcctcctgctgcatggggttgagtagggtctttttcagagccggaaccctggccaggttagaagaacagcgcgacgagcagacgagtcggaacttgactttatttcaggctgcctgccggggttatttggcccgtcagcactttaagaaaaggaaaatccaagacctcgctatccggtgcgtccagaagaacataaagaaaaacaagggtgtgaaagattggccatggtggaaactctttactacggttaggccactgatcgaagttcaactcagtgaggagcagatccgcaataaagatgaggagatccaacaactacggtccaagctggagaaagccgaaaaggaacgcaacgagctgcggctgaactcggatcgcttagagtccaggattagcgagttgacctctgagctgacagacgagcgcaataccggcgaatctgcttctcagctgcttgacgccgaaactgctgagcgtcttagagccgagaaagagatgaaggagctccagacccagtatgacgccctcaaaaagcaaatggaggtcatggagatggaggtcatggaagccaggctgatcagggctgcggaaattaatggagaggttgatgatgacgacgctggcggagagtggcggcttaagtacgagagggctgtgcgggaagtcgatttcactaagaagcgactccagcaagagttcgaagataaactcgaggtcgagcaacagaataaaaggcagttagagcgtcggctgggcgacttacaggcggacagcgaagagtcacaacgcgcattgcagcaactgaaaaagaagtgtcagaggttgacagcagaactgcaggacacgaagctgcacctggagggccaacaggtcagaaaccacgagcttgagaagaaacagaggcggttcgattctgaactcagccaggctcacgaagaagctcagcgtgagaaacttcagagggagaaactgcagcgtgagaaagatatgctactcgctgaagcattttctttaaaacagcaattggaggaaaaggacatggacattgccggattcactcagaaagttgtttctctggaggcagagctgcaggacatctcaagccaggaaagtaaagatgaggctagcttagctaaagtgaagaagcagcttagagacctcgaagccaaagtaaaagaccaagaagaggaactggacgagcaggcaggtaccattcaaatgttagaacaactcaaacagatggaagtgcagcttgaagaggagtatgaggacaagcagaaagtgctgagagaaaagcgagaactagagggcaagctggcaaccctttcagatcaggtcaataggagggactttgaatccgagaagagactgaggaaagatctgaaacggactaaagctctgctagccgacgcccaactcatgcttgaccacctgaaaaatagtgccccttcgaaacgagagatcgcccaactgaagaatcaactggaagaatctgagtttacatgcgccgctgctgtgaaagcaagaaaagcgatggaggtggaaattgaggatctgcacctccagatagacgacatcgctaaggccaaaacagcccttgaggagcaactgagccggctgcagagggagaagaacgaaatacagaaccggctggaggaggatcaggaggacatgaacgaactgatgaaaaaacacaaggccgctgtggctcaggcatcaagagatctggcccagatcaatgacttacaggcccagctagaggaagctaacaaggaaaagcaggaactccaggagaaactgcaagcccttcaatcacaggtcgaatttctagagcagagtatggtggataagagtctagtgtcgcgccaggaagcaaaaatcagggagctcgagactcgcttagagttcgagcggactcaggtgaagcggctggagagcctggcgagccgcctgaaggagaacatggagaaattgacagaagagagggatcaacgcattgcagcagaaaatagggaaaaagagcaaaacaaacgactgcagcgccagctccgtgacacgaaggaagagatgggggaattggctcggaaagaggctgaggcctctcggaaaaagcacgagctcgagatggatctggagtccttagaggcggctaatcaatctctccaagccgacctaaaattggcctttaagaggataggagacctgcaggcagccattgaagatgaaatggagagtgatgagaacgaagatctcataaattccgagggagactccgacgtggattccgaacttgaagatcgggtagacggagtgaaaagttggctctcaaaaaataaagggccttctaaggccgcaagcgacgatggttctctgaagagttcatcgccaaccagttattggaagtccctggcacccgaccgttctgacgacgagcacgatcccctcgacaataccagtaggcctagatattctcacagttacctgtcggattctgacacggaggcgaaattgacagagaccaatgctta

SEQ ID NO: 231681 - DNA, 2808 bp, synthetic construct
  misc_feature 1..2808: note = Description of Artificial Sequence: Synthetic coding sequence
  source 1..2808: mol_type = other DNA
atgagaatgtacaggcagggatacccggatcatatggtattctctgagttcaggaggcgttttgatgtgctggcccctcacctgaccaaaaaacacggaagaaattacattgtggtcgatgaaaggagggcggtggaagagctcctggaatgtctggatctagagaaatcatcctgttgtatggggcttagtagagtcttttttcgggcaggaacattagcccgtttggaagagcagcgcgatgagcagacttcccggaatctcacactgtttcaggctgcctgtaggggctacctggcgcgacaacactttaaaaaaagaaagatccaagacctcgcaataagatgcgtgcaaaagaacatcaaaaaaaacaagggggtgaaagattggccatggtggaaattattcacgacagttcggcctttgattgaggtccagctgagtgaagagcagatccggaataaggacgaagagatccagcagctgcggagtaaattagagaaggctgaaaaagagcgcaatgaactgcgcctgaatagcgaccgtttggaatcgaggatttcagagctgacaagcgaactcaccgatgagcgcaatactggtgaatccgcaagccaattgctggacgccgaaactgcggaacggctacgggctgagaaggaaatgaaggaactgcaaacacagtatgatgcccttaagaaacaaatggaggtgatggagatggaggtcatggaggcccgactgatccgagctgctgagatcaacggtgaggtagatgatgacgacgccggaggcgagtggagattgaagtatgagcgcgctgttcgagaagtcgacttcacaaagaaacggctgcagcaggagtttgaggataaactggaggtggaacagcagaataaaaggcaattagaacgccgattgggcgacctgcaggctgacagcgaggaaagccagcgggcactgcaacaattaaagaaaaagtgccagcgcctgactgccgagctgcaagacaccaaacttcacctggaaggtcagcaggtccggaaccatgagctggaaaagaagcaaagacgcttcgattccgagttgagccaggctcacgaggaagcccagcgcgaaaagctacagcgcgagaagctgcagcgggaaaaagatatgttactggccgaggccttcagcctgaagcagcaactggaggagaaggatatggacatcgcgggttttactcagaaggttgtatccctggaagccgaattacaagacatcagcagccaggagagcaaggacgaggctagcttagccaaggtaaagaaacagctccgggatctggaggccaaagtcaaggatcaagaagaggaattagatgagcaggccggaaccatacagatgctggaacaggctaagcttagattggagatggaaatggagcggatgcgccaaactcactctaaggaaatggaaagccgtgacgaggaggtagaagaagccaggcagtcttgtcaaaaaaagttaaagcagatggaagtccagcttgaggaggaatatgaagataagcagaaagtgttgcgggagaagcgagagctggaaggcaaactggctaccctgtcagaccaggtgaacaggcgggattttgaatcggaaaagcgtcttcgaaaggatcttaaacgaacgaaggcgctcctggccgacgcacagctgatgctcgatcacctcaagaatagtgccccatcaaaacgcgagattgctcagctcaagaatcagttggaggagagcgagttcacgtgcgcagcagccgtcaaggccaggaaggctatggaagtggagattgaggacctgcatctgcagatagatgatatcgctaaagcaaaaacagcgctcgaagagcagttgtctcggctgcagcgggaaaaaaacgagattcaaaaccgccttgaggaggatcaggaggacatgaatgaactcatgaagaagcacaaggctgccgtagctcaggcatcgagagacctggcccagatcaatgaccttcaagcccagctggaagaggcgaacaaggagaagcaagaattacaggaaaagctccaggcccttcaatcccaggtcgagtttctggaacagagcatggttgacaagagtttggtctcaaggcaagaggcgaaaattagagaattggagacgcggctggaattcgaacgtactcaagtgaaaaggttggagagcctggccagccgactgaaagaaaatatggagaagttgacagaggaacgggaccagcgtatagccgcagagaatcgtgaaaaagaacagaataaacggcttcagaggcagcttagggataccaaagaggaaatgggcgaactggctagaaaagaagcggaggcgtcacgcaagaagcacgaactggagatggatcttgagtctttagaagccgcaaatcagtccctgcaggctgacttgaaactagccttcaagagaattggtgacctgcaagcagctatagaggacgagatggaatccgacgagaatgaggatcttataaatagcgaaggcgattccgacgtggacagcgagctggaggaccgggtggatggcgtgaagtcttggttgtctaagaacaaaggcccttctaaagccgcatccgacgacgggtctcttaagtctagctctccgactagttactggaagtccctggccccagataggtctgacgatgagcacgatcctctggataacacaagccggccacgctattcacacagctatttgtctgatagtgacacggaggctaagctgactgagaccaacgcgtag

SEQ ID NO: 231682 - DNA, 963 bp, synthetic construct
  misc_feature 1..963: note = Description of Artificial Sequence: Synthetic coding sequence
  source 1..963: mol_type = other DNA
atgacattcgttttgctgtcatcttcccagcttgaggagcaactgtctagactgcagcgggaaaagaacgaaatacaaaaccgccttgaagaagaccaggaggacatgaatgaactgatgaagaaacacaaggctgctgtcgcccaggcctcacgagatctcgcgcagataaatgatctgcaggctcagctggaagaagccaataaagagaaacaagaactccaggagaagttgcaggccctgcagagccaggtggagttcctcgagcagagcatggtcgataagagcctggtgtctagacaagaagccaagatccgagaactggagacccggctggagttcgaaaggacacaggtcaagagactggagtcactcgcttcccgcctgaaagagaacatggagaagctcacagaagagcgagaccagaggatcgccgcagaaaacagagagaaggaacaaaataagcggctacagcgccagctcagggacaccaaggaagaaatgggggagctggctcgaaaggaagccgaagcaagcaggaagaaacacgagttggagatggacctggagagtctcgaggccgcaaaccagagcctacaggccgatcttaagcttgcgtttaaaaggattggcgatctccaggcggcaatagaagacgagatggagtccgatgagaacgaggacctgataaatagcgaaggggactccgacgtggactctgaactagaggaccgtgtggatggagttaaatcatggttatccaagaataaaggccctagtaaagcagcgagcgacgatggctccctgaagtcttccagcccaaccagctattggaagtctctcgcacccgacaggtccgatgacgagcacgaccctttggataacacatcccgtcccagatattctcactcctatctttcagacagcgataccgaggcaaaattgaccgagacaaatgcctag

SEQ ID NO: 231683 - DNA, 7703 bp, synthetic construct
  misc_feature 1..7703: note = Description of Artificial Sequence: Synthetic coding sequence
  source 1..7703: mol_type = other DNA
atggccatctcatcaaggctggccttatgggagcagaagattagagaagaggacaaaagtccgcctccctcatctccaccgcctcttttttcagtgataccagggggtttcatcaaacaactcgtacggggaaccgaaaaggaagccaaggaagccaggcagcgaaagcagcttgcagtggcatcaccagagcgcgagatccccgaaatcagcatctcccaacctaactctaaatctagctcgggaaccagatccggatcgcagcagatctcacaggatgatcagtcaagctcaccagggtccagtgacatcctgggaaaggagagcgagggctctagatcccccgatccagagcagatgacttccattaatggcgagaaagcacaagaattgggctctagcgctactccaacaaaaaagacagtccctttcaagagaggcgtgcgacgcggagacgtcttgctcatggtggcaaaactggaccccgacagcgcaaagcccgaaaaaacccacccacacgacgcgccaccatgtaagacttcacctccggctacggataccggtaaggagaagaagggcgaaaccagccgcaccccatgcgggagccaagcaagcaccgagatcctggccccaaaggccgagaaaaccagaaccggaggactcggagatccaggtcaaggtacagtggctctcaagaagggggaagagggccagagcatcgtaggcaagggtcttggtacaccaaagaccaccgaattgaaagaggccgaaccccagggcaaagaccggcagggaacccgaccccaggcccagggacccggagagggcgttagacctggtaaagcagaaaaagaaggcgctgagccaactaataccgtggaaaaggggaatgtgagcaaggatgtgggttcagagggtaaacacgtgcgcccacagattccagggcgaaaatggggaggttttttgggccgtcggagtaaatgggatggcccacagaataagaaagataaggaaggcgttctcctcagcaaggccgaaaagactggagaaccccagacgcagatggaaaagacatctcaagtgcagggcgagttaggtgatgatctgcggatgggcgagaaagccggagaactcagatctactacaggcaaggctggcgagtcatgggataaaaaagaaaaaatgggacaacctcagggcaagagcgggaatgcaggcgaagctaggtcacaaaccgaaaagggttgtgaagctcccaaggaagtgtctacaatggtggagagccctgctgcacccggaaaaggcggatggccaggatctcgaggacaggaggccgaagaaccttgtagcagagcaggcgacggggcaggtgccctggagaccgagttggaaggaccttcccagcctgcactggaaaaagatgctgaaaggccaagaatcagaaaggaaaatcaggacggacctgcccctcaggaggagggaaaaggaggtcagagcagagattcagatcaggccccagaggatcggtggtacgaggccgagaaggtgtggttggcacagaaagacggttttactttggcaacagtgttaaagccagacgaagggacagccgacctccctgccggtagggtccggctgtggatagacgctgacaagacaattacagaagtcgacgaagagcatgtacatcgcgcaaacccccctgaattagaccaggtggaagacctggcctctctcatatcagtgaacgaatcttctgtgctgaataccctcctacaacggtacaaagcacagctactgcatacctgtaccgggcctgacctgatcgtgctacagccacgtgggcctagtgtgccctcggctgggaaagtgcctaagggccgaagggacggacttcctgcccacatagggtccatggcccagcgcgcatattgggccctgttgaaccagagaagagatcagtcgattgtggccctggggtggagcggggctggtaagaccacttgctgtgagcaggttcttgagcacctggtgggcatggctggctctgtggatggtcgggtgtcggtggagaagatcagggcaacattcaccgtcctccgggcatttgggagcgtcagcatggctcactccagatccgccaccagattcagcatggtgatgtctctggactttaatgctacaggacgcattacagctgcccagctgcaaacaatgctgttggaaaagagccgggtagcgagacagccggagggcgagtccaactttcttgtgttctctcagatgttggccggtctggaccttgacttgcgtactgagttgaacctccatcagatggcagactcgtcctcgttcgggatgggagtttggtcaaaaccagaggataagcaaaaggctgctgcagcattcgcacagctgcagggtgctatggagatgctgggcattagtgagtccgagcagcgcgctgtctggcgcgtcctggccgctatctaccatttaggagcagccggtgcctgcaaggtaggtaggaaacagtttatgagatttgagtgggccaactacgctgccgaggcactgggatgtgaatatgaagagttgaatacggcgaccttcaagcatcatctgcggcagattatacagcagatgacattcggaccatcccgatggggcctggaggatgaggaaacttcctcgggacttaaaatgacgggagtggactgcgttgagggtatggcgagtggcctgtatcaagaactgttcgccgctgtggttagcttaatcaacaggtccttcagctcccaccacctgagtatggcatccattatggttgtggatagccccggattccagaatccaagacaccagggaaaggaccgggctgcaactttcgaggagctctgccacaactacgcacacgaacgcttacagcttcttttctatcagagaactttcgtctctactctgcaacggtaccaggaagagggggtacctgtgcagttcgacctgcccgacccctccccaggcacaacagttgccgtggttgaccagaatccctcccaagttcgcctccctgctggcggaggtgcacaggacgcaaggggcttgttttgggtacttgatgaagaagtccacgtggagggatcatcagacagtgtggtcttagagcgtctgtgtgccgctttcgagaagaaaggtgcaggtactgagggtagctcggccctgcggacttgcgaacagcctttacagtgcgaaatttttcatcagctcggatgggaccctgttcgatatgacttgaccggctggttgcatagagctaaaccaaatctgtccgccctcgacgcccctcaggtcctccaccagtccaaacgcgaggaactgcgttcactgtttcaggccagggccaagcttcccccagtgtgccgtgccgtagctggcctcgaggggacatcccaacaagccctccagagatctcgcatggtgcggaggacttttgctagctctctagccgcagttcgacggaaagcgccttgttctcagatcaaactacagatggatgccctaacaagcatgatcaagaggtcacgcctgcattttatacactgccttgtccctaaccccgttgtggagtcccgaagtggccaggaatccccccctccaccacagccaggcagggataaacccggagcgggaggccctctggcccttgatatccctgcactgcgcgtacagctcgctggctttcacatccttgaggcccttagattgcaccggacaggttacgccgatcacatgggattgacgcggtttaggcgccagtttcaggtgctggatgccccactgctgaagaagctaatgtccacatctgagggaattgacgagcgaaaggctgtggaagaacttttggagactctggacctcgagaaaaaagcagtggcggtgggtcattctcaggtttttttgaaggccggagtgatatcacgactggaaaagcagcgggagaagcttgtgagccaatcaatcgtcttatttcaggctgcatgtaagggtttcctgagtagacaggagttcaagaagctcaaaatccgccgattggccgctcaatgtatccaaaaaaatgtagccgtatttcttgccgttaaggattggccctggtggcaattactaggaagcctacagcccctgctgtccgccacgattgggactgaacaacttagagcaaaggaggaggagcttacgacgttaaggaggaagctggaaaaatctgagaagctgagaaatgaactccgacagaacaccgatctcctggagagcaaaatagcggacctgacttctgacctggcagatgaaagatttaaaggcgatgtggcatgccaggtccttgagtccgagcgcgctgaacgattacaggcatttcgggaagtgcaggagcttaagtcgaaacacgagcaagtccagaagaagttgggcgacgtgaacaagcagctggaagaggctcagcagaagatccagctgaatgacctggaaaggaatcccactggtggagccgacgaatggcagatgcggttcgactgcgcgcagatggaaaatgaatttctgaggaaaaggctccagcaatgcgaggaacgcttggattccgaattgacggcacgaaaggagctagagcaaaagttgggtgagctgcagtcagcctacgacggagcaaaaaagatggcccaccagctgaaaagaaagtgccaccacctcacatgcgatctcgaagatacctgcgttctgttagagaaccagcaaagcaggaatcacgaattggagaaaaagcagaagaagtttgacttacagctggcccaggcccttggcgaaagtgtcttcgaaaaaggactcagagagaaggtaacccaggagaatacctctgtccgctgggagcttggccagctgcagcagcagttgaagcagaaggaacaggaggcttcccaactgaaacaacaggtggaaatgcttcaggatcataagagagaactgctgggcagcccatctctgggcgagaattgtgtcgccggacttaaggaaaggttgtggaagctggaatcaagcgccctcgaacagcagaagattcagtcccaacaggagaacacaatcaagcagctggagcaactccgtcagagattcgaactggaaattgagaggatgaaacagatgcatcagaaagaccgggaagatcaggaggaagaattggaagatgtccgccagagttgtcaaaaacgcctgcaccagctggaaatgcagctggagcaggagtacgaagaaaagcagatggtgctgcacgaaaagcaggacttggaggggctcatagggactttgtgtgaccagattggacatagggactttgatgtggaaaagcggctgcgaagggacctccgcagaactcacgctttgcttagcgacgttcagctcctcttaggcacaatggaggacgggaagactagtgtcagtaaagaggaattggagaaagttcattcccagttggaacagtctgaagcaaaatgtgaggaggcgctcaaaacacagaaggtgttgactgccgaccttgaaagtatgcattcagagctggaaaatatgactcgtaacaagtccttggtagatgaacaactttacaggctgcagttcgaaaaagctgacctactgaagcggattgatgaagatcaagatgatctgaatgaactgatgcaaaaacacaaagatcttatcgctcagagtgccgctgacatcggacagatacaggaactccagttacagctggaggaggccaagaaagaaaagcataaattacaggaacagctccaggttgcacagatgcggattgagtacttggaacaaagcacggtcgaccgggctattgtgagccgacaggaagcagtcatttgcgacctggagaacaagactgagtttcagaaagtgcaaatcaaacgcttcgaggtgttggttatacgcctgagagactctctgatcaagatgggcgaagaactgtcacaggctgccacttctgaatcccagcagagagagagttctcagtactaccagagaaggttggaggagctgaaggccgatatggaggaactggtacagagggaggccgaagcctctagacggtgcatggagttggaaaagtacgtcgaagaactggcagccgtgagacagacactgcagacggatctggaaacttctattagaagaattgccgatctacaggccgcactggaagaggtggctagctctgactcagacaccgagtcggtccagaccgcggtggactgcggtagttccggcaggaaagagatggacaacgtgtcaatcctgtcttcacagcctgaaggcagtctgcagtcttggctttcttgtaccctgtctctggccacggacacaatgagaacaccatcccggcagagcgcaaccagttcccgaatcctctctcctaggattaacgaggaagcgggagatacagaaagaacccagagcgctttagcgctgtccagggcaagatcaaccaatgttcatagcaagacctccggagataagccagtctctcctcacttcgtccgcagacagaagtactgtcattttggagatggagaggtgcttgctgttcagcgaaagtcaactgaacgtctcgaaccggcaagctctcctctggctagtaggtccactaataccagtcccttatctcgggagaagctgcccagtcctagcgcagccctgtccgaattcgttgaaggcttacgccgtaagcgcgctcagcggggacaaggatcaacactgggcctggaagactggccaacgctgcctatctaccagacaaccggggcatccacccttcgaagaggaagggcgggttctgacgagggtaacctttctcttagagtgggcgcaaagtctcctcttgagattgaaggggctgctggagggttattgcggagcactagtttgaagtgtatttcctctgatggcgtggggggtactacattactccctgaaaagtcaaagacacagttcagttcatgcgaatccttgctagagagcaggccctcgatgggacggaaactgagcagtcctactacccctagggatatgttgttgagtcctacactgagaccccgtcgtaggtgtctggagagcagcgtggacgacgccggatgccctgacctaggcaaggaacctctggtgttccagaatcggcagttcgcacatttgatggaggagccattgggctccgaccccttttcgtggaagctgccaagtcttgactacgagcggaaaaccaaagtcgacttcgacgactttctaccagcaattcgtaaacctcagactcctacctccttggccggatcggccaagggaggtcaggacggatcccagagatctagcatccactttgagaccgaggaggccaaccgatctttcctgagtggaatcaaaacaatcctgaaaaagagtcccgagcccaaagaggatcctgctcacctgtccgacagctcttcatcctcagggagtatcgtctcctttaaaagcgccgattctattaaatcccgcccaggaatacccagattggctggagatggaggggagcgcaccagtcctgaacgccgtgagcccggaacgggtcgaaaggacgatgatgtggccagtattatgaaaaaatacttgcaaaaata

SEQ ID NO: 231684 - DNA, 7706 bp, synthetic construct
  misc_feature 1..7706: note = Description of Artificial Sequence: Synthetic coding sequence
  source 1..7706: mol_type = other DNA
atggctatcagttctagactcgccctctgggagcagaagatacgtgaagaagacaagagtccccctccatcctccccaccacctctgttctctgtgatacctgggggattcattaaacagttagtcagaggtaccgagaaggaggcaaaagaagccagacagagaaaacagttggcagtggcctcccccgaacgcgaaattcccgagatcagtattagccagccaaattcaaagtctagcagtgggacgcgcagcggctctcagcaaattagccaggacgatcagtctagttctcctgggagctctgatatcttgggaaaggaatctgaaggctctcgcagccctgatcccgaacaaatgacaagtattaatggggagaaggcccaggagctgggttcctctgcaaccccaaccaaaaagaccgtgcctttcaaaagaggggtgcgcaggggtgatgtactgctgatggtggctaaacttgatccagacagcgccaaacccgagaaaactcatccgcacgatgcccctccttgtaaaacctctccaccagcgactgataccgggaaggaaaagaagggcgagaccagtcgaaccccctgcggtagccaggctagcacagagattctggcccctaaagctgagaagacccgcaccggtggacttggagatccagggcagggcactgtcgctctgaaaaagggagaagagggacagagcatcgtggggaagggcctggggacacccaaaactacggagctgaaggaagctgagccgcagggcaaggacaggcaagggacccgcccacaggcccagggcccaggggaaggcgtcaggcctgggaaagcggagaaagagggggctgagccaactaataccgtagaaaaaggcaatgttagtaaagacgtgggcagcgaaggtaagcatgttcggcctcaaattccaggtagaaagtggggaggattccttggtcgcaggagcaagtgggatggccctcagaataaaaaggataaggagggtgtccttctctcaaaggccgaaaagaccggcgagccccaaactcagatggaaaaaactagccaggtgcaaggggagttaggtgatgatttgcggatgggcgagaaggccggtgagctgaggtctacaacaggtaaagccggtgaaagctgggacaagaaggaaaaaatgggccagcctcagggaaagagtggcaacgccggagaagccaggtcacaaaccgagaaaggctgcgaggcgccaaaggaggtatcaactatggtcgaaagtccagcagccccaggaaagggtggctggcctggcagcaggggacaggaagcggaagagccctgttcaagagccggagacggtgccggtgctttagagactgagttagagggcccatctcaacccgctctggaaaaggacgcagagaggccccgaattaggaaggaaaaccaggacgggccagcccctcaagaagaaggcaaaggtgggcagagccgggattctgaccaggccccagaggaccggtggtacgaggcagagaaagtttggctcgcccagaaagacggttttacactggcaacagtgctgaaacctgatgagggaaccgctgatctccctgctgggagggttcgtctctggatcgatgcggataagacaatcaccgaggtagatgaggagcacgtgcacagggccaaccctcccgagttggaccaggtggaggacctggcttcccttatcagtgtcaacgaatcaagtgtgctcaatacattattacagcgatataaggctcagctcctccacacatgtacaggtcccgatctcatagtgctgcaacccaggggaccctccgtgcctagtgccggtaaagtacccaaaggtagaagggacggactccccgcacatattggctctatggctcaacgcgcatattgggccctcctcaatcagcggagagatcagtctatcgttgcgctgggctggagtggagccggtaagactacctgctgtgagcaggttttggagcatctggttggcatggccggaagcgtagacggtcgggtttccgttgaaaagattcgcgcaactttcacagtactccgggcattcgggagcgtttcgatggcacactcccgctccgcaacacgcttcagcatggttatgtcccttgatttcaatgctacaggcaggattacagccgcacagcttcagacaatgctcctcgagaagagccgcgtcgccaggcagcccgaaggggaaagtaactttctagtcttcagccagatgctggccggactcgatctggatctgcgcactgagttgaatctgcatcagatggctgatagctcttcttttggtatgggagtgtggtctaagcctgaagacaaacagaaggctgcagctgccttcgcgcaactacagggtgctatggagatgctcggtatctctgagtcggagcagcgggcagtgtggcgggtcctggccgctatttatcatctcggcgctgcgggtgcctgcaaagtgggtaggaaacagtttatgaggtttgagtgggcgaactatgccgcagaggctttaggatgcgaatatgaagaactcaacaccgctacatttaaacaccacctgcggcaaataatccagcaaatgacttttggtccaagcagatgggggctggaggacgaggaaacatcaagcggactgaagatgacaggcgtggattgtgtggagggcatggcctcggggctataccaagaactatttgcggcagttgtgtcacttataaaccggagtttctcaagccaccacctaagcatggcctcaatcatggtggtggattctcctggcttccagaaccctcggcaccaaggcaaggaccgggcagccacttttgaggagttgtgccacaactacgcccatgaaagattacaactccttttctaccaacgaaccttcgtgtcgacgctgcagagataccaggaggagggggtgccagttcagttcgacctgccagacccttcccccggtaccactgtggctgtagtcgatcagaatccctcccaacaggtacgtcttcccgcaggtggcggtgcccaagacgccagaggactcttttgggtgctggacgaagaagtccacgtcgaggggtcatcagatagtgtcgtgcttgaaagactttgtgctgccttcgaaaagaagggcgctggtaccgaggggtcgagcgccctgcgcacctgtgagcagcctctgcagtgcgaaatatttcaccaattggggtgggacccagtacgctacgacctgacaggttggttgcacagagctaaaccgaacctgtctgcattagatgcaccacaggtcctccaccagtccaagagagaagaactgcgttccctgtttcaggcacgggctaagctccctcctgtatgccgcgctgtagccggactggaaggaactagccagcaggctcttcagcgctcccgcatggtacgacgtaccttcgcttcaagtcttgcagccgttcggcgaaaagcaccctgtagtcaaattaaactgcagatggatgcccttaccagcatgatcaaacgctctcgtctgcacttcatacattgcttggtgcccaatccagtggtggagagccggtccggccaggaatccccccctccaccccagccgggacgggacaagcccggtgccggagggccactggcactggacatcccagcgctgcgtgtgcagctggcgggtttccacattctggaggcgctgcgcttgcaccgtactgggtacgctgaccatatggggctgactaggtttcggcgacagttccaggtgctcgacgcaccactgttaaagaaactgatgagcacttctgaaggcatagacgagagaaaagccgtggaagaattactggagacccttgacctggagaagaaggcagttgctgtgggtcactcccaagttttcctcaaagcaggcgtgatctcaaggcttgagaagcagcgcgagaaactcgtgagtcagagtatcgtgctcttccaggccgcttgtaaaggatttttgtcccgccaggaattcaagaagctcaagatccgcagactggctgcccagtgcatacagaagaacgtggcagtcttcctggctgtcaaggactggccgtggtggcagttgctgggaagcctacagccacttttgagcgcgaccatcgggactgagcaattaagggctaaggaggaagaactgaccactttaagacgtaagctcgagaagtctgagaagctgcgcaatgaactcagacaaaacaccgacttactcgagagcaagattgccgaccttacaagcgatctggccgacgagcgcttcaagggagatgttgcctgccaggtcctggaatctgaaagagccgagaggctccaggcattcagggaggttcaggagctgaagagtaagcacgagcaggtgcagaaaaaactgggcgacgttaacaaacagctggaagaggcccagcagaaaattcagctaaacgatctcgaacgaaatcctacaggcggagcagatgagtggcagatgagatttgactgcgcccagatggagaacgagtttctgcgaaaacgattacagcagtgcgaggagcggttggactcagaactaaccgctcgcaaagagctggagcagaaattgggggaactccagagcgcctacgacggtgctaagaaaatggctcatcagctgaagagaaagtgtcaccacctgacctgtgacctcgaggacacatgcgtcctattggagaaccaacagtcccgaaatcatgagctggagaagaagcagaaaaaattcgatttgcaattagcacaagcgctgggcgagtctgtattcgagaaaggcctgcgcgagaaagtgacccaggagaatacaagcgtgcgctgggagctgggtcagctccaacaacagctgaagcagaaagaacaggaggctagtcaattaaaacagcaggtggagatgctgcaagatcataaaagggaattgttagggtctccatcccttggggaaaactgtgtggcaggcctaaaagagagattatggaagctggagtccagcgccctggagcagcagaaaatccagtcacagcaggaaaacactatcaagcaactcgagcagctccggcagagattcgaattagaaattgagagaatgaagcagatgcaccagaaagaccgggaggatcaggaagaagagctggaggacgttcgccagtcttgccagaaaagactccaccagctggaaatgcagctagagcaagagtatgaagagaaacagatggtgttgcatgagaaacaagacctcgaaggactgataggcacactctgcgaccagatcgggcaccgggatttcgatgtggaaaagagattgcgtcgtgacttacggaggactcacgcacttctgagtgatgtacagttattgctggggacgatggaagacgggaagacatctgtgtccaaggaagagctggaaaaggtgcacagccagttggagcagagcgaggccaagtgcgaggaagccttgaagacacagaaagttctgacggctgatcttgaatcaatgcactccgaattggagaatatgacgcgcaacaagtctcttgtcgacgaacagctatacaggcttcagtttgagaaggcagacctgctaaagcggattgacgaggatcaggacgacttgaacgagttaatgcagaagcataaggatttaatcgctcagtcagctgccgatatcggacagatccaagagctgcagctacagctggaggaggcaaagaaagagaaacacaagctccaagaacaactgcaggtcgcgcagatgagaatcgaataccttgagcagtcgactgtggaccgtgccatcgtgtcacgtcaagaagccgtaatctgcgatctcgagaacaagactgaatttcagaaagtccagatcaaaaggtttgaggtgctagtaattaggcttcgcgattctctgattaaaatgggagaagagctgagccaggccgcaacctctgagagccaacagagggagtcttcgcagtattaccagcgcaggctcgaagaattaaaagccgatatggaggagctggtgcagcgggaagctgaggcatcgagaagatgcatggagctcgaaaagtatgtggaggagctggccgctgtgaggcaaactctccagacagacttggagacaagcattagaaggattgccgatttgcaggccgcattggaagaggttgcttccagcgattccgatactgagagtgtccagacagccgtcgactgcggctcgagcggtcggaaagaaatggataacgttagtattctgtcaagccagcccgaggggtctctacagagctggctgagttgtacactctccttggcaaccgacacgatgcgcacaccctctagacagtctgcgacatctagcagaatcctgagcccgagaataaatgaagaggctggcgacactgaaagaacacagagcgcattggctctgtccagggcacgatcaactaacgtgcactccaagacgtctggtgacaagcctgtgagccctcactttgtgcgcaggcagaagtattgtcactttggtgacggagaagttcttgctgtccagagaaaaagtacagaacgtctggagcctgcatcttcgcccttggcctcccgtagtacgaacacgagcccgctctcccgtgagaagctgccatcccctagcgcagccctctctgaattcgtggagggcctccggaggaagagagcacagcgcggtcaagggtccactctcggtctagaggactggcccaccctgccaatttaccagacaacaggagcgtctaccctaaggagaggacgcgctggctccgacgagggcaacctctcactaagagttggggcaaagtcacccctggagatcgagggagctgctggaggcctgctgagatctaccagtctgaaatgtatcagttctgacggggtcgggggaaccaccctgttaccagagaagagcaagacacaattttctagctgcgaatcattgctcgagtcaagaccctcaatgggcagaaagctgtcctctcccaccaccccccgagatatgctgctgagtccaactctgagacccaggagacggtgcctcgaaagctctgtggatgacgccggttgccctgacctgggcaaagagcccctggtcttccagaaccggcaatttgctcatctgatggaggagccactgggaagcgaccccttctcatggaagctgcccagcctggactatgagaggaaaacaaaggtggattttgacgacttcctgcccgctattcggaagccccagacaccaaccagtttggctggtagtgctaagggaggacaagacgggtctcaacgatcatctatccattttgaaactgaagaggcaaacagaagctttctttccgggatcaaaaccatcctgaaaaagagcccagagccgaaggaggacccagctcacctgtctgatagctccagcagttctggctccatcgtcagtttcaaaagtgcagactctatcaagtctagaccaggaatccctcgcctggccggtgatggcggagaaagaacttcccccgaacgacgagaacctggcactggcagaaaagatgacgatgtcgccagtatcatgaaaaaatacctccagaagta

SEQ ID NO: 231685 - DNA, 7703 bp, synthetic construct
  misc_feature 1..7703: note = Description of Artificial Sequence: Synthetic coding sequence
  source 1..7703: mol_type = other DNA
atggccatatcttcccgcctggccctgtgggaacagaaaattcgcgaggaagataaatcaccacctcccagctcccctccgccactgttttccgtcataccgggtgggttcattaaacagctcgttcgcggaacagaaaaggaagctaaggaggcaagacagagaaaacaactggccgtggcctcacccgaacgcgagattcctgagatcagtatatctcagcccaacagcaaaagctctagtggcacaaggtccggatctcaacagatctcccaggatgaccaaagctcgtcaccaggtagctccgatatcctcggaaaggaatccgaagggtctcgctcacccgatcctgaacagatgacctcaataaacggcgagaaggcacaggaactgggatctagcgccacccctactaagaagactgttccatttaagagaggcgttagacgcggagatgtattactcatggtcgctaagctggatcctgactctgccaagcccgaaaaaactcaccctcatgatgctcctccgtgcaaaacctctccacccgcaacagacacaggtaaagagaagaaaggcgaaacctcacggactccatgcggttctcaggccagtacagagattctcgcccctaaagccgagaagacccggaccggcggtctgggtgaccccggacaggggaccgttgccctaaaaaagggtgaagagggacaaagcatagtgggtaaaggacttggaaccccaaaaaccacggaattaaaggaggccgaaccacagggaaaagacagacagggaacaaggccccaggcccagggccctggcgagggggttcgaccaggaaaagcagagaaggagggggctgagcctactaatacagtagagaagggaaacgtaagcaaggatgtgggctcagaaggtaaacacgtgcggcctcaaatcccaggacgtaaatgggggggatttttggggaggaggtcaaaatgggatggaccacaaaacaagaaagataaggaaggagtgttacttagtaaagctgagaagaccggagaaccgcagacacagatggagaagacttcacaggtccagggagagttaggcgatgatctgcggatgggagaaaaagccggtgagcttcgctccacaaccgggaaagccggtgaatcatgggacaagaaggagaagatggggcaacctcagggaaagagcgggaatgccggagaggcaaggtctcaaaccgaaaagggctgcgaggcgcctaaggaggtatccaccatggtggagtcccccgcagcacccggaaaaggcggatggccagggtcccgcggtcaggaggccgaggaaccttgttctagggctggagatggggcaggggcactcgagaccgagttagagggaccgagccagcctgccctggagaaggatgctgagagacctcggattaggaaggaaaaccaggacggtcctgcacctcaggaggagggtaaggggggacagtccagggacagcgaccaggccccagaggataggtggtatgaagcggagaaggtctggttagcccagaaggatgggtttaccttagcaactgtcctgaagccagacgaggggaccgccgacttgccagctgggagggtacgtctatggatcgacgccgataagacaataacggaagtagatgaggagcatgtgcaccgcgcaaatccccctgaactggaccaagtggaggacctggcatccttgatctccgtgaacgaaagctctgtgcttaatactctcctgcagcgctataaggcccaactgttacacacatgcaccggcccagacctgattgttctgcaacctagaggcccaagcgtgccatctgccggaaaagtccccaagggtcgcagagatgggttgcccgctcatatagggtccatggcacaacgagcgtactgggcactgttaaatcagcggagggatcagagtatcgttgcgctgggctggtcaggcgcaggcaagactacttgttgtgaacaggttttggaacatctcgtgggtatggctgggtccgtcgacggcagggtctctgtagagaagattcgggcaacctttaccgttctgcgggcttttggctccgtctcaatggctcacagtcggagtgccactcgtttttccatggtcatgtcactggatttcaacgccactggaaggattacagcagctcagttgcagactatgctactagagaaatcaagggtggccagacagcccgaaggtgaaagcaatttcttagttttttctcaaatgctcgccggactggacctagatcttaggacagagctgaatttgcaccaaatggcagacagtagctccttcggaatgggagtgtggtccaaacctgaggataaacagaaggctgcagctgccttcgcccaactgcagggtgccatggagatgctgggaatcagtgaaagcgaacagagagccgtgtggcgagtcctggccgcaatatatcatctgggagccgctggtgcttgcaaggtcgggaggaaacagtttatgcgttttgagtgggctaattatgcggctgaggccctggggtgcgagtatgaagaattgaatacggcaacgttcaagcatcacctgcgccaaatcatccagcagatgacatttgggcctagcagatgggggctggaggacgaagagacttcatctggcctgaagatgacaggtgtagactgtgtggagggcatggcctcaggcctctaccaggagctgtttgccgcagtcgttagcctgatcaatcgatccttcagctcccatcacttgagcatggcgagcattatggtggtcgactcacccggttttcagaaccccaggcatcaaggcaaggacagagccgctactttcgaagagttatgtcacaactacgctcacgaacggctccagcttctgttctatcagagaacatttgtgtccacccttcagaggtaccaggaagagggcgtaccagtgcagttcgacctgccagacccttcccccggtactaccgtggccgttgtggaccagaacccgtcccaggtgaggctgccagccggaggtggagctcaggatgccagaggcctattttgggttctggacgaggaggtgcacgtcgaaggctcctccgactccgtggtgctggagcgtctgtgtgctgcatttgagaagaaaggagctggtaccgaaggctcaagcgcattgcgtacgtgcgagcaacccttgcaatgcgagatcttccatcagctgggatgggatccggttaggtatgatctgaccggatggctgcaccgcgcaaaacctaacctgtcagcccttgatgccccacaggtgttacatcaatccaaacgagaggagctgagatctctgttccaagcacgcgctaagctgccgcctgtttgccgagccgtcgccggtctggagggcaccagccagcaagctttgcaaagaagtaggatggtgcggcgaacctttgcatccagcctggctgctgtccgtcgaaaagccccttgcagccagattaagctgcagatggacgcgctgacaagcatgataaagcggtcccggcttcacttcatccattgcctggttccaaatcctgttgtcgaatcaagaagcggacaagagagtccgccacctcctcaaccaggccgtgacaaaccaggggctggaggtccgcttgctcttgatatcccggcacttagagtacagcttgctggcttccacatcctcgaggccctgcgacttcatcgcaccggttacgccgatcacatggggctgaccaggttccggaggcagtttcaagtcctggacgcgcctttgttaaagaaactgatgtccacgtctgaaggaatcgatgaacggaaagcagtagaggagctcctggagaccttggatctggagaaaaaggcggtggccgtgggtcatagtcaggtctttttgaaagccggagtaatctctagactggagaagcagcgtgagaaattagtgagtcagagcattgtgctgtttcaggctgcctgtaaagggttcctgagccgtcaagaatttaagaaactaaagattcggcgactggccgctcagtgcatacagaagaacgttgccgtcttcttggccgtcaaggattggccttggtggcagctgttggggtccttacagccgctgctgtcagcgaccatcggaaccgagcagctcagagcgaaggaggaggagttgacaactctgagacgaaagctcgagaagtcagagaaactaaggaatgagttgagacaaaatacggacctcctcgagtcaaaaattgctgatctgacctcagatctagctgacgagagattcaaaggagacgtggcgtgtcaggtcctagaaagcgagagggcggagcggcttcaggcttttcgggaggttcaggagctgaaaagtaagcacgagcaagttcaaaagaagctcggcgacgtcaacaagcagctagaagaggcccagcagaagatccaactgaatgatctcgaacgcaatcctactgggggagcagacgagtggcaaatgcgcttcgactgcgctcaaatggagaacgagtttcttcgaaagagactgcaacaatgcgaggagcgactggattccgagctgaccgctcggaaggagctcgagcaaaaattgggggagctgcagagtgcttatgatggcgcaaaaaagatggcccaccagcttaagcgcaaatgtcatcacctgacttgtgacctggaggacacctgcgttctcctcgagaatcagcagtcaaggaaccacgaactggaaaagaagcagaaaaaatttgatctgcagctcgcacaggcgcttggagagtccgtcttcgaaaagggtctcagagaaaaggtgacacaggagaataccagcgttagatgggaactcggccagctgcagcaacagcttaaacagaaagaacaggaagcttcccagctgaagcagcaggtggagatgctgcaggaccacaaacgcgagctcctgggcagccctagcctgggcgagaactgtgtagccggtttgaaggagagactctggaaactggagtccagcgccttggaacagcaaaagatccagagtcagcaggaaaataccatcaaacagcttgagcagctaagacagagattcgagctcgagattgaacggatgaaacaaatgcatcagaaggatcgcgaggatcaggaggaggaacttgaggatgtgaggcagtcgtgtcaaaagcgcctgcaccaactggaaatgcaactcgagcaagagtacgaggaaaagcaaatggtgctgcatgagaagcaagacctggaagggttaatcggaaccctatgtgaccagatcgggcacagggactttgatgtggaaaagcgccttcggagggacctgcgaagaacgcacgctctccttagtgacgtgcaattattattaggaaccatggaagatggcaagacctcagtcagtaaagaggaactagaaaaggtacacagccaattggaacaaagtgaagcaaagtgtgaagaagccttaaaaacccagaaggtcttaaccgcagacctggaatctatgcatagtgaactggagaacatgactaggaataagagcctggtagacgagcagctgtaccggttacagttcgagaaggccgatttactcaagcgtattgatgaggatcaggatgatctcaatgagcttatgcagaagcataaagacctaatagcccaatcagccgcagacatcggccagatccaggagctacagctgcagttggaagaagcaaaaaaagaaaaacacaaattgcaagagcagttacaggtggcgcagatgcgcatcgagtacctggagcagagtaccgtggatagggctattgtttcaaggcaagaagcggtgatctgtgatctggagaataagacagaatttcagaaagtccaaattaaaagatttgaagttctcgtgatacggctacgagactccctgatcaagatgggggaggagctctcacaggctgcgaccagtgagtctcagcagcgcgaaagcagtcagtattaccaaagacggctggaagagcttaaggctgacatggaagagctagtgcagagggaggccgaggcatccaggcgctgtatggaactggaaaaatatgtggaagaattggccgcagtcagacagactctgcagactgacttggagaccagcattcggagaatcgcagatctgcaggctgcattagaggaggttgcctctagcgatagtgacacagagtccgtccagactgctgtggattgtgggtcaagcggaaggaaagagatggataacgtgtctatcctgagtagtcagccagaggggtccctccagtcgtggttgtcatgtacactttccctggcgactgacacaatgagaactccgagtagacagtccgcgactagttcccggatcctctcgccgaggataaacgaagaggcaggcgataccgaacggactcagtcggccctggccctctcacgcgcacgctcaacaaacgtgcactctaagaccagcggggataagcccgtgagtccacattttgtgcgacgacagaagtattgtcactttggagacggcgaggtactggctgtgcagcgaaaatctacagagcgcctggagcctgccagctcacccttagcctcaaggtccactaacacttcccccctgtctcgcgaaaaacttccaagcccttcagcagccctgagtgaatttgttgaaggtttgaggcgcaaacgggcacagagggggcagggatcaaccctgggcttggaggattggcctaccctccccatatatcagacaacaggggcaagcacgctgcggagggggagggccggaagcgacgagggcaatctctcattgagggtaggcgctaagtctcccctggagattgaaggggcagcaggtggtctcctgcggagtacttcactaaagtgtatctcttccgatggagtgggcggaaccactctgttaccagagaaaagcaaaactcagttctcgtcttgcgaatctctcctggaatctaggccctctatgggccgaaaactgagctctcctacaactcctagggatatgttgctttcccctacactgcggcctcgccgacgctgtctggaatcaagcgtagatgacgcaggctgccctgatcttggaaaggagcctctggttttccagaacagacagtttgctcacctaatggaggaacctcttgggtcagaccccttctcctggaagctccccagtctggattatgaacgcaaaacaaaggttgatttcgacgactttctgcccgcaattaggaaaccccagacaccgacctctctggccggatcagccaagggagggcaagatggatctcagaggtctagtattcattttgagaccgaagaagccaataggtcctttttgtccgggatcaaaacgatcctgaaaaaaagccccgagcctaaagaagatcctgctcatctcagtgacagttccagctctagcggctccatcgtcagctttaagtctgccgactctattaagagcaggccagggatcccccgactggccggagacggtggggagagaacttcccccgagagaagagagccagggactggccgaaaagacgatgatgtggccagtatcatgaagaaatatttgcagaaata

SEQ ID NO: 231686 - DNA, 603 bp, synthetic construct
  misc_feature 1..603: note = Description of Artificial Sequence: Synthetic coding sequence
  source 1..603: mol_type = other DNA
atgggcaacagcaaatccggagcactctcaaaggagattttagaggagctgcaactgaacaccaaatttagcgaggaggaactctgttcttggtatcagagtttcttgaaggattgcccaaccggccgtattactcaacaacagttccagagcatttacgctaaattcttccccgataccgatcccaaggcatatgctcagcatgtctttcgctcattcgactcgaacttagatgggactctggactttaaagagtatgtgatagctctgcacatgaccactgcaggcaagacaaatcaaaagctggaatgggcgttttctctatacgacgtcgatgggaatgggactatcagcaagaacgaggtacttgagatagtgatggcaatctttaagatgataaccccagaagacgttaagctgctgccagatgacgagaatacccccgagaagagagccgagaagatttggaagtactttggtaaaaatgatgacgacaaactcacagaaaaagagttcatcgaaggaactctggccaacaaagagatactgaggctcatccagtttgagccgcaaaaggtgaaggagaaaatgaagaatgcgtag

SEQ ID NO: 231687 - DNA, 1884 bp, synthetic construct
  misc_feature 1..1884: note = Description of Artificial Sequence: Synthetic coding sequence
  source 1..1884: mol_type = other DNA
atgtccagcgattctgagatggccatcttcggcgaggcggcaccctttctgcgcaagtcagagagggaacggattgaggctcagaacaagcccttcgacgccaagaccagtgttttcgtggtggatcccaaggagtctttcgttaaggcaacagtgcagtccagagagggaggaaaagttaccgctaaaaccgaggccggagcgaccgttaccgtcaaggatgatcaggtgttccctatgaatcctcccaaatatgataaaatcgaggacatggccatgatgacgcacttgcacgaacccgctgtgctgtataaccttaaggagagatacgccgcatggatgatctacacctatagcggcctattttgcgtaaccgtcaacccctacaagtggctccctgtctataatgctgaagtcgttacagcataccggggaaaaaagagacaggaggcccctccccatattttcagcatcagtgacaacgcttaccagtttatgttaaccgatcgggagaatcaatccatcctcataacaggcgagagtggcgctggcaaaaccgtcaacacaaaacgggtgatccagtacttcgccaccattgctgttactggcgaaaagaagaaagaagaggtgacatccggaaaaatgcagggcacccttgaggaccagattatctctgctaatccgctcctcgaggcgtttggcaacgctaaaacggtgcgcaatgataacagttctcggtttggaaagttcatccggatccactttggcacaactggtaagcttgcctccgccgacattgaaacatatctactggagaagagccgagtcacttttcagttgaaagccgaacgcagctaccacatcttttatcagatcatgagcaataaaaagccagacctcatagaaatgttactgataactaccaatccttacgactacgctttcgtcagccagggggagataactgttccatctatcgatgaccaagaagaacttatggccactgactccgccattgaaattctcgggttcacttccgacgagcgggtttccatttacaaactcactggggcagtgatgcactatgggaatatgaaattcaaacagaaacaacgagaggaacaagccgagcctgacgggacagaagtggccgataaggccgcttatctacagaacttgaacagcgcggatttgctcaaggccctctgttaccctcgagtgaaagttggaaatgaatacgtgaccaaaggacagacagtccagcaagtttacaacgcagtgggcgctctggccaaagccgtttacgacaaaatgtttctgtggatggtgacgcggataaatcagcagctggacaccaagcaaccccgtgccaatagcgaggtggctcagtggagaacgaagtacgagacagacgcaattcagcggactgaagagttggaggaggctaaaaaaaagctagcacagcggttacaggatgccgaagagcacgtggaggctgtgaacgcaaaatgtgcatccctggagaagactaagcagaggctacagaatgaggtagaagacctcatgattgatgtggagaggaccaatgcagcttgcgctgcattagataagaagcaacggaattttgacaagattctcgccgagtggaagcagaagtgtgaggaaacgcacgctgagctcgaggcttctcagaaagaatcccggtcgctgtctactgaattatttaagatcaaaaacgcatacgaagagtcattggatcagctggagactctcaagcgcgagaacaagaatctgcagcaggagatctcagacctgaccgagcagatcgcagagggcggaaagcgaattcacgaactcgagaagattaaaaagcaggtggagtag

SEQ ID NO: 231688 - DNA, 5918 bp, synthetic construct
  misc_feature 1..5918: note = Description of Artificial Sequence: Synthetic coding sequence
  source 1..5918: mol_type = other DNA
atggcccaaaaggggcagttgtccgacgacgagaaatttttgttcgttgacaagaattttattaactcaccggtcgcccaggccgactgggcagcgaaacgtcttgtttgggttccctctgagaagcagggattcgaagcggcttctattaaagaagaaaagggggacgaggtcgtagtggaactggttgaaaatggcaaaaaggtgaccgtgggcaaggatgacatacaaaagatgaacccacccaagttttcaaaagtggaagatatggccgaattgacgtgccttaacgaagcttctgtccttcataatcttcgcgagagatattttagcggactgatctacacttactccgggttattctgcgtcgtagtcaacccctacaagcatcttcccatctattctgagaagatcgtggatatgtacaaaggcaaaaaaaggcacgaaatgccccctcacatctacgctatcgcagacacagcctacaggtcaatgctgcaagacagagaagaccagtccattttatgtacaggtgagagtggggcagggaaaacggagaatactaaaaaggtgattcagtatctcgctgtcgttgccagtagccataaggggaagaaagacacctccattaccggagaattggagaaacagctgctccaagcaaatccaatattggaggcgttcggcaacgcaaagactgtgaagaacgacaatagtagtaggttcgggaagtttatccggatcaatttcgatgtgacaggttatatcgttggagccaacatcgaaacgtacctgctggaaaaatcgcgggctattcgccaggccagggatgagcggacatttcacatcttttactatatgatagcaggagctaaagagaaaatgcgctcagatctgcttctggaaggctttaacaactacacattcttgtccaacgggtttgttcccatcccagcagctcaggacgacgagatgttccaggagaccgtagaggcgatggcaattatgggattctccgaagaggagcagctctcaatcctcaaagtcgtctccagtgttttgcagctcggtaacattgtattcaaaaaggaacgcaatacagaccaggcatctatgcccgataatactgccgcacaaaaagtgtgtcatctcatgggaataaatgtgacagactttacgcgttccattctaacaccgaggatcaaggtaggaagagacgtagtgcagaaggcacagaccaaggagcaggccgacttcgccgtcgaggcattagccaaggctacttacgagcggctctttaggtggatcctaacgcgagttaataaggcactcgataagactcacaggcagggggcttccttcttagggatcctcgacatcgcaggattcgaaatatttgaggtaaattctttcgaacaactgtgcatcaattataccaacgaaaagcttcagcagctgttcaaccatactatgttcatacttgaacaggaagagtaccagcgagagggaatcgagtggaacttcatagatttcggcctggaccttcagccttgtatcgagttaatagagcgacccaacaatccccctggagtgttggctttgctggacgaggaatgttggttccccaaggccacagataaatcttttgtggagaagttgtgcaccgagcagggttcccaccctaagttccagaagccgaaacagctcaaagacaagaccgagttctccattatccactacgctggcaaggtggactataatgcatctgcatggcttaccaaaaacatggaccctctgaatgacaacgtgacaagcctgctcaacgcgagttcagataagtttgtcgccgacctgtggaaggatgttgatagaattgtcgggttggaccagatggcaaaaatgacagagtcaagcttgcccagcgcaagcaaaacgaaaaagggaatgttcagaacggtgggccagctgtataaggagcagctgggaaaactgatgacaaccttgcgcaacactacgcctaattttgtgcgatgcatcattcccaaccatgagaagcgcagcggaaagctggacgcctttctggtacttgaacaactccgatgtaatggggtgttagaaggtatacgcatctgtcgccaagggtttcccaacagaatcgtcttccaagagtttcgccagcgctacgagatattggcagccaatgctattcccaaagggtttatggacggcaaacaggcatgtatactcatgataaaagcgcttgagctagatccaaatttatacaggattggtcagtctaagatctttttccgcaccggagtgctcgctcatctcgaagaggagcgtgacctgaaaataacggacgtgatcatggcctttcaggcaatgtgccgtggctaccttgccaggaaagctttcgccaagagacagcagcaattgactgccatgaaagtcattcagcgaaattgcgctgcttaccttaagcttaggaattggcagtggtggcggctgttcactaaagtgaagcccttgctgcaagttaccaggcaagaagaggagatgcaggccaaggaggatgagctccagaaaaccaaggagagacagcagaaagccgagaacgagttaaaagaactggaacagaaacattcccagttgactgaggagaaaaatttgctgcaagaacagcttcaggcagagaccgagctatacgccgaggccgaggaaatgcgggtgcggttagccgctaaaaagcaggaactcgaagaaatcctgcacgagatggaagcaaggctggaagaggaagaggatagagggcagcagctccaggccgaaaggaaaaagatggcccagcagatgcttgatctggaagaacagttggaagaagaggaggccgctcggcagaagttgcaattagagaaagtcacggccgaggccaagatcaagaagctagaggacgagattttagtcatggacgaccagaacaataagctgagcaaggaacgcaagctgttagaggaaagaatttctgacctcacaactaaccttgctgaagaggaggaaaaagcaaaaaacttgaccaagctcaaaaacaaacacgagagcatgatttccgagctagaggtgcggctgaagaaagaggaaaaaagccggcaggaactcgagaagctgaagagaaaactggagggtgatgcatcggactttcacgaacaaattgctgacctgcaggctcaaatcgcagagctgaaaatgcagctggcgaaaaaagaagaggagctccaggccgctcttgctcgcttagatgatgaaatcgcgcagaaaaataatgccctgaagaaaatcagggagcttgaaggacatattagcgacctccaggaggatctggatagcgaacgagctgctagaaacaaggccgagaaacagaagagggatctgggggaagagctggaggccttgaaaactgagctggaagacaccctagacagcacagcgacgcagcaggagctgagggctaaacgtgagcaggaggtgactgtgctcaaaaaagcactggacgaagaaacccggtcacatgaggcccaggtgcaggaaatgcgacagaagcacgcccaggcagtggaggaattaacggagcaactagaacagtttaaacgagcgaaggctaacctggacaaaaacaagcagaccctggaaaaggagaacgccgatctggctggagaactgagggtactggggcaagctaagcaggaggtggaacacaagaagaaaaaactggaggcacaagtccaggagctgcagtccaaatgctctgatggtgagcgggcaagagcagaactgaacgacaaggttcacaagctgcagaatgaggtggaatccgttaccggcatgttaaatgaggccgagggcaaggctataaagcttgcaaaggatgttgcctctctaagctcccaacttcaggacacacaggagctccttcaggaggagacgagacagaaactgaatgtttcaactaagctccggcagcttgaggaggaacgcaactcattgcaggaccagctggatgaggaaatggaagcaaagcagaacctagagcgacacatttctaccctgaacatacagctatcggattcgaagaagaagttacaggactttgcctccacggtagaagcattggaggaaggcaagaaaaggttccagaaagagattgaaaatctgactcaacagtatgaagagaaagctgccgcatatgataaattagagaaaacgaagaaccgtctgcaacaagaattggatgacctcgtggtggacctggataaccagagacaacttgtaagtaatctggagaagaaacagagaaagttcgatcaactgctggcagaggagaaaaacatttcatcaaagtatgccgacgagagggatagagcggaggcagaggccagggagaaggaaacaaaagccctcagcctggcccgagctctcgaagaagcattagaagccaaggaggagttggagagaaccaataaaatgctgaaggccgaaatggaggacctcgtcagcagtaaggatgatgttggaaaaaacgtgcatgagctggaaaaaagcaaaagggccttagaaacgcaaatggaggaaatgaaaacacagctggaagagctggaagacgaattgcaggccaccgaggatgcaaaattacggcttgaagttaatatgcaggcactgaagggtcaatttgaaagggacttgcaggcaagagatgagcagaatgaagaaaagagacgccaactccagcgccagctgcatgagtacgagacagaacttgaggacgaacgcaagcaaagggccttagctgctgctgccaaaaaaaaattggaaggggacctgaaggacctggagttgcaggcagactccgcaattaaaggcagggaggaagccataaaacaattgaggaagctgcaggcccagatgaaggatttccagcgcgagctggaggatgcccgagcctcccgcgatgagatttttgctactgccaaggaaaatgagaaaaaggcaaaaagtctggaggcagacctgatgcagctccaggaagatcttgcagccgcagaacgggctcggaagcaagccgatctggagaaagaagaactggccgaggagctggcatcaagcctgtcaggaaggaatgccttacaggatgaaaaacggagattagaagcacgtatagcgcagctggaggaagaactggaggaagaacaggggaatatggaggccatgtccgaccgggtgcggaaggcgactcagcaggctgagcagttgagtaacgaactcgccaccgagcggagcactgcccagaagaatgagagcgccagacagcaactggagaggcagaacaaagagcttaggagcaagctgcatgagatggaaggtgctgtaaagagcaagtttaaatcaaccatcgcagcactggaggctaagatcgctcaactggaggagcaggtggaacaggaggcacgggagaaacaggcagctacgaagtcactgaagcagaaagataagaagttgaaggaaatcctcttgcaggtggaggacgagagaaaaatggcggagcagtataaagaacaggctgagaaagggaatgcgcgtgtgaaacagctcaaaagacagctggaggaagctgaagaggagagccagaggattaatgcaaacaggagaaagctccaaagagaactggatgaagccactgagagtaacgaagctatgggacgtgaagtgaatgccctgaagtcaaagctacgcaggggcaacgagactagcttcgtgccgagccgtcggtcaggaggacgtcgtgttatcgagaacgcggatggaagcgaggaagagacggataccagggacgcagactttaatggtaccaaagcatcagaata

SEQ ID NO: 231689 - DNA, 5816 bp, synthetic construct
  misc_feature 1..5816: note = Description of Artificial Sequence: Synthetic coding sequence
  source 1..5816: mol_type = other DNA
atggctcagaaaggccaactcagcgatgacgagaaatttctcttcgtggacaaaaatttcatcaactctcccgtggcccaggccgactgggcagctaagagactggtctgggtaccttcagagaagcagggtttcgaggcggcatcaatcaaggaagagaagggcgatgaagttgtggtggagctagtggaaaatggcaagaaagtgaccgtcggcaaagacgacattcagaagatgaatcctccaaagttcagcaaagtcgaggacatggctgaactgacttgcctgaatgaagctagcgtgcttcacaacctgcgcgaaaggtactttagcgggttaatctatacctattctggtctcttttgcgtggtggttaacccatacaagcatttgccaatttatagcgaaaaaatcgtcgacatgtataagggaaaaaaaagacatgaaatgcccccacacatttacgcaatcgctgatacagcctatcgttcaatgctccaagaccgtgaagatcagtctatcctctgtaccggtgaaagtggggctggaaagacagagaacactaagaaggtcattcagtatctcgctgttgtcgcgtcttcgcacaaagggaaaaaagatactagcattactggggaactggagaaacagctgcttcaggccaaccccattctggaagccttcggtaatgcgaaaactgtcaaaaatgataatagcagcaggttcggtaagtttattcgcataaattttgacgtcaccggctacattgttggagcgaacatcgagacttacctgttggaaaagtctagagccatcaggcaggccagggatgaaaggactttccacatcttctactacatgatcgctggagcaaaggagaagatgcggtctgatctgctgctggagggcttcaacaactataccttcctgtccaatggtttcgttcccatccccgctgctcaggatgacgaaatgttccaagaaactgttgaggcaatggcaataatggggttttctgaggaagagcaactgtcaatcctgaaggttgtgagtagcgttttgcagcttggaaatatagtttttaaaaaagagagaaatacagaccaggcctcaatgcctgataatacggcagcccagaaggtctgtcatcttatggggatcaacgtgacagacttcacccggagcatactcacacctcgcatcaaggttggcagggacgtggtgcagaaggcacagacgaaggagcaagccgattttgcagtcgaggcgttagccaaggctacctatgagaggctgttccgctggatcctgacgagggttaataaggcacttgataagactcatcggcaaggcgcttcgttccttggaatccttgatatagcgggttttgagatcttcgaagtgaattcttttgagcagctatgcattaactataccaacgaaaagctccagcaactcttcaatcacaccatgttcatacttgaacaggaggaatatcagagagaggggatcgaatggaattttattgacttcgggctggacctgcaaccctgcattgaactgatcgagcgcccaaacaatcccccaggggtgctggctctgctcgacgaagagtgttggttccctaaggccaccgataagtcattcgtcgaaaagttgtgcacggagcagggttctcatccgaaatttcaaaagccaaaacagctgaaagataagacagagttctctatcattcattacgctgggaaagtggattataacgccagtgcctggctcacgaagaatatggaccctctgaatgacaacgtgacttccttgctcaatgcatctagcgacaagtttgtggctgacttgtggaaagacgttgacaggatcgtgggactggatcagatggctaagatgaccgaatctagcttgccatccgcttccaagactaaaaagggcatgttccgcacagtcggtcagctctacaaagagcagctcgggaaattgatgacaacgctccgcaataccaccccaaattttgttcgttgtattattccaaaccatgagaaacgatcaggcaaattggacgcctttctcgtgttggaacagctgagatgtaacggcgtactggagggcattagaatatgccggcaggggtttccaaatagaatcgtgttccaggaatttcggcagcggtacgagatacttgctgcaaacgctatccccaaaggcttcatggatggcaagcaggcctgcatcctcatgattaaggctttggagttagacccaaatctgtatcggatcggccaaagtaagatcttcttccggacgggcgtgcttgcccatctggaagaggagcgggatcttaaaattacagacgtcataatggccttccaagccatgtgccgcggttacctggcgaggaaggccttcgccaaacgacagcagcagctgaccgcaatgaaggttatccagaggaactgcgcggcttacctaaagttgcggaactggcaatggtggcgcttatttactaaagtgaaacccctgttacaagtgacgcgccaggaggaggaaatgcaggccaaggaggacgagctccagaagactaaagagaggcagcagaaggcagagaacgagttgaaagagctcgagcaaaaacattctcagcttaccgaggaaaaaaacctgctccaagaacaattgcaggcagagaccgaactatatgccgaggccgaggagatgagggtcagactcgcggcaaaaaaacaagaactggaagaaattcttcatgaaatggaggccaggcttgaggaggaggaagatcgcggtcaacagctccaggcagagcgtaaaaagatggcacaacagatgctggacctggaagaacagctcgaggaagaagaggccgcacggcagaagcttcagctggaaaaggtgaccgccgaggccaaaatcaagaaactcgaggacgaaatactggttatggatgatcaaaacaacaagctgtcaaaggagcgcaagctcctcgaagagcggatctcagacctgaccaccaatctggctgaggaagaagagaaggctaaaaacctgaccaagctgaagaacaagcacgaatcaatgatctctgagctggaagtgcgactgaaaaaggaagagaaatccaggcaggagctagaaaagctgaaaagaaagctagagggcgatgcatctgacttccacgaacaaatagccgatctccaggcgcagatagccgagctcaagatgcagctggcaaaaaaggaggaggagctgcaggctgccctagcgcgactggacgatgaaatagcccagaaaaacaacgctctgaagaagattcgggaactggagggtcatatcagtgatctccaggaagatctcgactccgagcgtgccgctaggaataaggctgagaagcaaaagcgcgatcttggggaggaactcgaagcactaaagaccgaacttgaagacactcttgattctactgctactcagcaggagttgcgtgccaagcgcgaacaggaggtgacagtgttgaagaaggcactcgacgaagagacccgctcacatgaggcccaagtgcaggaaatgaggcagaagcatgcgcaggcggtggaagagctcaccgaacagttagagcagtttaaacgagctaaggcgaacttagataagaataaacagaccctagaaaaggagaacgccgaccttgccggtgagctgcgagtgttggggcaagcgaaacaggaagtggagcataagaaaaagaaactcgaggcccaagtgcaagagctccagtcgaagtgctctgatggagagcgggcacgcgctgaactgaacgacaaggtgcacaaacttcagaatgaggtggaatctgttacaggcatgcttaatgaagccgaaggaaaagcaataaagcttgcaaaagacgtcgctagtctgtctagccagttgcaggacacccaggaacttttgcaggaggagacacgccaaaagctgaacgtgtcaaccaagttgagacagctggaggaagagcgaaattctctgcaggaccagctggatgaggagatggaggccaaacagaacctggagaggcacatctccacactgaatattcagttgagtgattccaaaaagaaactccaagactttgcaagcactgtagaagcattggaggaggggaagaaacgtttccagaaggaaattgagaaccttacccagcagtatgaagaaaaggcagccgcttacgacaaattagaaaaaaccaagaatcgcctgcagcaggagctggatgacctggttgtcgatttggataatcagcgccaactggtgagtaatctggaaaagaagcagaggaaatttgatcaactccttgccgaggagaagaatataagctccaagtatgcagacgagagggatagagcagaagctgaagctagggaaaaggaaaccaaggcgctgagccttgctcgtgcattggaagaggctctcgaggccaaggaggagttggagagaaccaataagatgttgaaagctgagatggaggatcttgtaagttcaaaagatgacgttggtaaaaacgtgcacgaattggaaaaaagcaagagggctcttgagacacagatggaggagatgaaaactcagcttgaagaactggaggacgagcttcaggccaccgaggacgctaaacttcgcctggaggtgaatatgcaggccttgaagggccagttcgagcgggacctccaggctcgcgacgaacagaacgaggaaaagaggcgacagctccagcgccagcttcacgagtacgagacagagctagaagatgaacgtaaacagcgtgccctagcagcagccgcaaaaaaaaaactcgagggtgacctgaaagacctggaactccaggctgatagcgctatcaagggcagagaagaagccattaagcagctgaggaagcttcaagcccagatgaaagattttcagcgcgaactagaggacgccagggcttccagggatgaaatcttcgctacagccaaggaaaatgaaaagaaagctaagagtctggaagccgacttgatgcagcttcaggaggacctggctgcggctgagcgcgcacgaaagcaggccgacctggaaaaggaggagctggccgaagaactagctagcagcctgagcgggaggaacgctttgcaagatgaaaaaagaagactcgaggcacgcatagcccaactggaggaggaactggaggaagagcaaggaaacatggaggctatgtcagacagagtcaggaaggccacacaacaagctgaacagctgagcaatgaactagccacggagagatcaacagcgcaaaaaaacgagtccgcccgtcaacagcttgaacggcagaacaaggagctccggtctaagttgcatgagatggaaggagccgtgaagtccaaattcaagtcaaccatcgccgcactcgaggccaaaatagcccagttggaggaacaggtggagcaggaggcacgagagaagcaagccgcaacaaagtccctgaaacaaaaagataagaagctcaaggaaatcctgctgcaggttgaagacgagcggaagatggctgaacagtacaaagagcaagccgaaaaaggaaatgctagggtgaagcagctcaagcggcaactggaggaggctgaagaggagagccaaaggattaacgccaaccggaggaaactgcagcgagagctcgatgaggctacagaatctaatgaagccatggggagggaagtcaacgccctcaaatctaagctaagagggcctcccccacaggaaacatcccagta

SEQ ID NO: 231690 - DNA, 6089 bp, synthetic construct
  misc_feature 1..6089: note = Description of Artificial Sequence: Synthetic coding sequence
  source 1..6089: mol_type = other DNA
atggcccaaaagggtcaactcagcgacgacgagaagttcctctttgtcgacaaaaattttatcaattcaccagtggcccaggccgactgggccgctaagcgcctggtttgggtaccgagtgaaaagcaaggattcgaagccgcttccatcaaggaggaaaagggggacgaagtggtcgtggagttagttgaaaatggtaaaaaggtcaccgtgggtaaagatgatatccagaagatgaaccctcccaaattcagtaaggtcgaggacatggctgaactcacctgtctgaatgaagcgtcagttctgcataacctgcgggaaaggtacttcagtgggctcatctatacctattcaggactgttctgcgtagttgttaatccatacaagcacctgcccatctattctgagaaaatcgttgatatgtataagggcaaaaagcgacacgagatgcctcctcatatctacgcaattgcagatacagcatataggagcatgctgcaggatcgggaagaccagagcattctctgtaccggagaaagcggagcgggtaagaccgaaaacacgaaaaaggtaatccagtacttggcagtggtcgcctctagtcacaagggaaaaaaggacacatctatcactgagggcccttcgttctggaggggtgagctggagaagcagctccttcaggctaacccaattttggaggcattcggcaatgccaagacggtgaaaaacgacaattcatcccggtttggcaaattcattcggattaatttcgacgtgacaggttacatcgtgggtgccaacattgagacctacctgcttgagaaatctcgggcaattcgacaggctcgtgacgagcgcacttttcacatcttctactacatgatcgcaggcgctaaagaaaagatgagaagcgacctgctcttagagggatttaataattacacctttctgtccaatggctttgtccccatacctgctgcacaggatgatgagatgttccaagaaacagtggaggcaatggcaattatgggattttctgaagaggaacaactgtcaattctcaaggtcgtgagtagtgtccttcagctaggcaatatagtctttaagaaagaaaggaacaccgatcaggccagcatgcccgacaacacagccgctcaaaaagtctgtcatctgatgggaattaacgtgaccgactttaccaggtccatccttactcctagaatcaaagtgggccgagacgtggtccagaaagcccaaactaaagaacaagccgatttcgcagttgaagccttagccaaagcaacctacgaaaggctgtttagatggatactgactagggttaacaaagctctcgataaaacgcaccggcagggggcttccttccttggcatattagacattgcgggattcgagatattcgaggtgaactccttcgaacaactctgtatcaactacacgaacgagaagctacagcagctgtttaatcatacgatgttcatcctggagcaggaggagtatcagcgagaggggattgagtggaacttcatagattttgggcttgacctacagccatgtattgagttaatcgagaggcctaataatcctcccggtgtccttgccctgttggatgaggaatgctggttcccgaaagctaccgacaagtcattcgttgagaagctttgtactgaacaagggtcacacccaaaatttcagaaacccaagcagcttaaagacaagacagagttcagcattatacattatgcaggcaaagtcgattacaatgcctccgcctggctgaccaagaatatggatcccctgaatgataatgtgaccagcctactgaacgcaagttcagataagttcgtcgccgacctgtggaaagacgtcgacagaattgtcggattagaccagatggccaaaatgaccgagtccagcctcccctctgcttcaaagaccaaaaaaggcatgttccgcaccgttggccaactgtacaaagagcaactgggcaaactcatgaccacgcttcgtaacaccacacctaacttcgttcggtgcatcatccccaaccacgaaaagaggtcaggcaaactggatgcctttcttgtactggaacagctcaggtgcaacggggttctggaaggcatccggatttgtaggcaaggatttcctaatcgcatcgttttccaagagttcagacagcgctatgagatccttgccgcaaatgccattcccaagggctttatggatggaaagcaggcttgtattcttatgattaaagcgctggaacttgacccaaatctatatcgaatcgggcaaagtaaaatcttcttccggacaggagtcttggcacatctggaagaagaacgggatctgaagattacggatgtcatcatggcctttcaagctatgtgcagaggatatctggcaaggaaggcattcgcaaagcgacaacagcagctgacagctatgaaggtgattcaaaggaattgcgccgcatacctcaagcttaggaactggcagtggtggcggctgtttaccaaagtgaagccactgcttcaagtgaccagacaggaggaagagatgcaggccaaagaggatgagctgcagaaaactaaggagaggcaacagaaggctgaaaatgagctaaaggagttagagcagaaacatagccaacttacggaagaaaaaaatctgttacaagagcaactgcaagcagagacggaactgtacgccgaagcagaagagatgagagtgagattggctgccaagaagcaggagctcgaagagattctgcacgaaatggaggcacgcctggaggaggaggaggataggggccagcagctgcaagccgagcgaaagaagatggctcagcagatgttagacctcgaagagcaactagaagaggaggaggcagcacgccagaaattgcagctcgagaaagtgaccgcagaagcaaagatcaaaaagctagaggacgagatacttgttatggacgatcaaaataacaagcttagcaaagagaggaagcttctggaagagcggataagtgacctaacgactaacctcgctgaggaggaggagaaggctaagaaccttacaaaactaaagaataaacatgagtctatgatctccgagctcgaggttcggctgaagaaagaagaaaaaagcaggcaggaactggaaaaactcaaaagaaaactcgagggagatgccagtgacttccacgagcaaatcgccgatcttcaggcacagattgcagaactaaagatgcagctagctaaaaaagaggaagaactccaagcagctctcgcgagattggatgatgaaatcgcgcagaaaaataatgcacttaaaaaaatcagggagctggaaggccatataagtgacttgcaagaggacttggactccgaaagggctgccaggaacaaggcagaaaaacagaagcgagatctcggagaagagctcgaggctctgaaaactgagctagaagatacactggactccaccgccactcagcaggagcttcgagcaaaaagagaacaggaggtcacggtcctaaaaaaagctctggacgaggaaactcgtagccacgaggcgcaggtgcaggaaatgcggcagaagcacgctcaagcagtggaggaactgaccgagcagctggagcagtttaagcgggcaaaggcaaatctcgataaaaataagcagaccttagagaaggaaaacgctgacttagctggagagctgagagtgctgggacaggccaaacaggaggtggaacataagaagaaaaagttggaggcgcaggtacaagaacttcagtctaaatgtagcgacggcgaacgggctagagcagaactcaacgacaaggtgcataagttacagaacgaggtggaatccgtcacgggtatgctgaatgaggccgagggcaaagccataaaactagctaaagacgttgccagcctctcttcccaactgcaagacacacaggaactcttgcaagaggagacccgccagaaactgaacgtttctacaaaactgcgacaattagaggaagaaagaaacagtttgcaggatcagctggacgaagaaatggaggctaagcagaatttagagcgccacatatccactctaaatatacagctgagtgactctaaaaaaaagctgcaggactttgcaagtactgtcgaggcgctcgaagaagggaagaagcggtttcaaaaagagatagagaatcttactcagcaatacgaagagaaggccgcagcctacgataagctggagaagacaaagaatcgactccagcaagaactcgatgacctcgtcgtcgatctggataaccaaagacagctagtgtcgaacttagagaaaaagcagcgtaagtttgatcaactactggccgaggagaagaacatctctagcaaatacgctgacgaacgagatagagctgaggcagaggcacgcgagaaggaaactaaagccttgagtctggcccgtgctctggaggaggcacttgaagccaaagaagagttggagagaacgaataaaatgcttaaggcggaaatggaggacctcgtgtccagtaaggatgacgtggggaaaaacgtccatgagttggaaaaatctaagagggcgttggagactcagatggaagagatgaaaacccagctggaggaactcgaggatgagctccaggcaacagaggacgctaaactgcgcctcgaggtgaatatgcaggcactgaagggtcagttcgagcgcgatctccaggcaagggacgagcagaacgaagagaagcgtcgacagctacagcggcagctgcatgagtacgagacggaattggaagatgagaggaaacagagagccttggctgccgcagcaaagaaaaagctggagggcgacctgaaggatctggagttgcaggccgactctgcaataaaaggtcgggaagaggcaattaagcagctccggaagctgcaggcacaaatgaaggacttccagcgtgagttagaggacgcacgcgcatctcgggacgaaatttttgccacagctaaggagaacgaaaagaaggccaaaagcctggaggccgaccttatgcagctgcaggaggatcttgctgctgctgagagggcacgcaaacaggcggatcttgaaaaggaggaactggccgaagagttggcatcttcactcagcggtcggaatgcgttgcaggacgagaagcgcaggctcgaggctcggatagcacagctcgaagaagagctggaggaggaacaggggaacatggaggcaatgtctgatcgtgtgcgcaaggccacacaacaagcagaacaactgagcaatgagttagccacggagaggtcaaccgcacagaaaaatgaaagcgcccgtcaacagttggaaagacaaaacaaggaattaagaagcaagctccatgaaatggagggcgcagtgaaatctaaatttaagagcacgattgccgcactggaggccaagattgcccaactcgaagaacaagtcgagcaggaagcaagggagaagcaagccgctaccaaaagccttaaacagaaggataagaaattgaaagagattctcctgcaggttgaggacgagcggaaaatggccgaacaatacaaggagcaggccgagaagggcaatgctagagttaaacagttgaaacgccagttagaggaggcagaagaagagtctcagagaatcaacgctaaccggcgaaaactgcagcgggagctcgatgaagcaaccgagagcaatgaggccatgggccgagaagttaacgcgctgaaatcgaaacttcgcggacctccacatcggaagctgcgctccgatgcacctggagaggaaacccggcctttgtcgttcctcctagagggactggaggatgtcgaactgttaaagatgcagatggttctgcggagaaaacggacgttggagacgcagacttccatggagccaaggccggtaaataagcagctgtctaccgtgctccatcatggtaagaaaactaagaaccaaaataagcaaaccaagaaaacccagcagcaacccagaacgaaacagaatcccgctgattgtacata

SEQ ID NO: 231691 - DNA, 5939 bp, synthetic construct
  misc_feature 1..5939: note = Description of Artificial Sequence: Synthetic coding sequence
  source 1..5939: mol_type = other DNA
atggcccagaaagggcagctctccgacgatgagaagttcctgttcgtggacaaaaacttcataaacagtccagttgcccaggctgactgggctgctaaacgcctggtttgggtcccctccgagaaacagggcttcgaggctgccagcataaaagaggagaaaggtgatgaagtggtcgtggaactagttgaaaatggcaagaaagtcaccgtcgggaaggatgatattcagaagatgaatcctcctaaattctcaaaagtcgaagatatggcggaattgacatgcctgaatgaggcttctgtgctgcacaacctgagggagagatatttttctggcctgatttacacctactccggtttgttctgtgtggtagtgaacccatacaagcacctcccgatctacagcgagaagatcgttgacatgtacaaggggaagaaacgccatgagatgcctccacacatctatgctatagccgataccgcctaccgcagcatgctccaggatcgcgaggatcagagcatactgtgtacaggcgagtcaggcgctggcaaaactgagaatactaagaaggtgattcagtacttggccgttgttgcatcctcacataaaggaaaaaaggacacaagtatcactcagggcccttccttcgcatatggagagctcgagaaacagctgcttcaggcaaacccgattctggaggcgtttggaaatgcgaaaacagttaagaacgacaactcaagcaggtttggcaaattcatacgcattaattttgatgtcactggttacatagtaggggctaatatcgagacctatctgctcgagaagagtagggcaatacgccaagcacgggacgagcggacattccatatcttctactatatgattgcaggagcgaaagaaaagatgcgatccgacctattactcgaagggttcaacaattatactttcctgtctaacgggttcgtccccattcctgctgcacaggatgatgagatgttccaggagaccgtcgaagccatggccattatgggattcagcgaggaggaacaactgtcgatccttaaggtggtgtcttcagtgcttcaactgggcaacattgtctttaagaaggagcggaatacagaccaggcaagcatgccagacaatacggctgcacagaaagtatgtcacctgatggggattaatgttacagattttacgcgttccatcctgacccccagaatcaaagtcggtagagacgtggttcaaaaagctcaaaccaaagagcaggccgactttgccgtagaggccctcgcaaaagctacctacgaacgcctgttcagatggattctgacacgtgtgaacaaggcactcgacaagacccacaggcagggagcttcatttctagggatactggatattgccggtttcgagatcttcgaagttaactcctttgagcagctctgcatcaattacactaatgagaagctccagcagctattcaatcacacaatgtttatcctggaacaagaagagtaccaaagagagggcatcgagtggaattttatcgattttgggcttgacctgcagccttgcattgaactgattgagcgaccaaacaatccgcctggcgtgctagctcttcttgacgaagagtgctggtttcccaaagctactgacaagagttttgttgagaagttgtgcactgaacaggggagtcaccccaagtttcagaagccaaagcagctgaaggataagaccgaattcagcataattcattacgccggtaaggtagattataatgcgtccgcctggctcactaagaatatggatccattgaatgacaacgtgaccagtctcttaaacgcctcctctgataaattcgtcgccgacctctggaaagacgttgacagaatagtcggtcttgaccaaatggcaaagatgaccgaaagctctctgcctagtgcgagtaaaaccaaaaaaggaatgtttagaaccgtgggacaattgtacaaggaacagctgggcaagctcatgaccacactcaggaatacgacccctaacttcgttcgatgcattattccaaatcacgagaaaagatctggcaaattagacgctttccttgttctcgagcagttgcgctgtaacggggtccttgaagggattagaatctgtaggcagggctttccgaatagaattgtgttccaggagtttaggcaacgctacgagatcttagcagccaacgccattcccaagggcttcatggacgggaagcaggcctgtattttaatgataaaagcattggaactggacccaaacttgtatcggattgggcagtctaagatcttctttcgaacaggagtgctcgctcatctggaggaggagagagatctgaaaattactgacgtcatcatggcttttcaagccatgtgtagaggctatctagccaggaaagccttcgctaaaaggcaacagcagctaacagccatgaaagtgatccagcgaaattgcgcggcatacctgaagctgcggaactggcaatggtggcgactgttcacaaaggtgaaaccccttctgcaggtgacgaggcaagaggaggaaatgcaggcaaaggaggacgagttgcagaagactaaggagaggcagcagaaagccgaaaacgagctgaaagagctggagcaaaaacatagccagctgaccgaggagaagaaccttttgcaggagcagttgcaggctgaaactgagttatatgccgaagcagaagagatgcgggtccgcctcgccgctaagaaacaggagctggaagaaattctgcatgagatggaggccagacttgaggaagaggaagatagaggccagcagctgcaggcagagcgtaagaagatggcgcagcagatgctcgatttggaggagcagttggaggaagaggaagccgcaagacagaaactccagctggagaaggtgacagcagaggctaagatcaaaaagttggaggacgaaatcctcgtaatggacgatcagaataataaactgagcaaagagcggaagctcctggaagagcgtatttctgacttgacaaccaatctcgcagaggaggaagagaaggcaaagaacctgaccaagctgaaaaataagcacgagtctatgatctctgaattggaggtgcgcctgaaaaaagaggaaaagtcaagacaggagttggagaaactgaaacgtaaactggagggagatgcaagcgatttccatgagcaaatcgctgacctgcaagcccagattgcagaattgaagatgcagcttgctaaaaaggaagaagaattgcaagctgctttggcccgacttgacgacgagattgcccagaagaataacgcgctgaagaaaatccgggaattggaggggcacatcagcgaccttcaagaggatttagactctgaacgagcagcccgaaataaagcagagaagcagaaacgcgatctgggagaagaactggaggctttgaaaacggaactggaggacacgctggatagcacagctacccagcaggaactgagagccaagcgggaacaagaggttaccgtgctcaagaaggctttagatgaggaaacccgctcccacgaggcccaggtgcaggaaatgagacagaagcatgcccaggctgtcgaagaactaacggaacaattggagcagttcaaaagagccaaagcgaacctggacaagaataagcagacattggagaaggagaatgcagatttggctggcgaattaagagtgctggggcaggccaagcaggaagtggagcataagaagaagaaactcgaagcccaggtgcaggagctgcagagcaagtgcagtgatggagagcgagccagggcggaactgaatgataaagtacacaaattgcagaatgaggtggaaagcgtgacaggcatgcttaatgaagcagaaggcaaggcaattaaacttgccaaagacgtcgctagcctgagtagtcagttacaggatacccaggaattactgcaggaagaaaccaggcagaagctgaacgttagtaccaagctgcgccagctcgaggaggagaggaattccctccaagatcagctggatgaagagatggaggccaaacagaaccttgagcggcacatctccacccttaatatacagttaagcgactccaaaaagaaactgcaggatttcgcgagtaccgttgaggcgttggaggagggaaaaaagcggtttcagaaggagatcgaaaacttgacccagcagtacgaagaaaaggctgcagcttatgacaagctggaaaagaccaaaaaccgactccagcaggaacttgacgacttagtggttgacttggataaccagagacaacttgtgtctaacctggagaaaaagcagcgaaaatttgaccagttactggcagaggaaaagaatatttcaagtaaatatgcagacgagcgcgaccgcgctgaggccgaagcaagggaaaaagagacaaaggctctctcgctggccagagcactggaagaagcactcgaggccaaagaggaactggagcggaccaataagatgctcaaagcagagatggaggatctggtcagcagtaaagatgatgtgggtaagaatgtgcacgagctggagaagtccaagcgggcactggaaacccagatggaagagatgaaaacgcagctcgaggagttagaagacgaacttcaggctactgaagacgctaagctgcgacttgaagtaaatatgcaggctctcaaaggccagttcgagagagatttgcaggccagagatgagcaaaatgaggagaagaggcgccaactgcagcgccagcttcacgaatatgagacagagctggaagatgagagaaagcagagagcactggccgcagccgctaagaaaaagctggagggcgacctcaaggatttggagcttcaggccgatagcgcgatcaaaggtcgggaggaggcaataaagcagttgagaaaattacaagctcagatgaaggacttccagagagaactggaagatgcaagggcctcccgggatgagatctttgcgaccgcaaaggagaacgagaagaaagccaaaagcctggaggccgacctgatgcagctccaggaagacctcgccgcagccgagagggccaggaagcaggccgatctcgagaaagaggagctggctgaagagctcgctagcagtttgagcggtcgcaacgccctgcaggacgaaaaacgcaggctggaagctcggatcgcacaactggaggaagagttggaagaggagcaggggaacatggaagctatgagtgatcgcgttaggaaggcaactcagcaggccgagcagctctctaatgagctagccaccgaacggagcacggctcagaaaaacgaaagcgctagacaacagctggaacgccagaataaggaactccggtcgaaacttcatgagatggaaggagccgtcaagagtaagtttaaatcgacgatagccgcactcgaggccaagatcgctcagcttgaggagcaggtggaacaggaagccagggagaagcaggcagcaaccaaaagtctcaagcagaaagacaaaaagcttaaggaaatattattgcaggtggaagatgagaggaaaatggcggagcagtacaaggagcaggctgagaaaggcaatgcgcgtgtgaaacaactcaaacggcaactggaagaagccgaagaggagagccagcgtatcaatgctaatcgtaggaaactgcagagggagctggatgaagcaaccgagagcaacgaggccatggggagggaggtcaatgctctcaagtcaaaattgagaagggggaatgagactagtttcgtcccatctcggagatccggtggacggcgagttattgagaatgcagatggaagtgaggaggaaacagacacacgagacgctgactttaacggaaccaaggcctccgagta

SEQ ID NO: 231692 - DNA, 5837 bp, synthetic construct
  misc_feature 1..5837: note = Description of Artificial Sequence: Synthetic coding sequence
  source 1..5837: mol_type = other DNA
atggcccagaaggggcagcttagcgacgatgagaaatttttatttgtggacaaaaacttcatcaacagccctgtggcccaggccgactgggccgcaaagcggttagtgtgggtcccatctgagaagcagggcttcgaagccgcatcaatcaaagaggaaaagggtgacgaggtggtcgttgaactggtggagaatggcaagaaagtcactgttggtaaggacgatatccagaaaatgaacccacctaagttcagtaaagtcgaggatatggcggaactcacatgcttaaacgaagcatccgttctgcacaatctgagagaacggtatttctcgggactgatttatacgtactccgggctcttctgcgtcgtcgtgaatccctacaagcatctgccaatctactctgaaaaaatcgtggatatgtacaaaggtaagaagcggcacgagatgccaccccatatctacgcaatagccgacactgcttaccgctctatgctacaggacagggaggatcagagtatactgtgtaccggtgagagcggcgctggaaagactgagaatacaaaaaaagtcatccagtacctggcggtcgtggcatctagccacaagggcaagaaagatacatctattacgcagggtccaagcttcgcttacggtgaactagagaagcagttgctgcaggctaaccccattctcgaggccttcggaaatgccaaaacagtgaagaatgacaattcatccagatttgggaagtttatccgcatcaatttcgatgtcacaggatatatcgtgggcgctaatatcgaaacttatctccttgaaaagtcaagggcaatccgacaggccagagatgaaaggacctttcatattttctactacatgattgctggcgcaaaggagaagatgaggtccgatctgctgctagaggggtttaataattatacatttttatccaacggcttcgtccccatcccagcagcccaggatgacgaaatgttccaagagaccgtcgaggctatggctatcatgggtttctctgaggaggaacagctgagtatattaaaggtcgtctctagcgtgctgcaattaggcaacatagtgttcaaaaaagagcgcaataccgaccaagccagcatgcctgataacacggccgctcagaaggtctgccacctcatgggaatcaacgtgacagatttcacacgatccattttgacaccacgcatcaaggttggccgagatgtggtgcagaaggcccagactaaagagcaggccgactttgctgtcgaggcactggccaaggctacctacgaacggctgttccgatggatcctgactcgtgtcaataaggctctggacaaaacacaccgtcagggggctagtttcctggggatcctcgacattgcaggttttgagatcttcgaggtgaatagtttcgagcagctctgtataaactacactaacgagaagctgcagcagttgttcaaccacacaatgtttatactggaacaggaggaatatcaacgggaaggcatcgagtggaactttattgattttggccttgatctccagccctgcattgagctaatcgaacgccctaataatcctcccggtgttctggccctcttggacgaagagtgctggttccccaaggccactgataagtccttcgtggagaagttgtgcacggaacagggatcccaccccaaattccaaaaacctaaacagctcaaagacaagacagagttctctataattcattacgcaggaaaggtggactataacgcctccgcctggctaaccaagaatatggatcccctgaatgataatgtgacatcccttctgaacgcctccagtgacaagtttgtggcagatctctggaaagatgtcgacaggatagttggcctggatcagatggccaagatgaccgagtcgagcctgcctagcgcaagtaagacaaaaaagggcatgtttcgcacagtgggccagctgtacaaagaacaattaggaaaactaatgacaactctccgcaacactacccccaatttcgtcaggtgtattattcctaaccacgaaaagagaagcgggaaacttgacgctttcctcgtgttggaacagctgcgctgcaatggggtcctggaaggcatccgcatttgtagacaagggtttcctaatcgtattgtcttccaggagtttagacaaaggtatgaaatactggccgctaatgctatccccaaaggattcatggatggtaagcaagcatgcattctcatgatcaaggccctggagttggatcctaatctgtatcgaatcggacaaagcaagatcttcttccgtaccggcgtactggcacatctcgaggaagagcgggaccttaagatcacggacgtaattatggctttccaagcgatgtgccgtggttacttagccaggaaagcttttgccaaacgccagcagcagttaacagccatgaaagtgatccagcgcaattgcgccgcttatctgaagctgaggaactggcaatggtggcgcttattcaccaaggtaaagcccttactgcaggtgacaaggcaggaagaagagatgcaagcaaaagaagatgaactccagaagaccaaggaaaggcaacagaaggccgaaaatgaactgaaggagttggaacagaaacactcccaattaacagaagaaaaaaacctgctgcaggagcagctacaggccgagactgagttatatgcagaggccgaggaaatgagggtacggctggccgcaaagaagcaggagctagaggagatcctgcacgaaatggaggcccgtctggaggaagaggaggatcgaggacagcaactgcaggctgagagaaagaagatggcccagcaaatgcttgacttggaggagcagctagaggaagaggaggcagccaggcagaaactccaactcgagaaggtaaccgcagaggccaagatcaagaagcttgaggacgagatcctggttatggatgaccagaacaataagctgtctaaggagcgcaagctgctcgaggagagaatctcagatctgaccaccaacctggccgaggaagaggagaaggcaaagaatctgacgaagctcaaaaacaagcatgagtctatgatcagcgagctagaggtacggctgaaaaaagaagaaaaaagccgccaggaactcgagaaacttaagagaaaacttgagggagacgcatcagacttccacgagcagatcgcagacctgcaggcccagatagccgaactgaagatgcagctggccaaaaaggaagaggaactgcaggctgctcttgcacgccttgatgacgaaatcgcgcagaaaaataatgccctaaagaagattcgcgaactagaaggacacatctcggaccttcaggaagatctggacagcgaacgcgctgcccgaaacaaggcggagaaacaaaagcgcgaccttggcgaggagctcgaggctttgaagactgaactcgaggataccctggattccacagccacccagcaggagctcagggctaaacgtgagcaagaggtaacggtcctaaagaaagcacttgatgaagaaactcggtctcatgaggctcaagtgcaggagatgcggcagaaacacgcccaggcagtggaggagctcaccgagcagctcgagcaattcaagagagctaaagctaacctggacaagaacaagcagactctagagaaagaaaacgcggatttggccggagaactacgcgtgctgggacaagctaagcaggaagttgagcacaagaagaaaaaattagaggcccaggtgcaggagcttcagtcgaagtgttccgacggtgagagagcccgtgccgagctgaacgataaggtgcacaaacttcagaacgaggtggaaagcgttacgggcatgctgaatgaggcagagggaaaagctattaaactcgctaaggatgtagcaagtctgagttctcagctgcaggatacccaagagttgctgcaggaggagactagacagaagctcaatgtctcaacgaagctgcgccaactagaggaagagcggaacagtttacaggatcagctggatgaagagatggaggccaagcagaacttggagcggcacatctcaaccctcaacatacagctgtcagatagcaagaagaaactgcaggatttcgcctctactgtggaagccctcgaggagggaaagaagcggttccagaaagagatagaaaatctcacccagcaatacgaagaaaaggcagctgcatacgacaaactggagaagactaaaaacagacttcagcaggagctagatgatctagtagtcgacttagataatcaacggcagctggttagcaatctcgaaaaaaagcaaagaaagttcgaccagctgttggcagaagagaaaaatatatcctcaaaatacgccgacgagcgggaccgtgccgaggccgaggcgcgtgaaaaggagaccaaagccttgagtttagctcgtgccctagaggaggctcttgaagccaaggaggagctggaaaggacaaacaagatgctgaaggccgaaatggaagacctggtttccagcaaagacgacgttggcaagaatgtgcacgagctggaaaagtcaaaaagggccttggagactcagatggaagaaatgaagacccagctggaagaactcgaggacgagcttcaggcaaccgaggatgcaaagctgcggttagaagtgaatatgcaggccctcaagggccagttcgagcgggatctccaagcccgtgatgaacagaatgaggaaaaacgcagacagctccagcgccagctgcatgagtacgagacagagctggaggatgaaagaaaacagcgggctctcgccgctgctgcaaagaaaaaactcgaaggggatcttaaagacttggagcttcaggccgactccgccattaaaggacgcgaagaagccattaaacaactgaggaaactccaggcccagatgaaggatttccagcgcgaactcgaggacgctcgtgcctcaagagacgaaatttttgccacagcaaaagagaacgagaagaaggcgaaatctctggaagctgatctgatgcagctccaggaagacctcgctgctgcagagagagctaggaaacaagccgacttagaaaaggaggagttggccgaagagctggcctcctcactttcagggaggaacgccttacaggacgagaaaagacgactagaagcacgaattgcccagctggaggaggagttagaagaggagcaagggaacatggaggccatgtcagaccgggtccgaaaggccacacagcaggcagagcagctttctaatgaacttgccactgaacgtagcacagcccagaaaaatgagtcagcccgtcagcagcttgagaggcaaaacaaggagctccgaagcaaactacatgaaatggaaggggctgtgaaatccaagtttaagtccacaatcgccgcactcgaggccaaaatcgcccagctggaggagcaggttgagcaagaggcaagagagaaacaagccgctaccaagtctctcaaacaaaaggacaaaaagctcaaggagatcttgctgcaggtggaagacgaaaggaaaatggctgagcaatacaaagaacaggccgaaaaaggaaacgcacgggtaaaacaactgaaacgccagctcgaggaggccgaagaggaatcacagcgaattaatgcaaatcggcgtaagttgcagcgagagctagatgaagctaccgagtcgaatgaggccatgggcagagaggtgaacgcgctgaagagcaagctgagaggccctccaccacaggagaccagtcagta

SEQ ID NO: 231693 - DNA, 5817 bp, synthetic construct
  misc_feature 1..5817: note = Description of Artificial Sequence: Synthetic coding sequence
  source 1..5817: mol_type = other DNA
atgtcttccgacgcagagatggcaatcttcggtgaggctgccccttaccttcggaagccggaaaaggagcgcatcgaagcacagaaccgtccgttcgactcgaagaaagcttgttttgtcgcagataacaaagaaatgtacgtcaaaggcatgatccagacacgtgaaaatgataaggttatcgtcaagacactcgacgataggatgctgaccctgaataatgatcaagttttccccatgaaccctccaaaatttgacaagatcgaagatatggccatgatgacacatcttcatgagcccgctgtgttgtacaacttgaaagagaggtatgccgcatggatgatatacacttacagcggcctgttctgcgtaacggtgaatccgtataaatggctgcctgtctacaagccggaggtcgtcgccgcatatcgaggaaagaagagacaggaagcccctccccacatctttagtatttccgacaacgcgtaccagttcatgctcaccgaccgtgacaaccagagcatactaattacaggtgagtctggggcaggtaaaacagtcaacaccaaacgagtgattcagtactttgctacaattgccgttactggggataagaagaaagaaactcaaccgggaaagatgcagggcactctagaggatcagattatacaagcaaatccgctgcttgaggcctttgggaacgcaaagacggtaagaaatgacaattcttccagatttggaaaatttatcaggatacatttcggcgctaccgggaagctagctagtgctgacattgagacctatctgctggagaaaagtcgtgtgacctttcagctctctagcgagcgctcttatcatatcttctatcaaatcatgtccaacaaaaagcccgagcttatagacctcctgctgatatctaccaaccctttcgatttcccatttgtttcccagggggaggtgaccgtggcttcgatcgacgacagcgaagaactcctggcaaccgataacgcaatcgatatcctgggcttctcttctgaggaaaaggtcggaatttataaactgacgggtgccgtcatgcattacgggaacatgaagttcaagcagaagcagcgcgaggaacaggcagagccagatgggacagaagttgctgacaaggccggatacttgatgggcttaaattcagctgaaatgttaaaggggctgtgttgtcctagagttaaggttggcaacgagtatgtgacaaagggccaaaacgtgcagcaagtcacaaattctgtaggagctctcgcgaaggcagtgtatgaaaaaatgtttctgtggatggtaactcggattaatcagcagttggatactaaacaacctagacagtacttcatcggagtgctagacattgccggtttcgaaatatttgacttcaattctctggaacagttgtgtatcaatttcaccaacgagaagctccaacagttcttcaatcatcacatgtttgttctggagcaagaggaatacaaaaaggagggcattgaatgggagttcattgatttcggaatggatctggccgcttgcatcgaactcatcgagaaacctatggggatcttctccatcttggaggaggaatgtatgttcccaaaggccaccgatacgtcctttaaaaataaactctatgatcaacatctcggtaagagtaataatttccaaaagcccaagccagccaaagggaaggccgaggcacatttttctctggttcactacgctgggactgtggactataacatcgccggatggctcgataaaaataaggatccattaaatgaaactgtggttggcctttaccaaaagtcgtccctcaagttactctcgttcctcttctctaattacgctggtgccgagacaggggatagcggtgggtccaaaaaagggggaaaaaagaagggatcgtcattccagacagtctccgccgtgtttcgggaaaacctaaacaaattgatgaccaatttgcggtcgacacacccccactttgtgcggtgtctcattcctaacgagacaaagactcctggggtaatggaccactacctcgttatgcaccagcttcggtgcaatggggtgctggaaggtattaggatctgccggaaggggtttcctagtcgaatactctacgcggatttcaaacagaggtacaggatccttaatgcctccgcaatacctgaggggcagttcatcgattccaaaaacgcatcggagaagcttctgaacagcatagacgtcgaccgagaacagttcagattcggtaacaccaaagtgttcttcaaggcaggactcctgggcctgctggaggaaatgcgagacgagaagctggtgactcttatgacctccactcaagcagtgtgccggggatacctcatgagagtagaattcaagaagatgatggaacgaagggatagcatattctgtatacagtacaatatccggtccttcatgaacgtgaagcattggccctggatgaatctctttttcaagattaagcccttattgaaaagtgccgaggctgaaaaagagatggcgaccatgaaggaggatttcgagaggaccaaagaggagctcgctcggtcagaggcccgtcgtaaggagctggaagaaaaaatggtctccctgcttcaggaaaaaaatgacctgcagctgcaagtgcaatccgagacggagaacttaatggacgcagaggaacggtgtgaagggctaattaagagcaagattctgctggaggctaaggtgaaagagttgacagagaggctagaggaggaggaagagatgaactctgagctagtggccaagaagcggaacctggaggacaaatgtagttctctcaagagagatatagatgacctggagctaacgctcaccaaggtcgagaaggagaagcacgcaactgagaacaaagtgaagaacttatccgaggagatgacagcacttgaggaaaacattagtaaactgacaaaggagaaaaaatcactccaggaggcacatcaacagacgcttgatgacttgcaagttgaggaggacaaagtcaatgggttaatcaaaatcaacgcaaaactggaacagcagaccgacgatctcgaaggtagcctggagcaggaaaaaaaattacgtgcagacctcgaacgcgctaagaggaagctggagggagacctgaagatgtctcaggagtccattatggatctggagaacgataagcagcaaatcgaggagaagctcaaaaagaaagagttcgaactgtcgcaactgcaagccaaaatcgacgatgaacaagttcacagcttgcaatttcagaagaagatcaaggagctgcaggctcgcattgaggaattagaagaagagatagaagcagagcataccctgcgcgctaaaattgagaaacagagaagcgacttggctagggaactggaagagatatctgaaagactcgaagaggcttccggagcaacctcagctcagattgaaatgaataagaaaagggaggctgaattccaaaaaatgagacgggatctggaggaggctacattgcagcatgaagccactgctgcaacactaagaaagaagcaggcggactcggtcgccgagctgggcgagcagatcgacaacctccagcgggttaagcagaagctggagaaggagaaatcggaattgaagatggaaatagacgacatggctagtaatattgaggccctgtctaagtcgaaaagtaatatcgagcgaacctgcagaactgtcgaagaccaatttagtgagatcaaggcaaaggacgaacagcagacgcagcttattcatgacctaaatatgcagaaggccagactccagacgcagaatggcgaactgagtcatagagtagaggagaaggagtctcttatatcgcagttaacgaagtccaaacaagcacttacccagcagctcgaggaattaaagcgccaaatggaggaagaaaccaaggcaaaaaacgccatggctcacgcattacagagctccagacacgattgtgacctgctcagagagcaatatgaggaggagcaggaggcgaaagcagaactgcaacgggctctttcaaaggccaactccgaagtggcccagtggagaactaaatacgagacagacgccatccagagaacagaggaactcgaggaggctaagaagaagctcgctcaaagattgcaggaggccgaagaaaacaccgaaacagctaattctaagtgtgcttccctggagaagaccaagcagcggctccagggagaggtcgaggatctcatgcgagatctcgagcgctcccacacggcttgtgccacactcgacaagaagcaaagaaatttcgacaaggtcctcgcggaatggaagcaaaagctagatgagtcccaggctgagctggaggccgctcagaaggaaagcagaagtttgtccacagagcttttcaaaatgcggaatgcctatgaagaggtagttgatcaactggaaaccctcagacgggagaataaaaaccttcaagaagagatctcggaccttacagagcagatcgccgagacaggcaaaaaccttcaagaagccgaaaagacaaaaaaattggtggagcaagaaaagtccgatctgcaggtggcactcgaggaggttgaaggatcactggagcacgaggagagcaagattctgcgtgtgcaattggagctgagccaagtcaagagtgaacttgacaggaaggttattgagaaggatgaggaaattgagcagctcaaacgcaattcccagagagccgctgaagcattacagtctgtgctggacgcagaaataaggagtaggaatgacgctctgcggttgaaaaagaagatggaaggcgatctgaatgaaatggagattcaactcggccattccaaccgccagatggctgagacgcagaagcacttacgtacagttcagggacagcttaaggacagccagctgcatctggatgacgcacttcggtccaacgaggatctgaaggaacagctcgcgatagtggagcgacgaaatggcctgctgctagaggaattggaggagatgaaagtcgccttggaacaaactgaacggactcgtaggttaagtgaacaagaactattggacgccagtgaccgggtgcagcttctccactctcagaacacttctctgattaacactaagaaaaagcttgaagccgacatcgctcagtgccaggcggaagtggagaactcgatccaggaatcaaggaatgctgaggaaaaggccaaaaaagctatcactgacgccgctatgatggcagaagagttaaaaaaggagcaagatactagcgcacacctagaacgcatgaaaaaaaacctggaacagaccgtgaaggacctgcaacatcgactcgatgaggcggaacagctcgcgctcaaaggcggaaaaaaacagattcagaaactcgaaaatagggtcagagaactggagaatgaactggacgttgagcagaagcggggtgcagaagcactaaagggcgctcacaagtatgagagaaaggtcaaggagatgacgtatcaggccgaggaggatcataagaatattctgagattacaggacttggtggacaagctccaggctaaagtaaagtcttataaaagacaggcagaagaagctgaggaacaggctaatacccaactttcgcgatgcagacgagtacaacacgagcttgaagaagcagctgagcgggctgacatcgctgagtcccaagtcaataagttaagagccaagtctagagacgtcggtagtcagaagatggaggagtat

SEQ ID NO: 231694 - DNA, 2001 bp, synthetic construct
  misc_feature 1..2001: note = Description of Artificial Sequence: Synthetic coding sequence
  source 1..2001: mol_type = other DNA
atgctttcccatatgctgtataagaaagagaacgccattgacatcctggggtttagctctgaagaaaaggttggtatttataagctcacaggagctgtgatgcactacgggaatatgaaatttaaacagaagcagcgcgaagaacaggctgaaccagacggtactgaagtagcggacaaagctggttacctcatgggactgaatagcgcggaaatgttgaaaggtctgtgttgccccagagtcaaagtcggaaatgagtatgtcacgaaaggccagaatgttcagcaggttacaaattcagttggcgcactggcgaaagctgtatacgaaaaaatgttcttgtggatggtgactagaattaatcagcagctggataccaagcagcctcgccagtatttcatcggggtgctggatatcgccggattcgaaatcttcgattttaactctctcgagcaactgtgtattaatttcacgaatgagaagctgcaacaattttttaatcaccatatgtttgtcctggaacaagaggagtataagaaggagggaattgagtgggaatttatcgattttgggatggacctcgctgcctgtatcgaactcattgaaaaacccatgggcatcttttcaattctggaggaggaatgcatgttcccgaaagcaacagatacatcatttaaaaacaagctatacgatcagcacctcgggaagtccaacaacttccagaagccgaagcccgctaaaggaaaagcggaggcccacttttcactggtgcattatgcaggaactgttgattacaacattgccggttggttggacaagaataaagatcccctgaacgagactgtggtcggactttaccagaaaagtagcctcaagctgctcagcttcctgttctccaactacgcgggtgccgagaccggagactcaggtggtagcaagaaggggggtaagaagaaggggagctcattccaaaccgtcagtgccgtgtttcgagaaaacctgaacaaactgatgaccaacctgcggtcaacgcacccacacttcgtgcgctgccttatacctaatgagacgaagactcctggcgtaatggatcattatctcgtaatgcaccagctccgctgtaatggagtgttggaggggatcagaatttgccgcaaaggttttccatcgagaatcctctatgccgattttaagcagagatacagaatcctcaacgcgtctgccatacccgagggccagttcattgactctaagaacgcctccgagaaactcctcaacagtatcgacgtcgatcgggagcagttccggttcggcaacactaaggtgttctttaaagccggactactgggcttattagaggaaatgagggacgaaaagctggtcactttgatgacgtctacccaggcggtgtgtagaggctatctgatgcgggtcgagttcaagaagatgatggaacgaagggactctatcttctgcattcaatataacatcaggagcttcatgaacgttaaacattggccatggatgaacttattttttaagataaagcctttgctgaagagcgctgaggcagagaaagaaatggcgacaatgaaggaagatttcgagcggacaaaagaggaactggcacgtagcgaggcaaggaggaaagagctgaccgagaggctggaggaagaagaggagatgaatagtgaactcgtagctaagaagcggaaccttgaggataaatgctccagtcttaaaagggacattgacgaccttgagctgacgctgacaaaggttgaaaaggagaaacacgccaccgagaacaaggtgaagaacctcagtgaagagatgactgcgctcgaggagaacataagtaagcttaccaaggaaaagaaatccctgcaagaagcacatcagcagactttggacgacctccaggtggaggaagataaagtcaacggccttatcaagatcaacgcgaagctcgaacagcaaaccgacgacgaaggggtttag

SEQ ID NO: 231695 - DNA, 6111 bp, synthetic construct
  misc_feature 1..6111: note = Description of Artificial Sequence: Synthetic coding sequence
  source 1..6111: mol_type = other DNA
atggctgccgtcacaatgagtgtgcccggacgcaaagctccccctagacccggacccgtgccagaagccgctcagccgttcctgttcacgccacggggtccttcagccggaggcggacctggttcaggaacttcgccccaggtggagtggaccgccagacggttggtctgggtgccgtcggagctccacgggttcgaagctgctgcgttacgtgacgagggagaggaagaagcggaagtcgaactggctgagagcggcagaagactccggctgcccagagatcaaatccaacggatgaacccacccaaattttctaaagcagaggacatggccgaactgacctgcctcaatgaagctagcgtgctgcacaacttgcgggaaagatactattcgggcttgatctacacctacagtggcctgttctgcgttgtgatcaatccgtacaaacaattgccaatctacacagaggctatcgtagagatgtatcgaggtaagaagagacacgaggtcccccctcatgtctacgccgttaccgagggtgcctatcgatctatgctgcaagacagggaggatcaatcaatcctgtgtactggggaaagcggcgcagggaaaactgagaacacaaagaaggttatccagtacctcgctcacgtagcctccagccccaaaggtcggaaggagccaggagtgcctgcctcagtgagtactgtgagttatggtgaactcgaacgtcagctccttcaggcaaacccgattctggaagctttcgggaacgccaaaaccgtgaagaatgataatagttctcggtttggtaaattcattagaattaacttcgatgttgctggttatatcgtaggtgccaacattgagacgtacttactagaaaaaagccgggcaatcaggcaggccaaagatgaatgttccttccacatcttttatcagctgctcggtggcgctggggagcagctgaaagccgacctgctgttagagccttgtagccattatcgctttcttacaaacggaccctcctcgtccccagggcaggagcgcgagctatttcaggagacattggagagtttgcgggtcctgggctttagccacgaagaaattatatctatgttgcgcatggtctctgctgtgctacagtttggaaacatcgcactgaaacgagagcgaaataccgatcaagcgacaatgcccgataacactgctgcccaaaaattgtgtcgcctcctggggctgggagttactgacttcagcagggcgttactcacccccagaataaaggttggaagggactacgtgcaaaaagcccagacgaaagaacaagccgatttcgccctcgaggctctggccaaggcgacctatgagcgactgtttcggtggctggttctgcgcttgaatcgagctctagacaggtctccaaggcaaggcgcatcattcctcggaatcctggacatcgcgggatttgaaatattccaacttaattccttcgaacagctctgtattaactacactaatgagaaacttcagcagctcttcaaccacacaatgttcgttctagagcaggaagaataccagagagagggcataccctggacttttctggattttggtttagacctgcaaccttgcatcgacttgatcgaacgtcccgctaacccaccgggactcttggctcttctggatgaagagtgttggtttcctaaggcgaccgataagagcttcgttgagaaagtcgcacaagaacagggcggacatccgaagtttcagcgacctcgccacttgcgtgaccaagcagacttttcagtgctgcactacgccggaaaagtcgattacaaggcgaatgaatggctaatgaagaacatggatcctctaaatgataatgtggcagcccttctgcatcaatcgacagacagactaacagctgagatttggaaagatgaacatggtgggttccagcagtttagcttcctgggttctttccccccatctcctcctggtagtgctgagagatgttctagtgccatatcgcctcccggtgtggagggaatagtgggcttggaacaggtcagtagcctcggcgatgggccacctggcggtaggcccaggcggggtatgttccggactgtgggacagctctataaagagagtttatctaggttgatggcaaccctcagcaacactaatccctcattcgtacggtgcatagtgcccaatcacgagaagagagctggcaagctagagcccagactggtgcttgaccagctcaggtgcaacggtgtactggagggcattagaatatgtagacagggcttccctaacagaatcctgttccaagagttccgccagaggtacgaaatcctgactccaaacgccattccaaagggattcatggacggtaagcaggcatgcgagaaaatgatccaggcgctggaactggacccaaacttataccgggttggtcagagcaagatctttttccgcgcaggcgtcctcgcccaacttgaggaggagcgagacctaaaggtgactgacatcatcgtgagcttccaggccgctgctcgcggttacctggccagaagagcatttcaaaaaaggcaacagcagcagagcgcccttagagtgatgcagcgaaactgcgcagcctacttgaagctgcgtcactggcagtggtggcgcctgttcacaaaagtgaagccacttctgcaagtgacccggcaggatgaagtgctgcaggccagggcccaagaactccagaaagtgcaggaattgcagcaacagagtgctagggaagtgggcgagcttcaggggagagtcgctcaattagaggaagaacgcgctcgcctcgctgaacagctccgcgcagaggcggaactgtgtgcagaagcggaagaaactcgtggacggctggcggcacggaagcaggagctggagctcgttgtgagcgagctcgaagccagggtgggcgaggaggaagagtgtagcagacagatgcagaccgagaaaaaacgcttacagcagcacatccaagaactggaagcacaccttgaggctgaggaaggagctcgacagaagctccaactagagaaagtgacgaccgaggccaagatgaaaaagttcgaagaagaccttcttttgcttgaggaccagaacagtaagctgtccaaagagagaaaactgcttgaagatcggcttgctgagttttctagccaggctgcagaagaagaggaaaaggttaaaagtctgaataaactgcgtctcaaatatgaggccacaatcgcagacatggaagatagactgcgcaaggaggagaaagggagacaagagctagagaaactgaagcgtagactggatggtgaatcatcagagctgcaggaacaaatggtcgagcagcagcaacgggcagaagagctaagagcccagctgggcaggaaggaggaggaactgcaggcagcgctagccagagcggaggacgagggaggagcgagggctcagcttctgaaaagcctgagagaagcacaggcagcactggctgaagcccaggaggatctggagtccgaacgggtcgcccgaaccaaagctgagaaacagaggagagacctgggcgaggaattggaggccttgcgaggtgaactggaggatacattggactcaacaaatgctcaacaagagctccgcagtaagcgagaacaggaagtgactgagctgaaaaaaaccctcgaggaggaaactaggatccatgaagcagcggtgcaggaactgagacagagacacggacaggcactgggagagttagctgagcagctcgagcaggccagaagggggaagggagcatgggagaaaaccagacttgccctcgaggccgaggtttcagagctccgagcagaactttcctctctgcaaacagcacgacaggaaggcgagcaaaggaggcgccgtcttgagttacagctacaagaggtacaaggaagagctggggacggggagcgggctcgtgccgaggcagccgaaaaactgcagagagcccaggcggagttggagaacgtctcgggtgccctgaacgaggctgaatccaaaaccatccggctgagcaaggagctaagctcaaccgaagctcagctccatgacgcccaggaacttttacaggaagagactagggctaagctcgccttggggtcaagagttcgtgccatggaggctgaggcagcaggccttcgggaacagctggaggaggaagccgcagccagggagcgtgcaggacgcgaactgcagacagcacaggcccaactgagtgagtggcggcgacgtcaggaggaggaagccggagctctggaagcgggagaggaggctagacggagggctgctcgggaggcagaagccctgacgcagaggttggctgaaaagaccgagacagtagaccgactggagaggggcaggcgcagactgcagcaagaacttgacgacgccaccatggacctggagcagcaaagacagctggtctcaacccttgaaaaaaagcagcgtaagttcgaccagctgcttgcggaagagaaagccgctgtacttcgtgccgtggaagagcgcgagagggctgaagccgagggaagagaacgtgaagctagggccctcagtctgacaagagccctcgaggaagagcaggaggctcgagaagagctggagagacagaaccgtgcgctgcgcgctgaactggaggctctgctttcttccaaggatgacgtgggaaagagcgtccacgaactcgagcgcgcatgccgcgtagccgagcaagccgcaaatgacctgcgcgctcaggttaccgagctcgaagatgagctgactgctgcagaggatgctaagctcaggctagaggtcaccgtgcaggccttgaagacccagcacgaaagagaccttcagggcagggatgaggctggggaggagcggagacggcaactcgccaagcaactcagggacgctgaggtcgaaagggatgaggaacgaaaacagcgaactcttgcggtggctgccagaaagaagctcgagggtgagctggaagagctcaaggcccaaatggctagtgccggacagggaaaggaggaggctgtcaagcagctgagaaaaatgcaggcacagatgaaggagctgtggcgggaggtggaggagacacggacatctagggaggagatcttttcgcagaatcgtgaaagcgagaagagactgaagggcttggaggctgaagtcctacgcctgcaggaagaactagccgctagtgatcgagctaggcgacaagcccagcaggaccgggacgaaatggcggacgaagtcgcaaatggaaatttatcgaaggctgcgatccttgaagagaagcgccaactcgagggcaggctgggccaactggaggaggaactcgaggaggaacagtccaattctgaactcttgaatgataggtacaggaagcttctcctgcaggtggaatcattgactaccgagctgagtgcggagagatccttctccgctaaggcagaaagcgggaggcaacagttggagcgccagatccaagaactgagaggcaggctgggcgaggaggacgccggtgcccgtgccaggcataaaatgacaatcgctgctctggagagcaagctcgcccaggcagaggaacaactggagcaggagaccagggagcggatcctgagcggcaagctggttcggagggccgagaaaagactcaaagaggtcgtgctgcaggtagaggaagagagacgagtggcagatcagctgagagaccaactcgaaaagggaaaccttagagtgaaacagttgaaaaggcagttggaggaggctgaggaggaagcgagccgcgcacaggctgggagacggagactgcagagagagctcgaggacgtgactgaatccgctgaatccatgaacagagaggtgacgacgctacggaaccggctcagaaggggccctcttacattcacaacaaggactgtgagacaggtcttccggctggaggagggagttgcgagcgacgaggaggctgaagaagcccaacccggatctggacccagtccagagcctgagggtagcccaccagctcatccacagtat

SEQ ID NO: 231696 - DNA, 4437 bp, synthetic construct
  misc_feature 1..4437: note = Description of Artificial Sequence: Synthetic coding sequence
  source 1..4437: mol_type = other DNA
atggcagcggtgaccatgtccgttcctggcaggaaggccccaccacgtcctggacccgtgccagaggctgcccaaccttttctctttactccacggggaccatctgctgggggtggaccgggtagcggaactagcccccaggtcgaatggacagccagaagattggtttgggtgcctagtgagctgcacggatttgaggccgcagcacttcgtgacgaaggcgaggaagaggcagaagttgaactggccgagagcggccgaaggctccgtctccccagggatcagatccagcgcatgaaccctcctaaattctctaaggccgaagatatggctgagctcacctgcctaaacgaggcgtcggttttacataaccttcgcgagcgttactactctggtctgatatacacttattctggactgttttgtgttgtcattaacccttacaagcagctcccaatatatacagaggccatcgtggaaatgtataggggcaagaaacgacacgaagtacccccacacgtgtacgctgtgacagagggcgcttacaggagcatgcttcaagatcgggaggatcagtctattctctgtactggggagagcggggcaggaaaaaccgagaacaccaaaaaagttatccaatacctggctcatgtcgcgtcgagccccaaggggaggaaagaacccggagttcctggggaactagaacgccaactccttcaggctaatccaatcctggaggctttcggcaacgcgaaaacagtaaaaaatgataactcaagtagatttggcaagttcatcaggattaatttcgatgttgccggatatattgtcggcgcaaacatcgaaacctatctactcgagaaaagcagggcaataaggcaggcaaaagacgagtgtagtttccacatcttttatcagctgctgggtggagccggagaacagcttaaagctgatcttctactggagccctgctcacactatcggttcctgaccaacggtccctctagtagtcctggccaggagagagaactctttcaggaaactctggagagtctccgcgtgttagggttttcccatgaggaaattatctccatgctgagaatggtcagcgccgtgctgcagtttggcaacatagcgctgaagcgcgagcgcaataccgatcaagccacgatgcctgataacaccgccgctcagaaattatgtcgccttctgggcctgggtgtgacagacttttcacgcgctctgttgacccctcgcattaaggttggcagagactacgtacagaaggctcaaacgaaggagcaggcggatttcgccctggaagctctggctaaggctacttacgagagacttttcaggtggctggttttgagactcaacagggctttggaccgaagccctcgacagggggcatccttcctggggatactggatatagctggcttcgagattttccagcttaactctttcgagcagctgtgcatcaactatactaatgaaaagctgcagcagctgtttaatcacactatgtttgtcctggagcaagaagagtaccagcgcgagggtatcccatggacattcctcgatttcggccttgacctccagccctgtatcgacctgatagagagacccgctaaccccccaggcttgctggcactgctggacgaggagtgttggttcccgaaggccaccgataaaagcttcgtagagaaagtggcacaggagcaggggggtcatcccaagtttcagagaccaaggcatctgcgggatcaggcggacttctccgttctgcactacgccggaaaagtggattataaagctaatgaatggctcatgaaaaacatggaccctcttaatgacaatgtcgcagccctattgcaccagagcaccgaccgcctcactgccgagatctggaaggacgtcgagggcatcgttggtctggagcaggtgagcagcctgggtgatggccctcccggtgggcgacctaggcggggaatgttcagaaccgtcgggcaactctacaaggagtctctaagtcgcctcatggccactttgtcaaacaccaatccaagctttgtcaggtgcattgtcccgaatcatgagaaaagagcgggaaaattggaacccagactggtcctggaccagctgaggtgtaatggcgtgctggaaggaatcaggatatgtcgtcagggtttccctaaccgaattctgttccaagagttccgccaacgctacgaaattctcacccccaacgccatcccgaaaggtttcatggacggaaaacaggcatgcgagaaaatgatacaggcgctggagttagatcctaatctttaccgggttgggcagagcaaaatcttctttcgcgctggagtgctcgcgcagcttgaggaggaacgcgatttgaaggtaactgacattattgttagtttccaggccgcagccagggggtatcttgccagaagagccttccagaagagacagcagcagcagtctgcccttcgtgtcatgcaacgcaattgcgccgcatatcttaaactgcgacattggcaatggtggcgcctgttcaccaaagtgaagcctctgttacaggtaacaagacaggacgaggttcttcaggcacgggctcaggaattgcagaaggtgcaggaactacagcagcagagcgctcgggaggtgggagagttacagggacgagtcgcacagcttgaagaggagcgtgctagactggccgagcagctgagagcggaagccgagctgtgcgccgaagccgaagagactcggggaagactggcggctcggaagcaggaattagaactcgtcgtgtccgaactcgaggctcgggtcggcgaggaggaggagtgttcccgccagatgcaaaccgagaagaagaggctgcagcagcacatccaggaactcgaagcacacctcgaggctgaagagggcgcacgccagaagttgcagttagagaaggtcaccactgaggcaaagatgaagaaatttgaagaggatctgttgctgttggaagaccagaatagcaagctgtcaaagtccggatcatgctggaaaatagtttggccctcctcccaccctagacagctaagaagacggaggcggagcagagcgagcatttcttacgggagcaatatgcggccacagtcccaaacttggcgggatcggctacgcaaagaggagaaagggaggcaggagctggagaaactgaagcgacgcctagacggagagtcttcagagctccaggagcagatggtggaacagcaacagcgagcagaggaacttcgggctcaactaggcaggaaggaggaagagctgcaggccgctctggcgcgtgctgaggacgagggcggagccagggcccaactccttaagagcctgcgcgaagctcaggcggcactcgcagaggctcaggaagatctcgaatcagagcgggtcgcccgtactaaggccgaaaaacagaggcgagatcttggggaggagctagaagccctcagaggcgagctggaggacaccctagattccactaacgctcagcaggagctgaggtcaaagagggagcaggaagtgactgagctgaagaaaaccctggaagaagagacgcggatccacgaagctgccgtacaggagctgagacaacgccacggacaggcactgggagagctagccgagcagctggaacaagcaagacggggaaaaggagcgtgggagaagacaaggttagccttagaagccgaagtctcagagttgcgcgctgagctctcctccctacagacagctagacaggagggagagcaacgtcggcgtcgtctggagctccagctacaggaggtgcagggcagggccggtgacggggagagagcccgagcagaagccgcagaaaaactgcagagggctcaggccgagcttgagaacgtctcaggtgctctgaatgaggcagaaagcaaaactatccggctttcaaaggagctgtcttccacggaggcccagttgcacgacgcccaagagttgttgcaagaggagacgcgtgcgaagctggcgctgggatcccgggtgcgcgctatggaagcagaagcagcgggactccgagagcaactggaggaagaggcggctgcacgcgagagagcagggcgtgagctgcagaccgcacaggcccaactgtccgagtggaggagacggcaggaagaagaggccggtgctcttgaggcaggggaggaagcgaggcggagggccgcacgcgaagcggaggcgctgactcaacgcttagctgagaagactgagaccgtggatcgtctggaaagaggcaggaggaggttacagcaggaactcgacgatgcaacactcagtccggacgctttgaccgatggagcccaacctccaagttctttggacccgacaggtccatgtccacggaaccctgccctgtag

SEQ ID NO: 231697 - DNA, 5339 bp, synthetic construct
  misc_feature 1..5339: note = Description of Artificial Sequence: Synthetic coding sequence
  source 1..5339: mol_type = other DNA
atggccgcagttacgatgtctgtgcccggacgcaaggcccctccaaggccgggaccagtgccagaagccgctcaaccttttttgtttacccccagaggcccatctgctgggggagggccaggatcaggcacatcacctcaggtggaatggacggcaaggcgcctggtctgggtcccgagcgaactgcatggcttcgaggccgctgcgctgcgggacgagggcgaagaagaggctgaggtcgagctggcagagtcaggcaggcggctcaggctgcccagggaccagatccagcgaatgaacccccctaagtttagcaaggcagaggatatggccgagttgacctgcctgaacgaggcttcggtactgcacaatcttcgggagcggtattacagcggactgatttacacgtattcaggcctcttctgcgttgttattaatccctataaacagttacctatctacacagaggctatcgttgagatgtatagaggtaaaaagcgccatgaagttccacctcacgtgtatgctgtcaccgaaggcgcttataggagtatgttacaggatcgagaggaccagtccattctctgtaccggggaatcgggcgcaggaaaaacagagaacactaagaaagtaatacaatatctcgcccacgtggcttccagcccgaagggtaggaaagagcctggggtacctggcgaactggagaggcagctcctgcaggctaatccgatccttgaagctttcggcaacgccaagactgtgaaaaacgataacagctcaagatttggcaagttcatcaggataaacttcgatgtggctggatatatcgtgggtgctaatattgaaacctaccttttagaaaagagccgggcaattaggcaagctaaggatgagtgctcatttcatatcttttatcagctgctcggtggcgcaggagagcagctcaaagctgatctgcttctggagccatgctcccactatcgctttctgacgaatgggccatctagctcacccggacaggagcgtgaactttttcaggaaactcttgaatcactgagggtcctggggttcagccatgaagagattatctccatgctacggatggtgtcagctgtcctccaattcggcaatatcgcactaaagcgtgagaggaacacagatcaggccacgatgcctgataataccgctgctcagaagctctgtagactccttggactcggcgtgacagacttctcccgcgcactgctaacacccaggattaaggtgggcagagactatgtgcagaaggcacagaccaaggagcaggccgacttcgcactagaggccctggcaaaagcaacatatgaacggctgttccggtggctcgtattgaggttgaaccgcgctttggatcgcagtccaagacagggagccagttttctgggtattctggacatagccggatttgaaatcttccaactcaacagcttcgaacagctctgtataaactataccaacgaaaagttgcagcagctgttcaatcacactatgtttgtgctggagcaggaggagtaccagagagagggcatcccgtggactttccttgactttggcctggaccttcaaccgtgtatcgatctgatagagaggccggctaaccccccaggacttcttgccctgctagacgaagagtgttggtttcccaaggcgaccgataagtcctttgtggaaaaagtggcacaggagcagggcggtcacccgaaatttcagcgaccaaggcatcttagagatcaggctgacttcagtgttcttcattacgcagggaaggtggattacaaagcaaatgagtggctgatgaagaacatggaccccctgaatgacaacgtggctgcactacttcatcagagcacggatcggctgacggcggagatatggaaagatgtggaaggtattgtcgggctggaacaggtgtccagcctgggcgacggtccaccgggaggtcgacctaggcgcggtatgtttcgcaccgttggtcagttgtataaagagtctctgagtaggctgatggctacgctcagtaacacgaatcccagcttcgtcagatgcattgtgccaaaccatgagaagcgcgctggaaaactcgagccacgcttagtgttagatcagttgagatgcaacggagtactggagggtataagaatatgcaggcagggattccctaaccgtattctgtttcaggaatttcggcagcgctacgagattctgacgccgaacgctatcccaaagggcttcatggatggaaagcaggcctgcgaaaagatgatccaggccttggagctggatcccaatctttatcgggtaggtcagtcaaaaatctttttcagggcaggtgtgctcgcgcaacttgaagaagaacgggatttaaaggtcactgatataatcgtgagcttccaggcagctgcccgtggatatctggccagacgcgcatttcaaaagcgacagcagcagcaaagcgcactgcgcgtcatgcaacgcaattgtgccgcttacctcaagctccggcactggcagtggtggaggctgtttacaaaagttaagccccttctacaggtgactcggcaggatgaggtattgcaggcgcgtgcacaggaattgcagaaggtgcaggaactgcaacagcagagcgccagggaggtcggcgaactccaaggccgagtggcacagctggaggaggaaagagcacgcttggcagagcagcttcgtgccgaggcggagttgtgcgccgaagcagaggaaacccgcggaagactggccgcacgtaagcaggagctggaactcgtggtgtccgaactggaggccagagttggtgaagaggaggagtgttcccggcagatgcagactgaaaagaagcgtctgcaacaacatattcaggaattagaggctcacctggaggcggaggaaggagcccgtcagaaactccagttggaaaaagtgactacagaagcaaaaatgaaaaagttcgaggaggatcttctactgttagaggaccagaattccaaactttctaagtctggcagttgttggaaaatcgtatggccaagttcccaccctcggcagctacgaagaaggaggcggagccgggcttctatttcatacgggtcaaatatgagaccacagagccagacctggagagaccgcttgagaaaagaggaaaaaggacgacaggagctagaaaagctgaagcgcagactggatggcgagtcctctgagcttcaggagcaaatggtcgagcagcagcaaagggctgaggagctcagggctcaactgggacgcaaggaagaagaattacaagcagcgttagccagagcagaggacgaagggggagctcgggctcagctgctaaagtcccttcgcgaagcacaggcggctcttgctgaggcccaggaggatctagaatccgagagagtggcacggactaaagccgaaaaacaaaggcgggaccttggcgaagagctggaggcacttagaggagaactggaggacactctggacagtactaacgcccaacaggagttgcgcagtaagcgggaacaggaagtgaccgagcttaaaaagacactggaggaggaaaccaggatccacgaggccgcagtgcaggagctccgacagcgccacggccaagccctcggtgaattggctgagcagctcgagcaggctaggcgcggaaagggagcatgggaaaaaactaggttggcgttggaggccgaagtttccgagttacgcgctgagctcagttcactgcagacagctagacaggaaggtgagcaacggaggcgacgattagagttacagttacaggaggtgcaggggagagccggagacggagagcgagcacgagccgaggctgctgaaaagcttcaaagagcccaagccgagctcgaaaatgtcagcggagccttgaatgaagccttgctctcttccaaggatgacgtgggcaagtccgttcacgaactggagagggcctgtcgggttgccgaacaagcggcaaatgatctacgcgcacaggtaactgaactcgaagatgaactgactgcagccgaggatgccaaattgcgcctggaggtcacagtacaggccttaaagactcagcatgaacgggacctccagggtagggatgaggccggtgaagaacgcagaaggcagctcgcaaagcaactcagggacgcagaggttgagcgagatgaggagcgcaaacagcggactcttgccgtcgctgccaggaagaagttggagggcgagttagaggagctcaaggctcagatggcatcggcaggacaaggcaaggaggaagcagtgaagcagctccgcaagatgcaggcacagatgaaagagctgtggcgggaggtcgaggaaaccaggacctctagagaggaaatatttagtcaaaatcgggagtcagaaaagagactgaaaggtctggaagccgaagttctaagattgcaggaggaattagctgcgtctgaccgggcacgacgccaggcccaacaggatagggatgagatggccgacgaagtggccaatgggaatctgtctaaagcagcaatacttgaggagaagcggcaactggaagggagactaggccaattagaagaagaacttgaggaggagcagtccaattctgagcttctgaatgatcgttaccgcaaattgcttttacaagtagaatctttaactaccgaactgtccgccgagaggtcgttcagcgccaaggcagaatccggcagacaacagctcgagcgacaaatacaagagctccgaggtagacttggtgaggaagacgccggtgccagagcaaggcacaagatgacgatcgcggcactggagtcgaagctggctcaggcagaggaacaactcgaacaggaaacgcgagagcgcatattgagtggcaagctggtgcgcagagccgaaaagaggctgaaggaggtggtgttgcaggtggaggaagaaaggcgcgtcgcagatcagctgagggatcagctggagaagggcaacctgagagtcaaacagctaaagcggcagcttgaggaagccgaagaagaggcttcccgtgctcaagccggtcggaggcgcttgcagcgggaactggaggatgtaacagaatcagcggaatctatgaatagggaagtgaccactctacggaatagactacgacggggtccactgacattcactacccgaactgtgcgacaagttttccgactggaagagggagttgccagcgacgaagaggccgaggaggctcaaccaggaagtggcccttcgcctgagcctgagggaagcccgcctgcccatccccaata

SEQ ID NO: 231698 - DNA, 6086 bp, synthetic construct
  misc_feature 1..6086: note = Description of Artificial Sequence: Synthetic coding sequence
  source 1..6086: mol_type = other DNA
atggctgccgtaaccatgagcgtgccaggacggaaggccccacctaggcccggaccagtacccgaggccgctcaaccattccttttcaccccaagggggccatctgctggtgggggtccagggtcaggaacaagcccacaggtcgagtggaccgcgcgacgattggtatgggttccttcagaactccatggcttcgaggctgccgcactacgcgacgagggtgaggaggaggctgaggtcgagctcgccgaaagcggcaggcggctgcggctgcccagagatcaaattcagcgcatgaatcccccaaaattctccaaagccgaggacatggccgagttgacatgtttgaatgaggcatccgttctccacaatcttcgtgagcgctactatagtggactgatctatacttactccggactcttttgtgtggtgattaatccttacaagcagctgcccatatacactgaagccatagttgagatgtacagaggtaaaaaacgacatgaagtgccgccacacgtatacgcagtgaccgaaggtgcttaccggagtatgctgcaggacagggaggaccaaagcatactttgcacgggtgagagcggagccggaaaaaccgagaataccaaaaaagtgatccagtatctggcacatgtggcatctagtcctaaagggcgtaaagagccgggtgtgccaggagaacttgaacgtcagttactgcaggccaatcctattctggaagcgttcggtaacgctaagaccgtaaagaatgacaactcaagccgttttggcaagttcatcaggatcaactttgatgttgcagggtatattgtgggtgcaaatattgaaacttacctactggaaaagtccagggccatccggcaggccaaagatgaatgttcattccacatcttttatcagcttcttggcggtgccggtgagcagctaaaagcagacctactgctggagccctgttctcattaccgatttttgacaaacgggccatcatccagtccaggacaggagagggagctgttccaggagaccctagagtcattacgggtgctggggttctcacacgaagagattatctcaatgctgcggatggtctctgccgtcctccaattcggcaacattgctcttaaaagggagcgcaatacagatcaggcgaccatgcctgacaacactgcagcccaaaaactgtgtagactcttaggcctgggagtcacggattttagtagggccctccttacacctcggatcaaagttggccgtgactacgtacaaaaggcccagactaaggaacaagcagattttgccctcgaagctctggctaaggcaacctacgagcggctgttcagatggttggtcctaagactgaatagagcgcttgaccgctcaccccgacagggcgcaagcttcctgggcatcttggacatagcgggattcgaaatcttccaattaaatagctttgagcagttgtgcatcaactataccaacgagaagcttcaacagctgttcaaccatactatgttcgtgctggagcaggaggaataccagagagaaggcatcccttggacattcttggatttcgggctggacctgcagccttgcattgacctgatcgaacggccagccaatcctcccggactcctcgccctcttggacgaggaatgttggttcccgaaagcgacagataagagctttgtagagaaggtggctcaagagcaggggggacaccctaaatttcagaggcctcgtcatcttagagatcaggccgatttcagtgtactgcactacgctggaaaagtggattacaaggccaatgaatggctgatgaagaacatggatccactaaatgataatgtggccgctcttctccatcagagcactgacagacttaccgcagagatctggaaagacgaacacggaggcttccagcagttttcttttctgggttcattccccccttccccacccggaagcgccgagcggtgctcgagcgcgataagtcctcccggagtggaaggcatcgtcggattggagcaagtctccagcttaggagacggacctcccggtgggaggcccaggcgtggaatgtttaggaccgttggccaactgtacaaggagtccctctctaggctgatggccactctcagcaatactaatccgtccttcgtgagatgtatcgtgcctaatcacgaaaagagggccggtaagcttgagcccagactggtcctagaccaactacgatgcaatggcgtactcgaaggtatccgcatttgcagacagggattccccaacaggattttgtttcaggagttcaggcaaagatatgagatcctgacacctaatgcgatccccaaaggcttcatggacggaaaacaggcttgtgaaaagatgattcaggcacttgagctcgaccccaatctctaccgcgtgggtcagtccaagattttttttcgagcaggtgtactcgcccagctggaggaggagagggatcttaaggtgacggacattatagtgtcgttccaggccgcagctcggggttacctggccagaagagccttccagaagaggcagcagcaacaatcagcattaagagtgatgcaacgaaactgcgcggcttacctaaaactacgccattggcagtggtggaggctgttcacaaaggtgaagcctctccttcaggtcacgcggcaggacgaagtcctgcaagcccgtgctcaggaactgcagaaagttcaggagctccagcagcagagtgccagggaagtgggggagcttcagggacgggtggcacagcttgaggaagaacgtgccaggctggcagagcagctgagagccgaagctgagctgtgtgcggaagccgaggaaacacggggaaggttagcggctagaaagcaagaattggaattggtggtgtccgagctagaagctcgcgttggggaagaagaggagtgcagccgtcagatgcagaccgaaaaaaagaggttacagcagcacatacaagaacttgaggctcacttggaagctgaagaaggtgccagacagaagttgcagctcgaaaaagtgacaactgaggcgaaaatgaaaaagttcgaagaggatttgttgctgttggaagatcagaacagtaaattaagtaaggaaaggaagcttctcgaggataggttggccgagttcagctcccaagctgcagaggaagaggagaaagtcaagagtttgaacaaactgaggttgaaatatgaggccacgattgccgatatggaggacagattgagaaaagaggaaaagggtaggcaggaacttgaaaaactgaaacggaggctggacggtgaatccagtgagctgcaggagcagatggttgagcagcagcaaagggccgaggaattgcgagctcaactgggaaggaaggaggaggaattacaggccgctctcgctcgggcagaggatgagggcggagccagagcccaactactgaagtccctccgagaggctcaggccgcactcgccgaagcacaggaggacctggaatcagagcgggtagctagaactaaagcagagaagcagcgacgggacctgggagaggagttagaggccctgcgcggtgagctggaagatactctggatagtacaaatgcccagcaagaattgcggagtaagagagaacaggaggtcactgaactcaaaaagactcttgaagaggaaaccaggatccacgaggcagctgtgcaggagttgagacagcgccacggacaagccctcggggagctggccgagcagctcgaacaggctcgaagaggaaaaggggcttgggagaagacacgactggcgctggaggcagaggtaagcgaactgagggccgagctctcaagcctgcagacagcaagacaggagggagagcagaggcggcgtaggctcgagctgcaactccaggaggtgcaaggaagggccggagacggcgaaagggctagggcggaggctgccgagaaattgcaacgcgcacaggccgaactcgaaaacgtttccggtgctttaaatgaagctgaatcgaagaccatcagactgtctaaggagctttcttcgaccgaagcacaacttcatgatgcccaggagcttctgcaggaagagacaagagccaagctggcgttaggcagcagggtcagagctatggaggcagaggccgcaggtctgagggagcagctggaggaagaggcagccgctagagagcgcgcaggcagggaactgcagactgcccaggcccaactgtcagagtggcgcaggagacaggaagaagaagccggagccctggaagcgggagaagaggccagacgcagagccgctcgggaggcagaggccttgacccaacggctcgctgagaagaccgaaacagtggacaggcttgagcgaggtagacgcagactgcaacaggagttagatgacgcaactatggacttagaacagcagagacaactcgtgagtacacttgaaaaaaagcagcgcaagtttgaccaactgctcgccgaggagaaggctgccgtcctcagggcagtcgaagagcgggagcgcgcagaagccgaaggtcgcgagagagaggcccgagcactgtctctaacaagagcccttgaggaagagcaggaggcccgtgaagaacttgaaaggcaaaaccgagccctgagggccgagctggaagctctactttcgagtaaagatgacgtaggcaaatcagtacatgagcttgagagagcctgcagggtggctgagcaagctgctaatgaccttagagcccaagttacagaattagaagatgagctgacggcagccgaagatgccaagctccgattggaggtgacagtgcaggcgctgaagactcaacacgaacgcgacctgcagggacgggatgaggcaggcgaggaaaggcggcgacagctggctaagcaactacgagatgctgaagtggagcgggacgaggagcgaaagcagcgaactctggccgtggctgctcggaagaagctcgaaggggaactagaagagctaaaggcgcagatggcatccgctggacagggtaaagaggaagcggtgaaacagctgcgaaaaatgcaggcccagatgaaagagctgtggagagaggtggaggagacgcgcacgtcgcgagaggagatattcagtcagaatagggagtccgaaaagagacttaagggcttagaggcagaggtgctacggcttcaggaagaactcgctgcatcggaccgcgcacgccgtcaagcccagcaagacagggatgagatggcagacgaagttgcaaacgggaacctgtcaaaggctgctatcctggaggagaagcgccagctggaaggacgcttgggccagttggaggaggagctggaggaggagcagtccaattccgaactgcttaacgatagatatcgtaagcttctgctgcaggtagagtccctcaccacggagctcagcgctgaaagaagcttttccgccaaggccgaatcggggcgacagcaactggagcgtcagattcaggaactgcgaggacggctgggcgaagaagacgctggcgctagggcaaggcataagatgaccatagccgcacttgaatcaaagcttgcccaggccgaggagcaacttgagcaggaaactcgagaacgcatcctctcagggaaactggtgcggcgtgcagagaaacgacttaaggaggttgtgctgcaggttgaagaggaacgtcgggtggctgaccagctgcgtgatcagttggagaagggcaacctgagagtcaaacagctgaagcgccaactggaggaagctgaggaggaagcatctagagcacaagcaggacggcgaaggcttcagagagagctcgaggatgtgacagagagtgccgagtccatgaaccgggaagtgactaccctgagaaacaggttgaggcgtggaccgcttacgtttacaaccagaactgttcggcaggtatttagactcgaagagggcgttgcatcagatgaggaagccgaagaagcccaaccgggaagcggaccctcccccgagccagaaggctctccacccgctcatccccagta

SEQ ID NO: 231699 - DNA, 6011 bp, synthetic construct
  misc_feature 1..6011: note = Description of Artificial Sequence: Synthetic coding sequence
  source 1..6011: mol_type = other DNA
atggccgcagtgactatgtccgtccccggaagaaaagccccaccgaggccaggtccggttcctgaggccgctcagccctttctttttactccacggggacccagcgcaggaggcggacccggatctggtacttcacctcaggtagagtggaccgctcgacgcctggtctgggtgccaagtgaactgcatgggttcgaggcggcagcgttgcgcgatgagggtgaggaagaggccgaggtggaactcgccgagtcaggacgtaggctgcggctccctagggaccagatccaacgcatgaatcctcccaagttctcgaaggccgaggacatggccgaattaacctgtctgaacgaggcctcagtgctccacaacttaagagaacgctactactcagggctgatttacacttacagcggcttattctgcgtcgtgatcaacccatacaagcagcttccaatatacaccgaggcaatcgtggaaatgtatagagggaagaagcgccacgaagtccctcctcacgtgtacgccgtaacagagggagcctacaggagcatgcttcaggacagagaggaccaatcgatcctgtgtactggagagtccggcgctgggaaaactgagaacactaagaaagtgatccagtatcttgctcacgtggcaagttctccaaaggggagaaaagaaccgggtgtccccgcttccgtgtcaacagtgtcctatggtgaactcgagaggcaactgctccaggccaatccaattctggaggcctttgggaacgctaagaccgtgaagaatgataatagcagccggttcggaaagttcataaggatcaactttgacgtggccggttacattgttggggctaacattgaaacatacctcttggagaagagcagggcaataaggcaagccaaagatgaatgttcgtttcatatcttctatcagctactcgggggagccggtgagcaactgaaggcagatctcctccttgaaccttgctctcactataggttcctaacaaacggccctagctcatccccagggcaggaacgggagctgtttcaggaaaccctcgagtccctccgtgttcttggtttctcacacgaggagattatctctatgctccggatggtttcagctgtccttcagttcggtaacattgccctgaaacgagagcggaatactgaccaggccaccatgccagataatacagcagctcagaagctgtgcaggctgctagggctgggcgtcaccgacttctctagagcccttctgaccccaaggatcaaggtaggcagagattatgtgcagaaggcccagacaaaggagcaggcggattttgctcttgaggcactggccaaagctacatatgaacggttgttccgttggctcgtactgcggctgaaccgcgctctggaccgcagccctagacaaggagcttcattcctggggatcctcgacattgctggcttcgagatcttccagctcaattcattcgagcagctctgcattaactacaccaatgaaaaactgcaacagttatttaatcatacaatgttcgtgcttgagcaggaggagtaccagagggagggtattccttggacttttttggatttcggcctcgacctccagccatgcatcgaccttatcgagcgtcccgctaaccccccaggactcctggctctgcttgacgaagaatgctggtttccaaaggctaccgacaaatcttttgttgagaaagtggcccaagaacaaggaggccaccccaagttccaaaggccccgtcaccttcgggaccaagccgatttctccgtgcttcattacgccggaaaagttgactacaaagcaaatgaatggctaatgaagaacatggaccctttgaatgataacgtggctgccctactgcaccagtctaccgacagactgactgcggagatctggaaggatgtggaagggatcgtggggttagagcaggttagctccttaggagacgggcctcctggaggaagaccacgccgtgggatgttcagaaccgtcggccaattgtacaaagagtctttatcccgcctgatggccaccttatcgaacactaacccatcttttgtgcggtgcattgtgcctaaccacgaaaaacgcgctggaaaattggagcccaggttggttctggaccagctgagatgtaacggcgtgctggaggggatcaggatttgtcggcagggattccccaacaggattctgtttcaagagttccgccagaggtacgagatcctaactcctaatgcgattccaaaggggtttatggacggaaagcaggcctgtgaaaaaatgattcaggctctagaattagacccgaacctgtatcgagtaggccaatctaaaatcttttttagggcgggtgtcctggcccagcttgaggaggaacgggatctgaaggttactgacatcatcgtcagcttccaggcagctgcacgagggtatcttgctcggcgagcctttcagaagcgccaacagcagcagtcggcactgagagttatgcagcggaattgcgctgcctatcttaaactgcgacattggcaatggtggcgactgtttaccaaggtaaagccactgctccaagtgacaaggcaagatgaggtgctgcaggcgagagctcaggaactgcaaaaagtgcaagaactgcagcagcagtctgcacgtgaagtgggggaactgcagggacgggtggcacagctcgaggaagagagggctaggctggccgaacagctgcgggctgaagccgagctgtgtgccgaggcagaagagaccagaggaagactagctgctaggaaacaggagctggagctagtagtgtcagaactagaggcaagggttggtgaagaggaggagtgttccagacagatgcagaccgagaagaaacggctgcaacagcatatccaggaactggaagcccacttggaagctgaggagggtgctcgtcagaaacttcaacttgaaaaagtgacaacagaggcaaagatgaaaaagttcgaagaggatctgctgctgctcgaagaccagaactcaaaactgagcaaagagcgtaaactattggaggatcgtctggctgagttttcttcccaggcagccgaagaggaagagaaggttaaatctcttaataagctcaggcttaagtatgaggccaccattgccgatatggaggataggttgagaaaggaggagaaggggaggcaagaattggaaaagttgaagagaagactcgacggggagagttctgagctgcaagagcagatggtggaacagcagcagagggcggaagaactgcgcgcacaactggggaggaaggaggaggaactacaggccgcacttgctagggctgaagatgaaggcggtgccagggcacagctgctcaaaagcctgcgggaggcccaagctgcactggccgaggcccaggaagatctggaaagtgaacgcgtagctcgcactaaggccgagaagcagcgtcgggacttaggagaagagctcgaagcattgcggggagaactcgaggatactcttgattctacaaatgcccagcaggagctccgatctaaaagggagcaggaggtgaccgagctcaagaaaactttagaggaggagaccaggatacacgaggcagcggttcaggaattaagacaaaggcacggacaggctctaggggaactcgctgaacagctggagcaggccagacgcggaaagggcgcatgggagaagacccggctggcccttgaggccgaggtgagtgagctgcgcgctgaactttcaagcttacagaccgcccgacaagagggggaacaaaggcgcagacgactggagctccaacttcaggaagtgcagggtcgggctggagacggggagagggcacgggctgaggcagccgagaaactgcaaagggcccaagccgagttagagaacgtcagtggggctttgaacgaggccgagtcaaaaacaattcgactgagcaaggagctctcgtccacggaggctcagctccatgacgcccaggagttgctccaagaggagacgcgcgctaaactggcgctaggctccagggtcagagccatggaagctgaggccgcaggcttacgggaacagctcgaggaggaagcagccgctcgcgaaagagccggacgtgaactccagacggcacaggcccaacttagcgagtggcggaggcgacaggaagaggaagccggtgcccttgaggctggagaggaagctagacgtcgagccgcaagggaagctgaggcccttactcagaggctagcagagaagacggagactgtggaccggctcgaaaggggcagaaggagactgcagcaagaattagatgacgctactatggatctagagcagcagagacagctggtgtcaacacttgaaaagaagcagagaaagtttgatcagcttctggcagaggagaaggcagccgtgctcagagccgtggaggagcgcgaacgagccgaggcagaaggaagagagagggaagcacgcgcactatccctaacccgtgctctggaggaggaacaggaggcccgtgaggagttagagagacagaatagagctctgagagcggagctggaagccctcctctcaagcaaggacgacgtcggtaaaagcgttcatgaattagagcgcgcatgccgggtggcagaacaggctgccaacgacttacgcgcacaggtaactgaattggaggacgagcttacagccgctgaagacgccaagttgaggttggaggtaacagtgcaggcactgaagacacagcacgaacgagaccttcagggcagagacgaggccggagaagagcggcgtagacagctggctaagcaactgagagacgctgaagtggaacgagacgaagaacgcaagcaaagaacactcgccgtagcagcacgcaaaaagttagaaggcgaactggaggagctcaaggcccagatggcctctgcaggccaaggaaaggaagaagctgtcaagcagctgcggaagatgcaggcccaaatgaaggaactctggcgagaagtggaagagacgaggaccagccgtgaagagatcttctcacagaatagagagtccgaaaagcgactgaagggtttggaggcagaggtgctgcggcttcaagaagagttggccgctagcgatcgagccaggagacaggctcagcaagacagggatgaaatggcagatgaggtggccaatggaaacttgagcaaagccgcaatcttggaagaaaagcgtcaactcgagggcagattggggcagctggaggaggagcttgaagaggagcaatccaattcagaactactcaacgaccggtatcggaaacttctcttgcaggtcgagagtctcaccaccgaactaagtgcagagcgctcttttagcgccaaagcagagtctgggaggcagcaactggaacgccagattcaggaactgcggggaagattgggggaagaagatgctggcgctcgtgccagacataagatgactatcgccgctctggagagcaagctggcccaggctgaagaacagttagagcaggagaccagggaaaggattctgagtggtaagctcgttagacgagcagaaaagaggcttaaggaagtcgtgctgcaggtggaggaagaacgcagagtggctgatcagctcagagatcagttggaaaagggaaatctcagagttaagcagctcaagcgccagcttgaggaagcggaggaggaggcttcgcgagcccaggcaggcaggcggcgtctacaaagagaactggaggacgtgacagagagcgccgagagcatgaatcgcgaggtgacaacgctcagaaatcggcttcgcagaggaccattaaccttcactactcggactgttcggcaggtgttcaggctggaagaaggtgttgcttccgatgaggaagctgaggaggcccagcctggctcggggccatccccggagcctgaggggagcccgcctgctcatccacaata

SEQ ID NO: 231700 - DNA, 6110 bp, synthetic construct
  misc_feature 1..6110: note = Description of Artificial Sequence: Synthetic coding sequence
  source 1..6110: mol_type = other DNA
atggcggcagtcactatgagtgtgccaggcagaaaagctccacctaggcccggaccagtcccagaagctgcacagccgtttttattcactcccaggggcccatctgccggtggcggtcctggaagtggcacgtccccacaggttgagtggacggccagacgcctagtgtgggttccttctgagctgcacggcttcgaagccgctgctttgagggacgaaggagaagaggaagccgaagtggaactcgcagaatctggacggaggctccgtctgccgagggatcagattcagcgcatgaaccctcctaagttcagcaaagccgaagacatggctgagctcacgtgcctcaatgaagcctcagttctgcacaaccttagagaacggtactacagtggactcatctatacgtattccggcctgttctgtgtggtgattaacccctataagcagctgccgatctacacagaggcaatcgtcgagatgtacagaggaaaaaaaaggcacgaggtgcctccgcacgtatacgccgtgacggagggagcgtatagaagtatgttgcaggacagagaagatcagtcaattctgtgcactggcgagtcaggcgctggcaaaaccgaaaatactaagaaggtgatccaatacctggcgcatgtcgctagctcacctaagggacgtaaagaacctggggtgccagtctctaaccccgctttgggctggggcgagcttgaacggcagttgctgcaggcaaaccccatcttagaagcttttgggaatgccaaaaccgtgaagaatgataacagctcacgtttcggaaagttcatccgcatcaatttcgacgtggcaggctacatcgtcggggctaacatcgaaacgtatctgctcgaaaagagtcgggctatccggcaggcaaaggatgagtgttctttccacattttttaccagctcttgggcggagcaggcgagcagctgaaggcggacctgctacttgaaccctgtagccattatagattcctgacgaatggtccgtcctcatcacctgggcaggagcgggagctgtttcaggaaacgctggagagcctgagggttttgggattttcccacgaagagatcatctctatgcttaggatggtgtcagccgttctgcagtttggcaatatcgccctcaagagggaacggaacacagaccaggctaccatgcccgataacacggccgctcaaaaactctgcagactattagggctgggcgtgacggacttctccagggccctgctgaccccaaggattaaagtaggtcgcgactatgtccagaaggcccagacaaaagagcaggcggacttcgctttggaggctctggccaaggccacgtatgaaaggctattcaggtggctggtgcttcgtttaaaccgcgctctggatagatcccccagacaaggggcaagcttcctcggcatacttgacattgcaggctttgagatattccagctgaatagtttcgaacagctgtgtataaactataccaatgagaaactgcagcagctgttcaatcacacaatgtttgtgctggagcaggaggaataccagcgcgaagggattccctggacttttctggatttcgggttggatctacagccctgcatagatttaattgagcgccctgccaaccccccaggcctgctggccctgcttgacgaggagtgttggtttcctaaagctacggacaagtcttttgtggagaaggtcgctcaggagcagggcggacaccctaaatttcaaaggccacggcacctccgggaccaggcagactttagcgtgttgcattacgccggaaaggtcgattacaaggcaaacgagtggctgatgaaaaacatggatcctcttaatgacaacgtggctgccttactacatcaaagtacagatcggcttacagccgagatctggaaagacgaacacggaggctttcaacagttctcgttcctggggagctttcccccatctcctcctggaagtgccgagcggtgctcaagcgccattagccctcccggagtcgaaggtattgtcggccttgaacaagtgtcctctctcggggacggcccacccggtgggcgaccccgtcgcggtatgtttaggacggtcggtcaactctacaaggagagccttagccgcctgatggctacactcagcaatacaaaccctagcttcgttcgctgtatagtgccaaaccacgagaagcgtgccggaaaattagagccacgattagtgcttgatcagctgagatgtaacggagtcctggaaggtattagaatctgtaggcaagggtttcccaacagaatcttgttccaagaattccggcagaggtatgaaatcctgactcctaatgcaatccctaaaggcttcatggacggaaagcaggcctgcgaaaagatgatccaggcattggaactcgaccccaacctgtatagagttgggcagtcaaaaatcttctttagagcgggagtgctggcccagcttgaagaagagcgggatctgaaggtgaccgacattattgtcagttttcaagccgctgccaggggttaccttgccaggcgggctttccagaagcgccagcagcagcagagcgctttgagggtgatgcagcggaattgtgccgcttatcttaagctacgtcactggcagtggtggaggctcttcacaaaggtcaagccactcctacaggtgacgcgccaggatgaggtcctgcaagcccgagctcaagaattgcagaaggtgcaggaactacagcagcagagcgccagagaagttggcgaactgcagggtagagtggcccagctggaagaagaacgtgcgagactggcagaacaattgcgggctgaggctgagctgtgtgcggaggccgaagagaccagggggagactggcagcaaggaaacaggaactcgagctggtagtgagtgagctcgaggcacgcgtcggcgaggaggaggagtgtagcaggcaaatgcaaaccgaaaagaaacgactccaacagcacattcaagaactggaagcacacctcgaggccgaggagggagccagacagaagctgcagcttgaaaaggtgactactgaagctaagatgaaaaaatttgaggaagacctgctgctcctcgaggaccagaactctaagctctccaaggagcgaaaacttcttgaggatcggcttgccgaattcagttcacaagcagccgaagaggaagaaaaagtaaagtctctgaacaagttacgactgaagtatgaagccactatcgctgatatggaggaccggctgcggaaagaagaaaagggcaggcaggaattagagaagctgaagcgaagattggacggggagtcttctgaactgcaggaacaaatggttgaacagcagcagcgggctgaagaactcagggcgcagttgggtcgtaaggaggaggaactgcaggctgcactcgctagagccgaggacgaaggcggagccagggcacagcttctcaaatccctgcgggaggcccaggcagcccttgcggaggctcaagaagatctcgaatcagagcgagtcgcccgtaccaaggcagagaagcagaggagggatctcggcgaagaactagaggcattgcgcggtgagctagaggacaccctcgactctactaacgcccagcaggagctgcgtagtaaacgggaacaggaagtcaccgaactgaaaaagacactagaggaggaaactaggatccacgaagctgcagtgcaggagctgaggcaaaggcacggacaggcactgggagagctcgctgaacagttggagcaagcaaggagaggcaagggagcttgggaaaagactagactagctctggaggcggaagtctcggaactgagggccgagctcagctcgctccaaactgcccgtcaggaaggagaacaaagaagacggcgacttgagctacagttgcaggaagtacagggcagggctggggacggagagcgggcaagagccgaggccgctgagaagctgcagcgggcacaggccgaactcgaaaacgtgagtggcgcactaaatgaggcagagagcaaaacgatcagactgagtaaagagttatcgagcactgaagcacagttacatgacgcccaagagcttctgcaggaagaaacacgggcaaagctcgccctcggctcaagggtgagagccatggaagcggaggcggctggattgagggagcagctggaagaggaggcagccgcaagagaaagagccggaagggagctccagactgctcaagctcagctcagtgagtggaggagaagacaagaagaagaggccggagccttggaagccggtgaagaggccaggcgcagggctgctagggaagccgaggcactcactcaaagactcgctgaaaaaaccgaaaccgtcgatcgactcgagcgcggtaggagacggctgcagcaggagcttgacgatgcgacaatggatctggagcaacagcggcagctcgtgtcaactctagagaagaagcagagaaagtttgaccagttgttagctgaggaaaaagcggcagtactgcgggcagtcgaggagagagagcgcgctgaagccgaaggaagagaaagggaggcgagagccttgagcctgaccagagctctcgaggaggagcaggaggccagggaggaactggaacgtcaaaatagagctctgcgcgctgaactcgaagccctcctaagctccaaagatgacgtggggaaaagcgtgcacgagctggaacgcgcttgccgagtggccgagcaagcggcaaacgatctcagggcccaggtgaccgagttggaagatgaactcactgccgctgaggatgccaaactgcggcttgaggtgactgtgcaggccctgaagacccagcatgaacgcgatttgcagggtcgggacgaagccggtgaagaacggagacggcaactcgcgaaacagctgcgcgatgcggaagtggagcgtgatgaggagaggaagcagaggacacttgcggtggcagctagaaagaagctggaaggtgagctagaggagctgaaagcacagatggcgtctgcaggtcagggaaaggaagaggctgtcaagcagctgcggaagatgcaggcccaaatgaaggaactctggcgggaagtggaagaaaccaggacatcccgcgaagaaatattttctcagaaccgagaatccgagaagcgactgaaaggcctggaagcagaagtgttacggctccaggaggaactggccgcaagcgatagggccagacggcaggctcagcaggatagggatgagatggcagacgaggtggccaacggcaacctgtcaaaagccgcaatactggaagaaaaacggcagctcgaggggagattgggtcaactggaggaggaactggaagaggaacagagtaattccgagttactgaacgatagataccggaagttgctgctgcaagtggaatccctgacaaccgaattgtccgctgagcgatcctttagtgcgaaagctgaaagtggcaggcagcagctggaacgtcaaatacaagaattaaggggtcgtctgggcgaggaggatgccggagcacgggcaaggcacaagatgacgattgcggcactcgagagcaaacttgcccaggccgaagagcagcttgagcaagaaactagagagcgtatcctctccggtaaactggtgaggcgcgctgaaaaacggctcaaggaggttgtcttacaggtagaggaggaaagacgggtggcagaccagctgcgagaccagctggaaaaggggaatcttcgcgtcaaacagctcaagcggcagcttgaggaagccgaggaagaggccagccgggcacaggctggtcgcaggcgcttacaacgagagctagaggatgtaaccgaaagtgccgaatcaatgaatcgggaggttacgacactacgaaacaggctccgaagaggccctctaacgtttacaacgcgtaccgtgcggcaagtgttcagattggaggagggcgtcgcgtctgacgaagaggctgaggaagcccagccagggtcaggcccttctcccgagcccgaggggtcacctcccgctcacccgcagta

SEQ ID NO: 231701 - DNA, 5841 bp, synthetic construct
  misc_feature 1..5841: note = Description of Artificial Sequence: Synthetic coding sequence
  source 1..5841: mol_type = other DNA
atggttgagagttgcctcttgaccttccgggcattcttttggtggatcgcgcttattaagatggacctaagcgatctgggcgaagcggcagctttcctgcgtaggagcgaagctgagttgctgttgctgcaggccaccgctctggatggaaagaaaaagtgctggatccccgatggtgagaatgcgtacatcgaagccgaggtgaaaggctccgaggatgacggaacagtgatcgttgagaccgccgatggagaaagcctgtcgattaaggaggacaagatacagcagatgaaccctcccgagttcgagatgattgaagacatggcaatgctcactcacctgaacgaagcttcggtgctacacacccttaagcgaagatacggtcagtggatgatttatacttactccggtctcttctgtgtgactataaacccttacaaatggctcccggtctaccagaaggaagtgatggcggcttataagggaaagaggcggtctgaggctcccccacacatcttcgccgtggcaaataatgcatttcaggacatgttgcataatcgcgagaaccagagcattttgtttacaggagagtcaggagccggtaaaaccgttaattcaaagcacatcattcagtacttcgcaacaattgctgccatgatcgagtcccgaaaaaagcagggggctctggaggatcagattatgcaagcgaacaccattctggaggcctttggaaacgcgaagacacttcggaatgacaattcatcgagattcggcaagttcattcgcatgcactttggtgctagaggaatgctttcttcagtcgacatcgatatctatctgcttgagaagagcagagtcatattccaacaagctggcgaacgaaattatcacattttctatcagatcctgtcaggacagaaagagcttcatgacctgctcttggtgtccgcgaatccgtctgactttcacttctgcagctgcggcgcagtcactgtggagagcctcgacgatgccgaggaactcctggccactgagcaggcaatggacattctgggttttcttcctgacgaaaagtatgggtgttataagttgaccggtgcgatcatgcattttggaaacatgaagttcaagcaaaagccccgagaggagcagctggaggcagacggcaccgagaacgctgacaaggccgcattcctcatggggattaattcttccgagttggtgaagtgtctcatccaccctcgcattaaagtgggaaatgagtatgtgacacgcggtcagaccatcgagcaggtcacttgtgctgtgggcgcacttagtaaaagcatgtacgagaggatgttcaaatggctagtggcacgtattaacagagccctggacgccaaactgagcagacaattctttatcggtattctcgacattactggctttgaaatcctggagtacaacagcctcgagcagctgtgcattaacttcactaatgagaagcttcagcagtttttcaactggcacatgtttgtgctggagcaggaggagtataaaaaagaatcaatcgaatgggtgagcattggattcggattggacctccaggcttgtatcgatctgatagagaagccaatgggtatactaagtatcctggaggaggagtgcatgttccctaaggccactgatttgacttttaaaaccaaattgtttgacaaccactttggtaagtctgtgcacctgcaaaaacctaagcccgataagaaaaagtttgaggcccactttgaactggtgcattacgccggtgtagtgccatacaacatttccggatggcttgaaaagaacaaggacctgctgaatgaaacagtggtggctgtctttcagaaatcttctaataggctccttgccagtctgttcgaaaattacatgtcgaccgactccgcaatcccttttggagaaaagaagcgaaaaaagggtgcttccttccagaccgtggcctctctgcacaaagaaaacctgaataagttaatgacgaatctgaagagtactgctcctcacttcgttcgttgcatcaaccccaatgtcaataagattccgggaatcctcgacccatatctggttctgcagcaactgcggtgtaatggggtcttggaagggactcgcatctgccgggaggggttccccaacagactgcagtacgcggactttaagcagagatactgtattctgaaccctcgtaccttccccaagtcgaagtttgttagttcgcggaaagcggctgaagaactgctgggatccctggaaattgaccatacccagtatcggtttggaattaccaaggtgttcttcaaagcaggatttctcggacaactcgaggcaatccgggacgaacgcctgtcaaaggttttcacgctatttcaggcacgcgctcaggggaagttaatgagaattaaattccaaaagatcttagaagaacgggacgccctcatactaatccagtggaacattcgggcattcatggcagtgaagaactggccgtggatgagattgttcttcaagatcaaaccactggttaagtcctccgaggtcggcgaagaggttgccggactgaaagaagaatgtgcccagctgcagaaggctcttgaaaagagcgagttccagagggaagagttgaaagccaaacaggtgtcacttactcaggaaaagaacgatctcatactgcaattacaggccgagcaagaaacactggctaatgtggaagaacagtgtgagtggctgatcaaatcaaagatacaactagaagctagagtcaaagagctgagtgagcgcgtggaggaggaggaagaaattaattcagagctgacagctcggggacgtaagctggaggatgaatgttttgagctgaagaaagaaatcgatgacttggaaacaatgctagtcaagtcggagaaagagaagcgcaccacggagcacaaggtaaaaaacctgaccgaagaggtagaattcctcaacgaggatattagcaagctcaatagagccgcaaaggtcgttcaagaagcccaccaacagacactcgacgaccttcatatggaggaagagaagctgtcaagcttgtcaaaggcaaatctgaaactggagcaacaggtggatgagcttgagggtgccctggaacaggaaagaaaagccagaatgaattgtgagcgcgagctacacaagttggagggtaatctgaaactgaatagagagagtatggagaacctcgagtccagtcagcgacacctggcggaagagctgcggaagaaggagctagaactgtcccagatgaactctaaggtagaaaatgaaaaggggctggtggcgcaactccaaaagacagtgaaagaactgcagacacagattaaggatctgaaggaaaagctggaagctgagagaaccactagggctaagatggagcgcgaacgcgcagatctgacgcaggatcttgcagacctgaacgaacgtctggaagaagtggggggaagctctctggcccaactggaaatcaccaaaaaacaggaaactaaattccagaagctgcacagggatatggaggaggccacgctgcacttcgaaaccacctcagcttcactgaagaagcgccacgccgactctttggcagagctggaaggtcaagttgaaaacctgcagcaggtgaaacagaagttggagaaagacaagtcagatctgcagttagaggtagacgacctgctcacccgagtggagcagatgactagagccaaggcaaacgccgaaaaactgtgcacgctgtacgaagagcgactgcacgaggctaccgctaagcttgacaaggtgactcaactggcaaatgacctcgcagcccagaaaacaaagctgtggtccgagtctggggagttcctgcgaaggttggaagagaaggaggccttgatcaatcagctctcccgtgagaagagcaacttcactcgccagatcgaggaccttcggggacagttagaaaaagaaaccaaaagtcagagtgctttggcccatgcccttcaaaaggcccagagagactgcgaccttttgagggaacagtacgaagaagaacaggaggtgaaagccgaactgcataggacactttccaaagtcaatgccgaaatggttcagtggcggatgaaatacgagaataacgtaatccagcggaccgaggatcttgaagacgctaagaaggaactcgcaatacgcctgcaggaggcggctgaagccatgggagtggccaacgccaggaacgctagcctcgaacgagcacgacatcaactacaactcgaacttggcgatgccctctctgacctcggtaaggtgagatcggccgctgctaggttggaccagaagcagttgcaatccggaaaggccctcgccgattggaagcagaagcacgaagagagccaggctctgttggatgcatcacagaaggaggttcaggcgctgtctaccgagttactgaaactgaagaacacctatgaggagtcgatcgtcgggcaggaaaccctgcgacgcgagaacaagaatctgcaagaagaaatctctaacttgacaaaccaggtgagggagggcaccaagaatctgactgaaatggagaaggttaagaagctcattgaggaggagaaaaccgaagtacaggtgaccctggaggagactgagggcgctctggagcgaaacgaatcaaagatcctccactttcagcttgagcttttagaggcaaaggccgaattggagagaaagttatccgagaaggatgaggaaatagagaatttccgacggaagcagcagtgtaccatcgattccctacaaagctccctggactctgaggctaagagccgtatcgaagtaactcgcctgaagaaaaagatggaagaagatctgaacgaaatggagctacagctgtcttgtgctaaccgccaagtcagcgaggctaccaaatcattgggccagctacagatccaaatcaaagacctccagatgcaactggacgatagcacacagttgaatagcgacctgaaggagcaggtcgccgttgctgagcgcagaaattcactgctgcaaagcgaactagaggaccttaggtccctgcaggagcaaactgagaggggccgtcgcttgtcagaggaagaactcttggaagctacggaacgcatcaatctgttctatactcagaacaccagcctcctttctcagaaaaagaagttggaggcagacgtggctcgcatgcagaaagaggcagaagaagtggtccaggagtgccagaatgccgaagaaaaagcgaagaaggctgccattgaagccgctaacctcagcgaggaactgaagaaaaaacaagacacaatagcgcacctcgaaagaactcgtgagaatatggaacagaccattaccgacctgcagaaacgcctagctgaggcagaacagatggcactgatgggctctaggaaacagattcagaagctcgaatctcgagtgcgagagctggagggcgagttggagggagagatcaggcggagcgctgaagcccaaagaggcgctcgtcggttggagaggtgtatcaaagaattgacctatcaagcagaggaagacaagaagaatctgagcaggatgcagacccagatggacaaactgcaactgaaggttcagaattataaacagcaggtcgaagtggccgaaacccaagccaatcaatacctgtccaagtacaagaaacagcagcacgagctgaacgaggtaaaggaacgagccgaagtagctgaatcccaggtcaataagctgaaaattaaggccagagagttcgggaaaaaagtgcaggaggagtat

SEQ ID NO: 231702 - DNA, 5826 bp, synthetic construct
  misc_feature 1..5826: note = Description of Artificial Sequence: Synthetic coding sequence
  source 1..5826: mol_type = other DNA
atgtcttcagatagcgaactggcagtcttcggcgaggcggctccttttctacggaagtccgagcgggaacggattgaggctcagaacagaccttttgacgccaagacctcggtgttcgtcgcggaacccaaggaatccttcgtaaagggaacaatacaaagtcgagagggaggcaaggtcacagtcaaaacagaagggggtgctacacttaccgtgaaggatgaccaggtgttcccaatgaatcccccaaagtatgacaaaatcgaggacatggctatgatgacacacttacatgaaccggcagtattatataatctgaaagagaggtatgcagcgtggatgatctatacatatagtggtttattttgtgtgaccgtgaacccatataaatggctgccggtatacaaacccgaggtcgtaacagcctaccgagggaaaaagagacaggaagctcctccccacatttttagcatctcagataacgcctatcaattcatgcttacggatcgagagaatcagagcatcctgatcacaggcgaaagtggggctggaaaaactgtcaacaccaaacgagtcattcaatattttgctaccattgctgtgaccggagaaaagaaaaaggaggagatcacctccggaaaaatccagggtacactggaggatcagatcatctccgccaaccctctgttagaggcattcggaaacgctaaaaccgtgcggaacgataattcctcccgctttggcaagtttataaggatccactttggaaccacgggaaagctggccagcgctgatattgagacttacttactggagaagtcacgagtagtctttcagctcaaagcggagcgctcgtaccacatcttctatcagatcacttccaacaagaaacctgaactcatcgagatgctcctgattaccactaatccctatgactatccatttgtgtcacaaggagaaatctccgtggcttccatagacgaccaggaagaactcatggccaccgattctgcaattgacatcctgggcttcaccaatgaagaaaaggtctcgatatataaacttaccggcgcagttatgcactacggaaacctcaagttcaaacagaagcagcgcgaagaacaggctgagccagatggtaccgaagtggcggataaggccgcttaccttcagtccctcaacagcgccgacctcctcaaggcgctctgctatcctagggtgaaagtaggcaatgaatacgtaactaaaggtcagacggtcgagcaggtcagcaacgccgtgggcgctcttgccaaggccgtgtacgagaagatgttcctctggatggtggccaggattaaccagcagctggataccaaacagccgagacagtacttcattggcgtcctggatattgccggattcgaaatatttgattttaacagccttgagcagctatgcattaactttactaatgagaaacttcaacagttttttaaccaccacatgtttgtgctggaacaggaagagtacaaaaaggagggcattgaatggacatttatcgacttcggcatggatctggctgcttgtattgaactgatcgagaaaccaatgggtatcttcagcatcctcgaggaagagtgcatgttccccaaggctacagacactagcttcaagaataagctctacgatcaacacttgggaaagtctgccaatttccagaaacctaaggtcgtgaaggggaaagcggaggcccactttgcgttgatacactacgctggtgttgtcgactacaatattactgggtggctggagaaaaataaagaccctttaaatgaaaccgtagtcggtttgtaccagaagtccgcaatgaagactcttgcccagctctttagtggagcacaaacagccgagggtgagggagccggaggcggagcaaagaaggggggaaaaaagaaaggcagctctttccagaccgtgtccgctttattccgagaaaatctcaacaaactcatgacaaatcttcgctctacccatccccacttcgtgcggtgcatcattcccaatgagactaagacccccggagctatggaacatgagctggtgcttcatcaactgaggtgcaacggcgtgctcgaaggaattcgaatttgccggaaaggtttcccatcccgtatcctgtatgccgactttaagcagcgttacaaagtcctgaacgctagcgccatccctgagggtcaattcattgattctaagaaagctagcgagaagcttcttgcatccatcgatatcgatcacacccagtataaattcggccatactaaagtcttttttaaggcaggactgcttggcctcttggaggagatgagagacgacaagcttgctcagctcattacaagaactcaggctaggtgcaggggcttcctggcaagagtggaataccaaaggatggtcgaacgcagggaggcaattttctgcatacagtataacattaggtcatttatgaacgttaaacactggccctggatgaagctgttttttaaaataaaacctctcctcaaatcggccgagaccgaaaaagaaatggcgacaatgaaggaagagttccagaaaatcaaagacgagctcgcaaagtctgaagcgaagcgcaaggagttggaggaaaaaatggttaccttgcttaaagaaaagaacgacctgcaactccaggttcaggcggaagcggaggggctcgcagatgctgaggaacgctgtgaccagctaatcaaaacaaagattcagttagaagcaaaaattaaggaagtgactgaacgcgcagaagacgaagaggaaataaacgcagagctcacagctaaaaaacgcaagttggaagatgagtgcagtgagctgaaaaaggatatagacgatctggaactgacattagcaaaagtggagaaagaaaaacatgctactgagaataaggtgaagaacctaacagaggaaatggctggtttggacgagacaattgccaagttgaccaaagagaagaaggcgcttcaggaggcccaccaacagacactggacgatttgcaggccgaggaggacaaggtgaacaccctcactaaagctaagatcaagttggagcagcaagtagatgatttggaaggaagcctggagcaggaaaagaaactgaggatggacctagaaagggctaagagaaaactggagggtgatcttaaacttgctcaggagagcatcatggacatcgaaaacgaaaagcaacaactggacgagaagcttaaaaagaaagaatttgagatctcaaacctgcagagcaagattgaggacgagcaggccctgggaatacagctgcagaagaaaattaaggagctacaggcgaggattgaagaacttgaggaggagatcgaagcagagagggcttcgcgcgctaaagcagaaaagcaaagatcggacctttctcgcgagctggaagagatctctgagcggctggaagaagccggtggcgctaccagtgctcagatcgagatgaataagaagcgagaagcggagtttcaaaagatgcgacgcgatcttgaggaagccaccctgcagcatgaagccacggccgctactctgcgcaaaaagcatgcagactctgtggctgaactcggggagcagatcgataatctgcaacgcgtgaagcagaagctcgaaaaagagaagtccgagatgaaaatggaaattgacgatctggctagtaatgtagagacagtgagtaaggccaaggggaatctggagaagatgtgccgaacactcgaagatcagctgagtgagttgaagtcaaaggaggaagaacaacaaaggctgatcaatgatctgaccgcccagaggggcagactccagactgaaagcggcgagtttagtaggcagctggatgagaaagaggcccttgttagccagctcagtcgaggaaagcaagccttcacacagcagattgaggagctgaagaggcagctggaagaagaaataaaggccaagaatgctttagcccatgcattacagagctcccggcacgattgtgacctgttgagagagcagtacgaggaggagcaagaaagcaaggcagagctgcagagagctctgagcaaagccaatacggaagtagcccagtggcggaccaaatatgaaactgacgcaattcagaggactgaagagctcgaggaagccaaaaagaaactcgcgcagcgcttgcaggccgctgaagagcatgtggaggctgtgaatgcaaaatgtgcctcactggagaaaaccaaacagaggctccaaaacgaagtagaagatctgatgctggatgttgagaggaccaacgccgcatgtgcagcactggataagaagcagcgcaactttgacaaaatcctggccgagtggaaacagaaatgcgaggaaactcacgcggaactggaagcctctcagaaggaggctcggagccttggaaccgagctgtttaagatcaagaatgcctacgaagagtcgctggaccagctggagacgttgaagagagagaataagaacctgcagcaagaaatctcagatctgacagagcagattgccgaaggagggaagcgaattcatgagctggaaaagataaaaaagcaggtggagcaagaaaagtgtgagcttcaggctgcactcgaggaggcagaggcctctctcgagcacgaagagggcaagatcttgaggatccagcttgagctaaaccaagtgaagagcgaagtggacaggaagatcgctgaaaaggatgaggaaattgatcaactgaagcggaaccatattagaattgtcgaatcaatgcagagcaccctggatgctgaaattcgcagtcgtaacgatgctatccgactgaagaagaagatggagggggatcttaatgaaatggagattcagcttaaccatgccaacaggatggcagcggaggcgctgaggaactatcgaaatacgcagggcatcctaaaggacacccagatccacctggacgatgccctgagaagccaagaggacctgaaagaacagcttgctatggtcgagaggcgagcgaatctgcttcaggctgaaatcgaggaactccgagctacactggaacaaacggaaaggagccggaagatcgccgaacaagaattgctcgatgcaagtgagcgcgtgcagctcctgcacacacaaaatacctccttgatcaataccaagaaaaagttggaaaccgacatctcacaaatgcaaggcgaaatggaagatattctgcaggaagcaaggaatgccgaggaaaaagcaaaaaaggcgattaccgatgctgccatgatggccgaggagctgaagaaagagcaggatacaagtgcccatctggagcgtatgaagaagaacatggaacagactgtgaaggacctacagctgaggttagatgaggctgagcagctcgccttgaagggcggtaagaagcaaattcagaaacttgaggccagagtccgggaacttgagggtgaagttgaaagcgagcaaaaaaggaacgccgaagcggttaaagggttacgcaaacacgagaggagggttaaagaactcacgtaccagaccgaggaggaccgaaagaacatcttgagactccaggatctggtagataagttgcaggcaaaagtgaagtcttacaagcgccaagccgaagaggccgaggaacagtctaatactaacctggccaaattccggaagctgcagcacgaattggaggaggccgaggagcgcgcagacatagctgaatcacaggtaaataagctgagggtcaaaagtcgagaagtacataccaaggtgattagcgaggagtag

SEQ ID NO: 231703 - DNA, 5825 bp, synthetic construct
  misc_feature 1..5825: note = Description of Artificial Sequence: Synthetic coding sequence
  source 1..5825: mol_type = other DNA
atgtcctctgattcggagctggctgtgtttggggaggccgcaccattcctccggaagtccgaaagggaacgaattgaagcacagaatagaccttttgatgcaaagacatccgtcttcgttgctgaaccaaaggagagttttgtgaagggcacaattcagtctcgggagggtgggaaggtcacagtgaagaccgaaggaggtgccaccctcacagtgaaagatgaccaggttttcccaatgaaccccccaaagtatgacaagatcgaggacatggccatgatgacacaccttcacgaaccagccgtgctatataacctgaaagaacggtacgccgcttggatgatttacacatacagtggcttgttttgtgtgacagtgaacccctacaagtggctgcctgtgtacaaaccagaggtagtgaccgcctatcggggaaaaaagcgccaggaggcacccccacacattttctctatttccgacaacgcataccagttcatgctgacggatagagaaaatcaatccattctgatcactggagagtccggggctggtaagacagtgaatacaaagcgggtgatccagtacttcgcaaccatcgcggtcacgggagaaaaaaagaaagaggaaatcacaagcggcaagattcagggtaccctggaggaccagattatttccgccaaccccctcctggaagcattcggaaacgctaaaacagttcgtaatgacaacagcagccgcttcgggaagttcatccgtattcatttcggcaccactggcaagctcgcaagtgccgatattgaaacctacttgctagagaagtcaagagtggtctttcaactgaaagctgagcgctcctatcacatcttctaccagatcacttcaaacaagaagcctgaactgatagagatgctactcatcaccaccaacccatacgactacccttttgtttcgcagggagaaattagtgtggctagcatcgatgaccaggaagagctgatggccacagatagcgccatagatatattggggttcacaaacgaggagaaagtgtcaatctacaagctcaccggcgctgtcatgcactacggaaatttgaagtttaaacaaaagcagagagaggagcaggcggagccagacggaacggaagtggctgataaggcagcctacctacagtcattaaattctgcagatcttctgaaggcgctgtgctaccctagagttaaggtaggaaacgagtacgtcacaaaggggcagactgtggagcaggttagtaatgcggtcggcgctttggctaaggctgtgtatgaaaagatgttcctatggatggtcgcccgaattaaccagcagctagataccaaacagcccagacaatactttatcggagtgctggatatcgccggattcgagatattcgacttcaacagcctggagcaattatgcattaatttcactaacgaaaagctccagcagttttttaatcaccatatgtttgtgcttgaacaggaagaatacaagaaggaagggatcgaatggacatttatcgacttcggcatggacctggcagcttgtatcgagcttatagagaaacccatgggcatcttcagtattcttgaggaggagtgcatgtttccaaaagctaccgacacgagtttcaaaaacaaactgtacgatcagcatctgggtaagtccgccaatttccagaagccaaaggttgtgaagggaaaggcggaggcccactttgcactcatacactacgctggcgtggttgactataacatcaccgggtggttggaaaaaaataaggaccccttaaacgaaactgtagttggcctgtatcagaaatctgctatgaagacactggcccagctgttttcaggggcacagaccgctgagggcgagggcgcaggtggcggagcgaagaaagggggaaagaagaagggctcatcttttcagacggtcagtgcgctgttcagagagaaccttaataagttaatgacaaacctgcgctcaacccacccccacttcgtgcggtgcatcattcctaacgagaccaagacaccaggggcaatggagcacgagctggtgctccaccaactgcgttgtaatggcgtgctggagggtattaggatctgcagaaagggattcccatcgaggatcctctacgctgattttaagcaacgatataaggtcctgaatgcttcagccatccctgaggggcagtttatcgacagcaagaaggccagcgaaaaactcttagcaagtatcgatatcgatcacacccagtacaaattcggtcataccaaagtattcttcaaagccggactgctcggtcttttagaagagatgagggatgacaaattagctcagctgataactcggacccaagcgaggtgtaggggctttcttgcacgggtggagtaccaaagaatggtcgaacgcagagaagcaatcttctgcatacagtacaacattcggtctttcatgaacgtgaagcattggccctggatgaagttgttttttaagatcaagcccctcctcaaaagcgcagaaaccgagaaggaaatggctactatgaaggaagagtttcagaagatcaaagatgaattggccaaaagcgaagcgaagagaaaggagctggaggaaaagatggtgaccctgctaaaagaaaagaacgatctgcagctgcaggtgcaggccgaagctgaaggtcttgcagacgcggaagagcggtgcgaccagcttatcaaaacgaagatccaactggaggccaagatcaaagaggtcacagagagagccgaagatgaagaagagatcaacgcagagctgacagcaaaaaagcgtaaattggaggacgagtgcagtgagttaaagaaggatatcgatgatttagaactgaccttagccaaagtggagaaggagaagcatgcgaccgagaacaaagttaagaacctgactgaggagatggctgggctggatgaaacaattgctaagctaaccaaagagaaaaaagccctgcaggaggctcatcagcaaacactggatgatctccaggcagaggaagacaaagtgaacacgctcactaaagctaaaatcaagctggagcagcaggttgacgacctggaagggtccctggaacaggaaaagaagctgcggatggatctggagcgtgccaagcggaaactggaaggtgacctaaaattggctcaggagtcaattatggacatcgagaacgaaaaacagcagttagatgagaagttgaaaaagaaggagttcgaaatcagtaacctgcaaagcaagattgaggatgagcaggcccttggcatacagcttcaaaagaagataaaggaattacaagctcgaattgaggaactggaagaggaaattgaggcagagcgcgctagccgcgctaaggcagaaaaacagcgcagcgatttgtcacgggagctggaggagatctccgagagactggaagaggcaggcggagcaacgagtgctcaaattgagatgaacaaaaagagggaggccgaatttcagaaaatgagaagggatctggaagaggctacactccaacatgaagccactgcagcgactcttcgcaaaaaacatgctgatagcgtcgccgagctcggcgaacagatagataatctccagcgcgtaaagcaaaagctggagaaggaaaagtctgaaatgaagatggagatagacgatctcgcaagtaacgtggaaaccgttagtaaggctaaaggtaacctcgaaaaaatgtgtcggacccttgaggatcagctgtctgagctgaagtccaaagaagaggagcagcaaaggttgatcaacgatctgacagctcagaggggcagactccagaccgagtcaggggagttcagtcgtcagttagacgaaaaggaggccttggtgagtcagctgtctagagggaagcaggctttcacgcagcagattgaagaattaaagagacagctcgaggaggagatcaaggccaaaaacgcattagcgcacgccctacagagcagcagacatgactgtgatctgcttagagaacagtacgaagaggaacaagagagcaaagcagagttgcaacgggcactgagtaaggcaaatacggaagtggcacagtggcgaacaaagtacgaaacagacgcaattcaacgtaccgaggagctggaggaagcaaaaaagaagctagcccaacggcttcaggccgcagaagaacatgtggaggcagtgaatgctaagtgcgctagcctggaaaagacgaagcagaggctgcagaatgaagtggaagacctgatgctcgacgtcgagaggaccaacgcagcttgtgctgctctggataaaaagcagcggaatttcgacaagatactcgcggagtggaagcaaaaatgcgaagagacccacgccgagctggaggcctctcagaaagaggcacgcagtttggggaccgagctgtttaagataaagaacgcctacgaagagagcctcgatcagcttgagactctgaaacgggaaaataagaacctccagcaggagatttccgatttaacagagcagattgcggagggcggtaagcgcatccacgaactcgagaaaatcaagaaacaggttgaacaggagaagtgcgagctgcaggccgctctcgaggaagccgaagccagcttagagcatgaagagggcaaaattctgcgtattcagctggagctcaaccaagtaaagagtgaggtggaccgaaagatcgctgaaaaggatgaagagatcgatcaattaaagagaaaccatattagaatagtggagtcaatgcagtccaccctggatgccgaaattagatctaggaatgacgcgatccgtctgaagaaaaagatggagggagatctcaatgagatggagattcaattgaaccacgccaaccgtatggctgcagaggcgctccgaaattaccgaaacacccaagggattctcaaggacactcagattcatctagatgatgccttgaggtcgcaggaggacctgaaggagcagttggccatggtggaaagacgtgccaacctgctgcaggctgaaatcgaagaattgcgggctacgctggaacagactgagcgcagccgcaaaatcgccgaacaggaacttctggatgcatcagagcgggtgcagcttctgcacacgcagaatacttcgctgattaacacaaagaagaagttggagacggatatttcacagatgcagggcgaaatggaggacatactccaggaggccaggaacgcagaggaaaaggccaaaaaagcaataaccgacgcggcaatgatggctgaggaacttaagaaggaacaggacacttccgcccacttagaacgtatgaaaaaaaacatggaacagacagtcaaggaccttcagcttaggttagatgaggcagaacagttggcgctgaaaggagggaagaaacagattcagaagttagaggcgagagtgagagagctggagggagaagtggaatccgaacagaagcgcaacgctgaggctgtcaaaggactacggaagcatgagcgacgggtgaaagagttgacttaccaaaccgaggaagacagaaagaacatcctgaggctgcaggatttggtggataaattgcaggccaaggttaagtcatataaacgtcaggccgaagaagcggaggaacaaagcaataccaacctggccaaatttcgcaaactgcagcatgaactggaggaagctgaagaacgcgcagacatcgcagagagccaggtgaacaagcttcgcgtgaagagccgggaggttcacactaaagtgatctccgaagaata

SEQ ID NO: 231704 - DNA, 549 bp, synthetic construct
  misc_feature 1..549: note = Description of Artificial Sequence: Synthetic coding sequence
  source 1..549: mol_type = other DNA
atgtctagtgattctgagctggccgtgtttggcgaggccgcacccttcctgaggaaatccgaaagggagcgcatcgaggctcaaaaccgtcccttcgatgccaaaacaagtgtgttcgtggcggagccgaaagagagcttcgtcaaagggacaattcagagtagggagggcggaaaggtcacagtaaaaacagagggcggagctacattgacagtgaaagatgatcaggtgtttccgatgaaccctcctaagtacgacaaaatagaagatatggctatgatgacccatctgcatgagcccgctgtgctgtataacctgaaggagaggtatgcagcctggatgatatacacatattctggtctgttttgtgtgaccgttaatccttacaagtggctcccagtgtacaagcccgaagtcgtcaccgcttacagaggcaaaaagaggcaagaagccccaccccacatcttcagtataagtgacaacgcctatcaatttatgttaaccgatagggagaaccagagtatcttaataactggcgagtccggttag

SEQ ID NO: 231705 - DNA, 405 bp, synthetic construct
  misc_feature 1..405: note = Description of Artificial Sequence: Synthetic coding sequence
  source 1..405: mol_type = other DNA
atgtccagcgacagtgagttagccgtattcggcgaggcagccccattcctgcggaaaagcgaaagagaaagaatagaggcccagaataggccattcgacgccaagacctctgtattcgtggccgagcctaaggagtcctttgtgaagggaaccatccagtcccgggagggagggaaggttactgtaaagaccgaaggtggagccaccctgacagtaaaagacgaccaggtattccccatgaacccaccaaagtatgacaaaatagaggatatggccatgatgacacacctgcatgaacccgcagtgctctacaatctgaaggagagatatgcagcctggatgatttacacctactccggcttgttttgtgtaacggttaatccgtataagtggttgcctgtctag

SEQ ID NO: 231706 - DNA, 2127 bp, synthetic construct
  misc_feature 1..2127: note = Description of Artificial Sequence: Synthetic coding sequence
  source 1..2127: mol_type = other DNA
atgagcagtgattctgaattagctgtctttggggaggctgcaccattcctcagaaagagcgaaagggagcgaattgaggcccagaataggcctttcgacgctaagactagtgtgttcgtggccgagcctaaggagagcttcgtgaagggtactatccagagcagggaaggaggtaaggttacagtgaagacagaggggggagcgaccctcactgttaaggatgatcaggtattcccgatgaaccctcctaaatacgataaaatagaagatatggcgatgatgacccacctccatgagccggcagtcctttataacctgaaagaacgatacgccgcatggatgatctatacctacagcggactattctgcgtgaccgtaaatccttacaagtggctccccgtctacaaaccagaagtggtcaccgcctatcgcggaaaaaagcggcaggaggcacctccacatattttctccattagcgacaacgcttaccaattcatgctcacagacagagagaatcagtctatcctcatcactggagaatccggggctggtaaaactgtgaacaccaaaagagtgattcagtatttcgcaactattgcggtaaccggcgaaaagaaaaaggaggagattacatcgggaaagattcagggcaccttagaggatcagatcatttctgcaaaccctttgctggaggcattcgggaacgccaagaccgtcagaaatgacaacagttcccggtttggtaaatttattagaatccactttggtacaaccgggaagttagcaagcgctgacattgaaacctatctccttgaaaagtccagggttgtgttccagctgaaggccgagaggtcataccatatattctatcagatcactagtaataaaaagccagagttgattgaaatgctcctgattactaccaatccctatgattacccttttgtgtctcagggtgagatcagtgtggcttccatcgacgatcaggaggaactgatggctacggactccgctatagatattctggggttcaccaatgaagagaaagttagcatttataaactgacaggagccgtgatgcattatggaaacctgaagttcaaacagaagcagagagaggaacaagccgagccagatggaactgaggtcgctgacaaggcagcctatctccagagtctgaattctgcggatctgttgaaagccttatgctaccccagggttaaagtgggcaatgagtatgttactaaggggcaaacagttgaacaggtgtctaacgccgtgggtgcacttgccaaggccgtgtacgaaaaaatgtttctctggatggtcgccagaattaatcagcaactggacacaaaacagcccagacaatactttattggtgtattagacatcgccggattcgaaatttttgacttcaactcgctagagcaattgtgcataaatttcaccaatgaaaaactgcaacagttctttaaccaccatatgtttgtgctggaacaagaggaatacaaaaaagagggaattgaatggacctttatcgattttggcatggatctggccgcttgtatcgaactgatcgagaagccaatgggaattttttctatactggaagaggagtgtatgtttccgaaagcaacagacaccagttttaagaacaaactgtacgaccagcatctgggcaaatcagccaacttccaaaaacctaaggttgtgaagggtaaggctgaagcccactttgcccttatccactacgccggtgtcgtggattacaacattactggctggctggagaagaacaaggaccctctgaatgagaccgtcgtaggcctctaccagaaaagcgctatgaaaacactggctcaactcttctccggtgcccagacagctgagggtgagggagccggaggcggagccaagaaggggggtaaaaaaaaggggagttcattccaaacggtgagcgccctcttcagagaagaacagagtaacaccaatctggccaaatttcgcaaactccagcacgaactggaggaggctgaagagcgggcagatatcgccgagagtcaggtaaataagctgagggttaagagccgggaggtgcatacaaaggtgatcagtgaggaatag

SEQ ID NO: 231707 - DNA, 5820 bp, synthetic construct
  misc_feature 1..5820: note = Description of Artificial Sequence: Synthetic coding sequence
  source 1..5820: mol_type = other DNA
atgagctcagactctgaaatggctatcttcggagaggcggcaccctttctgcggaagagcgagagagagcgaattgaggctcaaaacaaaccgttcgatgcaaaaacaagtgtattcgtggtggaccccaaggagtcttttgtaaaagccacagtccagtctagggaggggggtaaggtaactgcaaagaccgaggcgggagcaacagtgaccgtgaaggatgaccaggtgtttcccatgaacccacccaaatacgataagattgaagacatggctatgatgacccacttacatgaaccagccgtcttgtacaacctgaaggaacgttacgcagcttggatgatctatacttacagcgggctgttctgtgtgactgttaacccctataagtggctgcccgtttacaacgccgaagttgttaccgcctaccggggtaaaaagagacaagaggctccgcctcatatcttttcaatcagcgataacgcttaccagtttatgcttacagatcgggagaatcagtcgattctcattactggtgaatccggggcaggaaaaaccgtcaatactaagagggtgattcagtactttgccactattgcggttacaggggaaaaaaaaaaagaggaggtgaccagtgggaagatgcaaggaacactggaagaccagattatttcagcaaacccactcctcgaggcatttggaaatgcaaagacagtgcgtaatgacaactcctcaaggttcgggaagtttatccgaatacactttggaacgacgggcaagctggcttctgccgatatagagacttatctcctggaaaaaagcagggtcaccttccaattaaaggcagagcgctcatatcatatcttttaccaaattatgagtaataagaagcctgatcttatagagatgctgttgatcaccacgaacccatatgattatgcttttgtctcccaaggcgaaatcacagtacccagcatcgatgaccaggaggagctgatggcaacggattctgcaattgagattttaggtttcacttctgacgagcgggtttccatatacaagttaaccggcgctgtgatgcactacggtaatatgaaatttaagcagaagcaaagggaggaacaggcggagcctgatggcaccgaggttgcagacaaagccgcataccttcagaatctaaatagcgccgatctgttaaaagcgctctgctatccgagggtgaaagttgggaacgaatacgtcaccaaaggccaaacagttcaacaggtttataacgcagtcggagccctggcgaaggctgtatatgacaagatgtttctgtggatggttacccgtattaaccagcagttggatactaagcagcccaggcagtactttatcggcgtccttgacattgcagggtttgaaatcttcgattttaactctttagaacagctgtgcataaattttaccaatgaaaagctccagcagttctttaatcaccatatgttcgtgcttgagcaagaagagtacaagaaagaggggattgagtggacattcatcgacttcggcatggatctagcagcgtgcattgagctgattgagaaaccgatgggcatctttagcatcttggaagaagaatgcatgttcccaaaggccacagacacatcatttaaaaacaagctctatgagcagcacctaggaaagagcaacaacttccagaagcccaagccggcaaagggaaagccggaagcccatttcagcctgatccactatgcgggaacagttgactacaatatcgccggttggctcgacaaaaacaaagacccgctcaacgaaactgttgtcggactataccagaagtcagctatgaagactctcgccctgcttttcgtcggcgctactggagccgaggctgaggccggtggtgggaaaaaagggggaaagaagaagggttctagcttccagactgtctctgcactatttcgggaaaatttaaataaattaatgacaaacctgcgctccacgcatccgcattttgtaagatgtatcattcccaacgagaccaagacaccaggcgctatggaacacgagctggttctccaccagctgcggtgcaatggcgtgctggaaggtattcgaatctgccggaaggggtttccatcaaggattctttacgccgactttaagcagcgctataaggtgctaaacgcctccgctattccagagggccaattcatcgattcaaagaaggcatcagagaaactacttggctccatcgatattgaccacacccagtacaaatttggacacactaaagtcttctttaaggctggtctgttgggactgctggaggagatgcgcgacgagaaattagctcaactcattacccgcactcaggccatgtgcagaggatttttggcgcgagtggaatatcagaaaatggtggagcgcagagagagtatcttttgcatacagtataacgtgcgggctttcatgaacgtaaagcactggccttggatgaaactctactttaaaatcaagcctctgttaaagtcagcagagacagaaaaggagatggcaaatatgaaggaagagtttgagaagacaaaggaggaattggccaaaactgaagccaaaaggaaagaactcgaagaaaagatggtcaccttaatgcaagagaagaacgacctacagctccaggtgcaggctgaggctgactctctagccgatgctgaggaacggtgtgatcagctcatcaagactaaaatccagctggaggccaaaattaaggaggtgacagagcgtgcagaggacgaggaagaaatcaacgcagaactgactgctaaaaaacggaaactagaagacgaatgttcagaactgaaaaaggatatcgatgacctggagctcactctggccaaggttgaaaaagagaagcatgccactgaaaacaaagtgaaaaatcttactgaggagatggctggcctggacgagactatcgccaaattgaccaaggaaaaaaaagccctccaggaggctcaccagcagacactggatgacctccaggctgaggaagataaggtgaatactctgactaaggccaagatcaaattagaacaacaggttgacgatctcgaggggagcctcgaacaggagaaaaagatccggatggacttagaacgggctaagcgtaagctggaaggagacctgaaactcgcccaggagtccacgatggatattgaaaacgacaagcaacaactggatgagaagctgaaaaagaaggagttcgagatgtctggtcttcagtctaagatcgaggatgagcaggcgttgggaatgcagctgcaaaagaaaataaaggagctccaagccagaatcgaggaactcgaggaggaaattgaggcagaacgggcatcccgggctaaggccgaaaagcaaaggtcagatttatcgagggagctggaagagatttcagagaggttagaggaggctgggggagctacctccgctcagatcgagatgaacaaaaaacgcgaggcagaatttcagaaaatgcggagggatctagaggaggctacattgcagcatgaggccactgcggctacccttagaaagaaacacgcagattctgtggctgaactgggagaacaaatcgacaacctccagcgcgtcaaacaaaagctggagaaggaaaagtctgaaatgaagatggagattgatgacctcgccagcaatatggaaaccgtgtcaaaagcaaagggcaacctggaaaagatgtgccgggctcttgaggatcagttaagcgagattaagacgaaggaagaggagcagcagagattgatcaacgacctgactgcccaaagggccaggttacaaaccgagtcgggcgagtactctcggcaactggatgagaaggataccctggtctcgcagctgagtcggggaaagcaggcatttactcaacagattgaggagctgaagcgacagctggaagaggaaatcaaggcaaaaagtgctctggcacatgcattgcagagcagtagacacgattgcgatctgctgcgcgaacaatacgaagaagaacaggaagccaaagcagagttgcagagggccatgtccaaggcaaacagcgaggtagcacagtggcgcaccaagtatgaaactgatgctatacagagaaccgaggaattagaggaggcaaagaagaaactcgctcagcgacttcaagacgccgaggagcatgtggaagccgtgaatgctaagtgcgcaagtttggagaaaaccaagcagaggctacagaatgaggtcgaagatctcatgatcgatgttgaaaggacaaatgccgcttgcgctgcgctggataaaaaacaacggaacttcgacaagattttagccgagtggaaacaaaaatgtgaagagactcatgccgagctggaagcgagccagaaagaaagcaggtctcttagcaccgaattgttcaaaatcaaaaacgcctacgaggagtccttggaccagctcgagacactgaaaagggagaataagaatttgcagcaggaaatatcagacctgacagaacagatcgctgaaggtggaaagcgaattcatgaactggagaagataaagaagcaagtagagcaggagaagtccgagcttcaggcagccctggaggaggcagaggcgtccctggagcacgaggagggcaagatcctgcggatccagctcgagctgaaccaggtgaaatctgaggttgacagaaagatagccgagaaagacgaagaaatcgatcagatgaagagaaatcatatccgcatcgtcgagagcatgcagtccactctggatgcagagatcaggagccgaaatgacgccattcggctgaaaaagaagatggaaggggatcttaatgagatggagattcagctcaatcacgccaacaggatggcggctgaggcattgcgcaactacagaaatacacaagcaatcctcaaggatacccagcttcatctggatgatgctttgcgatcccaggaggacttaaaagagcaactggcgatggtcgaaagaagagccaatctcctccaagcggagatagaagaacttcgcgcaaccctggagcagacggagaggagccgtaagatcgccgagcaggagcttctggatgcatccgaacgcgttcagttgctgcatacacaaaataccagcctgatcaataccaaaaagaaacttgagacagacatatcccagatccaaggggaaatggaagacatcatccaggaagcgaggaacgcagaggaaaaggctaaaaaggccatcaccgatgccgctatgatggctgaagagctcaagaaagagcaggacacctcagcccatctcgaacgcatgaaaaagaacctcgaacagacagttaaggacctgcagcacagactggatgaagctgagcagctggctctcaagggcggaaagaagcaaattcagaagctcgaagccagagtcagagagctcgaaggggaggtcgaaagcgagcagaaacgaaacgtcgaagcggttaaaggtttaagaaaacacgagaggaaagtgaaagagctgacttaccaaaccgaagaggatagaaagaacattctgcgcttgcaggatttggtggacaagctccaggcaaaagtgaagagctataagagacaagccgaagaagccgaggaacagtccaacgtgaatctcagcaagttccgacgtattcagcacgagctggaggaggcggaagaacgcgcagacattgctgagtcacaggttaataagctgagagtcaagtcacgcgaggtgcataccaagataatttcagaggaatac

SEQ ID NO: 231708 - DNA, 5820 bp, synthetic construct
  misc_feature 1..5820: note = Description of Artificial Sequence: Synthetic coding sequence
  source 1..5820: mol_type = other DNA
atgtcttctgacagtgagatggcaatttttggggaagcggcaccgttcctgaggaaatcggaaaaggaacgcattgaagctcaaaacaaaccgtttgatgctaaaaccagtgtcttcgtagtagatccaaaggaatcctacgtgaaagctatagtccagtctcgggaggggggtaaggtcacagccaagacagaggcaggggcaacagtgaccgtgaaagaagatcaagtgttctcaatgaatccacccaagtacgataaaattgaagacatggcaatgatgactcacttgcatgaaccagcagtgctctataacctgaaagagagatacgcagcttggatgatttatacatattcggggctgttttgtgttacagtcaatccatataaatggctgcctgtttataacccagaagtggtcactgcataccgtgggaaaaagaggcaggaggcgcctccccatatttttagcatctcagataatgcctaccagtttatgctgacagacagagagaaccagagcatcctcattacaggggaatctggcgctgggaaaacggttaacaccaagcgggtgatacagtatttcgcgaccatcgccgttaccggcgaaaagaagaaagaggagccagcgtccggaaagatgcaggggacactcgaggaccaaattatcagcgccaaccctttattagaggctttcggtaacgccaaaacagtgcggaacgataatagtagcaggttcggcaaatttattagaatccactttggggctaccggaaaactcgcctccgcggacatagaaacatatctcctagagaaaagtagagtgacgttccagctgaaggcagaaaggtcataccatatcttttaccagatccttagcaacaaaaagcctgagctcattgaaatgctgctgatcacaaccaatccctacgacttcgcctttgtgtctcagggagaaattactgtgccatctatcgatgatcaagaggagctgatggctacggactctgctgtggacatacttgggttcaccgccgatgagaaggtggcaatttacaagcttacaggggcagtaatgcattatggtaacatgaaattcaagcagaagcagcgggaggaacaggcggagcccgatggaacagaggtggccgacaaagctgcatacctcacctccctaaacagtgctgatcttctgaaaagcctttgctaccctagagttaaggtcggaaacgagtttgtcaccaaagggcagacagtccaacaggtgtacaacgctgtaggagccctggctaaagcaatttacgagaaaatgttcctgtggatggtgacccgaatcaaccaacagctggacacgaaacagcctcgtcagtatttcatcggagtgctcgacatcgcaggcttcgagatcttcgacttcaatagtctcgagcagctgtgtatcaactttaccaacgagaaactgcagcagttctttaatcaccacatgttcgtgctggagcaggaggaatacaagaaggaaggtatagagtgggagttcatcgattttggaatggatctcgcagcatgtattgaactgatcgaaaagcccatgggtatcttctccattctggaggaggagtgtatgtttccaaaagctaccgatacatctttcaaaaacaaactgtacgaacagcatctgggtaagtcaaacaattttcaaaagcctaagccagcgaaagggaagccagaagcccacttctcgctggtccattacgccggtacggttgactacaacattgccggatggctcgacaagaataaggaccctctaaacgagactgtggtggggttgtatcagaaatccgctatgaagacccttgccttcctgtttagtggcgcacagacagccgaagcggaagggggtgggggaaagaaggggggaaagaaaaagggcagctctttccaaactgtcagtgctctgtttcgggaaaacctgaacaagctgatgaccaatttgcgctcaactcatccccactttgtaagatgcataataccaaatgaaaccaagactccaggggctatggagcatgagctggtcctgcaccagctgcgatgtaacggggtgcttgaaggcatacgaatctgcagaaaaggcttcccaagccgcatcctctatgcagatttcaagcaaagatacaaagtactgaatgcctcggcaatcccagaaggtcaattcatcgacagcaaaaaggccagcgagaagctcttagggtctatcgaaatcgatcatacccagtataaatttggccacacaaaagtgttcttcaaggcaggtctgctggggaccctcgaggaaatgcgcgacgaaaagctggcccaactcatcaccagaacgcaggccatctgtcggggtttcttaatgagggtggaatttcgcaagatgatggaacgccgtgagagcatcttctgtatccagtataacatacgagcctttatgaacgtaaagcactggccttggatgaagctgtatttcaagattaaacccctcctgaaaagcgccgagactgagaaagaaatggcgaacatgaaggaggagttcgagaaaacaaaagaggaactggcaaaaacagaagccaaaaggaaggagcttgaggagaaaatggttacccttatgcaggagaagaacgatctgcagctgcaggtacaggccgaggctgacgcactggctgatgccgaagagcgatgtgaccagctgatcaaaacaaagattcagctcgaagcaaagataaaagaggtgaccgagcgcgctgaggatgaagaagagattaatgcggaacttacagcaaaaaaaagaaagctcgaggacgaatgttctgaactcaaaaaggatatcgatgacctcgagttgacgttagcgaaggtcgaaaaggagaagcatgctactgagaacaaggttaagaatctgacagaggagatggcaggactcgacgagacaatagccaaacttaccaaggagaaaaaggctctccaagaagcccaccagcagacgctcgacgacctgcagatggaagaagataaggttaatactcttacgaaggctaagacaaagctcgaacaacaagtggacgacttggagggctcactggagcaggaaaagaaactgtgtatggaccttgagagagctaagaggaagctggaaggagatttgaagctggcccaggagtccacgatggatacggagaatgacaagcagcagctcaacgaaaaactcaagaagaaggagttcgagatgagcaatctccagggcaaaatcgaggacgaacaggcgttggccatccaacttcagaaaaaaatcaaagaactgcaggcccgtattgaagagctggaggaagaaatcgaggcagaacgagcatcacgagcaaaggccgagaaacagaggagcgacctaagcagagagctcgaggaaatttctgagcgacttgaggaagcaggaggcgcaacttccgctcagattgaaatgaacaaaaagcgagaagcagaatttcagaaaatgagaagagacttggaggaatctaccctgcaacacgaggccactgcggcagctctcaggaaaaagcatgcggacagtgtggccgagttaggcgaacaaatcgactcactgcagagggtgaagcagaagctcgagaaagaaaagtctgaattgaaaatggagataaatgacctggcctcgaacatggaaactgtgtcaaaagccaaggcaaacttcgagaagatgtgtcgtacgcttgaggatcagctaagcgaaattaaaaccaaggaagaggaacagcagcggctgatcaacgagttgtccgcgcaaaaggccagactccacaccgagtccggcgaattttcaagacagctggatgaaaaggatgctatggtgtcccagttgtctaggggaaaacaggcgtttacacagcagattgaggagcttaaacgtcagctggaggaggaaaccaaggcaaaatcgaccttggcacacgccctgcagtccgccagacatgactgcgatttgctcagagagcaatacgaggaggagcaggaggccaaagcagaactccaaagggggatgtcaaaggccaattcagaagttgcacaatggcgaacgaagtatgagacagatgcaattcagcggaccgaggaactggaggaggcaaaaaaaaagctggcccagcgtttacaagatgccgaggagcatgtggaggccgtcaatagcaaatgcgcttcattagaaaaaacaaaacaaaggttgcagaacgaggtggaggacctgatgatcgacgtcgagagatcgaatgcagcttgcatcgctctggacaagaaacagaggaattttgacaaggtgctggcagaatggaagcaaaagtacgaggagacgcaggctgaacttgaagcctcgcagaaggagtctcgtagcctgagcaccgaactctttaaagtgaaaaacgcctacgaggagtctctcgatcacttggagaccctcaaaagagagaataaaaatctgcagcaggagatttcagacctcaccgagcagattgccgaggggggtaagcatatccacgagttagaaaaagttaagaaacagctagatcatgagaagagcgaactgcagacgtcactggaggaagcagaggcgtccctggagcacgaggagggcaaaattctgcgaatccagttagaactcaaccaggttaaatctgaaattgacagaaagattgccgagaaagatgaagagcttgaccaactcaagaggaaccacttaagggttgtggaatcaatgcagtccactctcgacgctgagattaggtccagaaacgatgccctgaggatcaaaaaaaaaatggagggtgatttgaacgagatggaaattcagctcaatcacgccaacagacaggccgctgaggcattgagaaacctgagaaacacccagggtattcttaaggatacccagctccacttggacgatgccatccggggtcaagatgatttaaaagagcaactggctatggtggagcggagagcaaacctcatgcaggcggaggtggaggaattgcgagcatctttggaaagaactgagcgtggccgaaaaatggccgagcaagagctcctcgacgccagtgaacgagttcagttactacatacacagaatacctccctgattaatacgaagaagaaactcgaaaccgacatatcgcaaatccaaggagaaatggaggacattgtgcaggaggccaggaatgccgaagaaaaggcaaagaaggcgattacagacgctgcaatgatggcggaggagctgaagaaggagcaggatacctctgctcatctggaacgtatgaagaagaacatggagcagacagtgaaagatctgcagcttcggttggacgaagcagaacagctagccttgaaaggcggaaagaaacagatccaaaagcttgaggctcgcgtccgggaactggagtcagaggtggagtcagagcagaagcacaatgtcgaggctgtcaaaggcctgcgcaagcatgagaggcgggtaaaggagctgacttaccagacagaggaagatcgtaagaatatcttaagactccaggacctcgttgacaagttacaaacgaaagtgaaggcgtataagcgccaggcagaggaagctgaagaacagagcaacgtgaatttagccaaatttcggaaactccagcatgagctggaggaggccaaggaacgtgccgacatcgccgaaagtcaggtaaataagcttagagtcaaatctagagaggtacataccaaagttatttcagaggaatac

SEQ ID NO: 231709 - DNA, 5819 bp, synthetic construct
  misc_feature 1..5819: note = Description of Artificial Sequence: Synthetic coding sequence
  source 1..5819: mol_type = other DNA
atgacggatgctcagatggcagatttcggggcagccgcacagtatttgaggaagtccgagaaagagcgtctcgaggcacagacccgtccgtttgacatcaggaccgagtgctttgtccctgacgacaaggaagaattcgtcaaagcaaagattctgagtagagagggaggaaaggtgatcgctgagactgagaatggtaagaccgtgacggtaaaggaggaccaagtcctccagcagaatccacccaagtttgacaagattgaggatatggcaatgttaacattcttgcatgagccagccgtacttttcaatctcaaggagaggtacgctgcatggatgatatacacttacagcggccttttctgcgtcaccgtcaatccttataagtggctgccagtgtataacgccgaggtggtggccgcttacagagggaagaaacgttcggaggcccctccacacatcttctctattagcgataacgcttatcagtacatgctgacagaccgggaaaaccagtctattttaatcactggagagtctggcgcaggcaagaccgtgaatacaaagcgcgtgatacagtacttcgcatcaatcgctgctattggagaccgaggtaagaaggataacgcaaatgcaaacaaaggtaccctagaggatcagataatccaagccaaccctgcactggaggctttcgggaatgctaaaaccgtgcggaacgacaactctagtcgatttggtaagtttatcagaatacactttggagccaccgggaagctggcatcagctgatatcgaaacgtatctgcttgaaaagtcgagagtaattttccagttgaaggcggagcgaaattaccacatattttaccagattctctctaacaaaaagcccgagttactcgatatgttgttagtcactaataacccctatgattacgcctttgtcagccagggcgaggtgagcgttgcatctattgatgattctgaagagttgatggccactgactcggctttcgacgtgctcggcttcacctccgaagagaaggctggagtgtataagctcacaggcgctatcatgcactacggcaacatgaaatttaaacagaagcagagggaggagcaagctgaacccgacggcaccgaggacgccgataaatcggcctatctcatgggtctgaacagcgccgacctgctaaagggcctctgtcatccaagagtgaaggtgggtaacgagtacgtcacaaagggtcagagcgtgcagcaggtatactattccattggcgcactcgcaaaggccgtgtacgagaaaatgtttaactggatggtaacacggatcaacgctaccctggaaactaagcaacccaggcagtattttattggcgtcctggacattgcagggttcgagattttcgacttcaatagttttgaacagttatgtatcaattttaccaatgaaaagctccagcagtttttcaaccaccacatgttcgtcctggagcaggaggaatataaaaaggaaggtatagagtggacctttattgattttggaatggatctccaggcgtgcattgacctcatcgagaagcctatgggaatcatgagcatcctggaagaagaatgtatgttccccaaagccaccgatatgacattcaaagccaagctctacgataaccacctgggaaagtcaaataactttcaaaagcccaggaatatcaaaggtaagcaggaggctcacttttcgctcattcattacgcaggtaccgtcgactataacatcctgggctggctcgagaagaataaagaccctctgaatgagaccgtggtcgccctttaccagaagtcaagcttgaaattgatggccacactgttctcttcgtacgctaccgcagataccggtgactccgggaagtcaaagggcggaaagaagaaaggatcatcgtttcagaccgtgtcggcacttcatcgtgaaaatctcaacaaactcatgaccaacctgcgcacgacgcacccccactttgtgaggtgcatcatacccaatgaacgcaaggcacccggagtgatggacaacccactagtgatgcatcaactccgatgcaatggcgtgctggagggtatccgcatttgtaggaaaggctttcctaaccggattctgtacggcgactttaggcagaggtaccgaattttgaatcctgtggccatacctgagggccaatttatagacagtcgaaaaggtactgagaagttactttcttcactggacattgatcacaatcagtataaatttgggcatactaaagtgttcttcaaggccggactcttgggtttgctcgaagaaatgcgcgatgagcgcctctcacgcattattactaggatgcaggcacaggcaagagggcagctgatgcggattgaatttaagaagattgtcgaacgccgtgacgcgttactcgtcatccaatggaacataagagcctttatgggagttaaaaattggccgtggatgaaactctacttcaaaataaaacctctcctaaaaagcgccgagactgagaaggaaatggccaccatgaaagaagaattcggtcgaatcaaagaaactcttgaaaagtccgaggcacggaggaaggagctggaggaaaaaatggtgagtctactgcaagaaaagaatgatcttcagctgcaggtacaggctgaacaggataacctgaatgatgccgaggagcgctgcgaccagttgatcaaaaataagattcaattggaagccaaagtcaaagagatgaacgagagactagaggatgaggaggagatgaacgcggagctcaccgccaaaaagaggaagctcgaagatgaatgtagcgaactgaagaaggatatcgacgacttagaactaaccctggcaaaggtggaaaaagaaaagcatgctactgaaaacaaggtaaagaacctgacagaagaaatggctggcctagacgagattatagccaagctgactaaagaaaaaaaggcccttcaggaggcccaccaacaggcgttagatgatctccaggtggaggaggataaggtgaattctctgtccaagtcaaaggtgaagttggagcagcaagtggatgacctggaagggtctctcgagcaagagaagaaggtccgaatggatcttgaacgcgctaaacgaaaactagaaggagaccttaaattgactcaggagagtattatggatttggaaaacgacaaattacagcttgaagagaagctgaaaaagaaagagttcgacatcaatcaacagaactccaaaatcgaggacgagcaggtcctggctctccaactgcagaagaagttgaaagaaaatcaggccagaatcgaggaattggaggaagagttggaggccgagaggaccgccagagcaaaggtggaaaagctgcgctccgatctttctcgcgagctcgaggaaatcagtgaaaggctcgaagaggccggtggagccaccagcgtgcagatcgagatgaataaaaagagagaggccgagtttcagaagatgcgcagagacctcgaggaggcgacattgcagcacgaggcaactgccgcagctctccgcaaaaagcacgctgatagcgtggcggagttgggggaacaaatcgataacctccagcgagttaagcaaaagttagagaaagaaaagagcgaatttaagctggaattggatgatgtcacgagcaacatggaacaaatcatcaaggcaaaggccaatttagagaaggttagccggaccctcgaggaccaggcaaacgagtatagggtcaagttagaggaagcccagaggtccctcaacgacttcaccacacagcgggctaagcttcagaccgagaatggagagttggcgagacagctcgaagagaaggaggcactgattagtcaattgacccggggaaaactaagctacacccagcaaatggaggatttgaagcgtcaactggaagaagaaggtaaagctaagaacgcactagctcacgcccttcagagcgcacgccacgattgcgacttgcttcgggagcagtatgaagaggaaaccgaggctaaagccgaactgcagcgcgttttgagcaaagcaaacagtgaggtagctcagtggaggaccaagtatgagaccgatgctattcaaagaaccgaagagctggaggaagcaaagaaaaagctcgcacaacgcctgcaggatgcagaggaagctgtcgaagccgtgaatgctaagtgttcctcattagagaagaccaaacaccggctgcagaacgagatagaggatttgatggtggatgtagagaggagcaacgctgcggctgccgctcttgacaaaaaacagcgaaactttgataagatcctggccgaatggaaacaaaagtacgaggaatctcaatcagagctggaaagttcccagaaggaggccagaagtctcagcactgaattatttaagcttaagaacgcatacgaagagtccctcgagcacctggagacatttaaacgcgagaacaagaatcttcaggaggagatctccgacctgacagaacagctcggtgagggaggaaaaaacgtacatgaactggagaaagtgaggaaacagctcgaggttgagaagctcgaactccagagcgccctagaggaggccgaagccagcttagagcacgaggaggggaagatacttcgcgctcagctggagtttaatcagatcaaggcagaaattgagagaaaacttgcggagaaagacgaggaaatggagcaggccaagcggaatcatcagagggtcgtggactccctgcaaacatctctggatgcggaaacacgaagtcggaatgaagtgttgagagtcaaaaagaagatggagggggatctgaatgaaatggaaattcagctctcccatgccaatcggatggctgcggaggctcagaaacaagtgaaatccttacagtctttgctgaaagatacacagatacagctggacgacgctgtccgagcaaacgacgatttaaaagaaaacatcgcgattgtggaaaggagaaataacctcctgcaagcagaattagaggagctgagagcagtggtggagcagacagagcggagccgcaaattagccgaacaagaattgatcgaaacatcggaacgtgtgcaactgctgcactcacagaatacctcccttattaaccagaagaaaaagatggagagtgatcttacgcagttgcaatcagaggttgaagaggctgtacaagagtgcaggaacgccgaggaaaaggctaagaaagcaatcaccgatgcagccatgatggccgaagagttgaagaaggaacaggacacaagcgcacacctcgagagaatgaaaaagaatatggaacagacaatcaaagacctgcaacacagacttgacgaggctgagcaaatcgccctcaaggggggaaagaaacagctgcagaaactggaagcgagagtccgtgaattagaaggggaactggaggccgagcaaaagcgcaatgccgaatccgtgaaaggcatgcggaagtccgagcgacgcatcaaggaactgacttaccaaacagaggaggataaaaaaaatctgcttcggctgcaggatttggtcgacaagctgcagctcaaagtgaaggcctataagcgccaggccgaagaggcagaagaacaagcaaacacgaacctgtcgaaattccggaaagtgcagcacgagctggacgaggctgaagagagagcagatatcgccgaatctcaagtgaacaagttgcgagcgaagtcccgggatattggggctaagcagaaaatgcacgacgaagaata

SEQ ID NO: 231710 - DNA, 5819 bp, synthetic construct
  misc_feature 1..5819: note = Description of Artificial Sequence: Synthetic coding sequence
  source 1..5819: mol_type = other DNA
atgaccgatgcccaaatggctgactttggtgctgctgcgcaatatctgcgtaagtccgagaaagaacggctggaggcccaaacccgcccatttgatatccgcaccgagtgttttgttcctgatgacaaagaggaatttgtgaaggctaagatactgtcacgagaaggaggaaaagtaatcgcagagaccgaaaatggcaaaacagtgactgtgaaggaagaccaggtgctgcagcagaatccccctaagtttgataaaattgaggacatggctatgctgaccttccttcatgagcccgctgtgttgttcaaccttaaggaaaggtacgccgcttggatgatatacacgtatagtggcctgttctgcgttactgtaaacccctacaagtggctccccgtctataatgccgaggttgtcgccgcttatcgcggaaagaagagatctgaggcgccaccacatattttctccatcagcgacaacgcctatcagtacatgctgacagatcgcgagaaccagagcatactgatcacaggcgaaagcggcgcaggtaagaccgtcaacactaaacgcgtcatccagtacttcgcgtctattgccgctattggagacaggggcaaaaaggataacgctaatgccaacaaaggaaccttggaagatcaaataattcaggccaaccctgctcttgaagctttcggcaatgcaaaaaccgtccgtaacgacaactcttccagattcggcaaatttatcagaatacactttggcgctacaggaaaattagcctctgctgatattgagacgtacctgttggagaaatctcgcgtgatattccagctgaaggcagagaggaattaccatatcttttaccaaattctgagcaacaagaagcccgaattgctggacatgctcctggtcacaaacaacccctacgactatgctttcgtttcccagggtgaggtatcagtagcgagcatcgacgacagcgaggaattgatggccaccgatagcgcgttcgacgtgcttggatttactagcgaggaaaaggcaggcgtgtataaattaacaggcgctatcatgcactatggcaatatgaaatttaagcagaagcaaagagaggagcaggccgaaccggacggcaccgaggacgccgataagtctgcctacctgatgggcctcaatagcgctgacctgttgaagggtctttgtcacccccgtgtgaaagtgggtaacgaatacgtcactaagggccagagtgtccagcaagtgtattacagcatcggcgctcttgcaaaggccgtttacgagaagatgtttaactggatggtaacccgcattaacgccaccctcgaaacaaagcaaccacgccaatacttcatcggcgtgctcgacatcgcgggattcgagatctttgatttcaattcctttgaacagctatgcatcaacttcaccaacgagaaactgcagcagttctttaaccatcatatgtttgttctggagcaggaagaatacaaaaaagagggaatcgagtggacctttatcgactttgggatggatctgcaggcgtgcatcgacctgattgagaagcccatgggcattatgagcattttagaggaggagtgtatgttccccaaggctactgatatgaccttcaaagctaagctgtacgataaccaccttggcaaaagcaacaactttcagaagcccaggaatattaaggggaaacaggaggcacatttctctctgattcactatgccggtaccgttgattacaacatactggggtggctggagaaaaataaagatccattgaacgagaccgtcgttgcactctatcagaagagttccctgaaactgatggcgacactgtttagctcatatgcaactgcggacacgggagattcaggcaaaagcaaggggggaaagaagaaaggcagcagcttccagacagtgtcagctctccatcgggaaaacctcaacaaattgatgacaaacctcaggaccacccaccctcatttcgttcggtgcatcatcccaaatgaacgaaaagcacccggtgttatggacaatcccctggttatgcaccaactccgttgtaatggcgttctggagggcattagaatttgtcgcaaaggtttccctaatcgcattctctacggcgatttccgacagcgatataggattctgaatcctgtcgcaattccggagggacagttcattgactccaggaaaggtaccgaaaagttgctttcaagcctcgacatcgaccataatcagtacaagtttggccatacaaaagtgttcttcaaggccggactacttggactcttagaagagatgcgagacgagcgactaagccggattataactcggatgcaggcacaggccagggggcaattaatgaggatcgaattcaaaaagatcgtggagcgcagggatgcactgctggtaatccagtggaatataagggcatttatgggcgttaaaaattggccatggatgaaactgtatttcaagattaaacccttacttaaatccgccgaaacggagaaagaaatggctaccatgaaggaagaatttggtcggatcaaagaaaccttggaaaagtcagaggcacgacgtaaagaacttgaggagaagatggtgtccctcctccaagaaaagaacgatctgcagctgcaggtacaggccgaacaggacaatctgaacgatgctgaagaacgttgtgaccagctgatcaagaacaagattcagcttgaagccaaagttaaagagatgaacgagcgactggaagacgaagaagaaatgaacgctgagctaaccgccaagaagcggaagctcgaagatgaatgctcggagctgaaaaaagatatagacgacttagaactcactcttgcaaaggtggagaaagagaagcacgccaccgaaaacaaggtcaagaacctgactgaggagatggcagggctggacgagattattgccaagctgacaaaagaaaaaaaggccttgcaggaagctcatcagcaggctctggacgacctccaggtggaggaggataaggtgaactccttgtccaaatccaaagtaaagttggaacagcaggtggatgatttggaggggagcctcgaacaggaaaagaaagtccgcatggatctggaacgagccaagcgaaaactcgagggtgatctgaaactcacccaagagtcaatcatggatctcgagaatgacaagctccaactcgaggaaaagctgaaaaagaaagagtttgacatcaaccagcagaacagtaaaatagaggacgaacaggtcctggcactgcagttgcagaagaaattgaaggaaaatcaggctcgcattgaggagttagaagaggaactggaggccgagcggaccgcaagggctaaagtggaaaaattaagaagcgatctatccagagaactggaagagattagcgagagactcgaagaggccggaggcgcaacatcagtccagattgaaatgaacaaaaaaagagaagctgagttccagaagatgcgacgagatctggaggaagccacgctccagcacgaggctaccgcggctgccctgaggaaaaagcacgcggactcagtggcagaactgggcgagcaaattgataatctccagagggtgaagcagaagctggagaaggagaagtctgagttcaaactagagctagatgatgtcacaagcaacatggagcagattatcaaggccaaggcaaatctggagaaggtgagccggacgctggaggaccaagcaaacgagtacagagtgaagctggaggaagcccagagatccctgaatgatttcacgacgcaacgggcaaagctgcaaactgagaatggggaactggctaggcagctggaggaaaaggaggctctcatcagccagctgacacgcggaaaactgtcatacacccagcagatggaggacctcaagcgtcagctagaagaagagggcaaagccaagaacgcccttgcgcacgccttgcagtcagccagacatgattgtgatctgctcagagagcagtacgaggaggagaccgaagccaaggctgaactgcagcgtgtcctttccaaggcaaacagtgaggtggcccagtggaggacaaagtacgagaccgacgccatccagcgcacagaggaacttgaggaggcaaagaagaagctcgcccagagattacaggacgctgaagaggccgttgaagcggtgaatgccaaatgctccagcttggaaaagacaaaacatagactgcaaaatgaaatcgaagacctgatggtggatgtcgagaggtccaatgctgctgctgccgctttggacaagaagcagaggaactttgataagattctggctgagtggaagcagaaatatgaggaaagtcaaagtgagctggagagctcccagaaggaggctagaagcctgagcacggagctcttcaagctgaagaacgcatatgaagagtccctggaacatctggagacctttaagagagagaacaagaacctgcaggaagaaatctcagatctgactgaacaattgggtgaaggaggtaagaacgtccacgagctggaaaaggttaggaaacagttggaagttgaaaaattggagcttcagtctgccctcgaggaagctgaagcctccctggagcacgaggaaggtaagattctccgggcacaactcgaatttaaccagatcaaagccgaaatcgagaggaagttggcagagaaggatgaggagatggagcaggccaagcggaatcatcagagggttgtcgattcgctacagacctccctggatgccgaaactaggtcaagaaacgaggtactgcgggtgaagaaaaagatggagggggacctgaacgaaatggaaatccaactcagccatgctaatcgcatggcggcagaagcccagaagcaggtgaaaagcctgcaatcccttttgaaggacacacagattcaactggatgacgcagttcgggcaaatgatgacttgaaagagaacatcgctatcgtggagcggaggaacaatctgcttcaggccgagctggaggagctgagagcagtggtggagcaaactgagagaagtcggaaactcgctgagcaggagctcatcgaaacatcagagcgcgtgcagctgctgcacagccagaacaccagtctgattaatcagaagaaaaagatggagagtgatctcacacagttgcagagtgaagttgaggaagctgtacaagagtgccgtaacgcagaggagaaagcaaagaaagccatcactgatgcagcgatgatggctgaggagctgaaaaaagagcaggacacatccgcccatctcgaaagaatgaagaagaacatggagcaaactataaaggacctgcagcaccggcttgatgaagctgaacagattgcactgaaagggggtaagaaacagttgcagaagctagaagccagagtccgcgaactggagggagagttagaggctgagcagaagaggaatgcagagtctgtgaaagggatgcggaagagcgagagacgaatcaaagaacttacttatcagactgaagaggataagaaaaacctgttgcggcttcaggacctggtggacaaactccaactcaaggtgaaggcctataagcgccaggcagaagaggctgaggaacaggccaacactaatttgagcaaatttagaaaagttcagcacgagttggacgaggccgaggagcgggcagatatcgcggaaagccaggtgaataagctccgcgctaaaagcagagacattggtgccaagcaaaagatgcatgacgaagagta

SEQ ID NO: 231711 - DNA, 5807 bp, synthetic construct
  misc_feature 1..5807: note = Description of Artificial Sequence: Synthetic coding sequence
  source 1..5807: mol_type = other DNA
atgggtgactcggagatggccgtattcggggctgcagccccttacttgcgcaagtctgagaaggagaggctggaagctcaaacacggccttttgatttgaaaaaagacgtgttcgttcccgatgataagcaagagtttgtgaaagcgaaaatcgtgtcccgtgaggggggtaaagtgacagccgagactgagtatgggaaaaccgtgaccgtgaaagaggaccaggtcatgcaacagaatcccccaaagttcgataaaattgaggacatggctatgctgacttttctgcatgagccagcggtgttgtataacctcaaggaccggtacggcagctggatgatttatacttacagcggtctattttgtgtgacagtgaatccctataagtggttacctgtgtacacacccgaggtggtggctgcctacaggggtaaaaagcgcagcgaagccccaccacacatcttcagtatcagtgacaacgcatatcagtacatgcttacagaccgggaaaaccagtccatattgataacgggggaatccggtgccggaaaaactgtaaatactaagcgcgttattcaatactttgccgtgattgccgctattggcgacaggtccaagaaagatcagagccccggtaaaggtactctagaggaccagataatacaggccaatcccgctctcgaagcctttggtaacgctaaaaccgttcgcaacgataacagtagccggttcgggaagttcattcggattcactttggggctacagggaagttggcctcagctgacatagagacatatctgctggagaaaagtcgggtgatatttcagctgaaggccgaaagagattaccacatcttctaccagatcttatccaacaagaagcccgagctcctagatatgttgctgatcacaaacaatccctacgattatgcttttatctcacagggtgagactacagtggcatcaattgacgatgcagaggaactgatggcaactgacaatgcttttgatgtgctgggttttacatctgaagagaaaaatagcatgtacaaattgaccggagcgataatgcattttggtaatatgaagtttaagttaaaacagcgcgaagaacaagccgagccagatggcaccgaagaggctgataagtctgcctacctcatgggtctgaactcggcggatttgctcaaaggtttgtgccacccacgcgtgaaggtgggaaacgaatacgtgactaaaggtcagaatgtgcaacaggtgatctacgccactggggcacttgctaaggcagtatacgagaggatgttcaactggatggtgacccgcataaacgcaacattggaaaccaaacagccaagacagtactttatcggagtgttggacattgccggatttgagatcttcgatttcaattctttcgagcagctatgtattaacttcaccaacgagaaattacagcagttctttaaccatcatatgtttgtactggaacaggaagagtataaaaaggagggaattgagtggacattcatagatttcgggatggacctgcaagcttgcatcgacctgatcgagaaacccatgggcatcatgtccattctggaagaagaatgcatgttcccaaaagccactgatatgacctttaaagccaaactgttcgataatcacctggggaaatccgctaattttcagaagccgaggaacatcaaaggcaagcctgaagcacacttctcccttatccattatgcagggattgtggactataacatcatcggatggctccagaagaacaaggacccactgaacgaaaccgtggttggactttatcagaagagcagtctgaaactgttatcgaccctcttcgcaaattatgctggcgctgacgccccaatcgagaaaggaaagggaaaggccaaaaagggcagtagctttcagacggtgagtgcacttcatagagaaaacctgaataaattaatgacaaacctcagatctacccatccacacttcgtgcgctgtataatcccaaatgagacaaagagtcccggtgtcatggacaaccctctggttatgcatcagcttagatgtaacggcgtcttagaggggatccgaatttgtcgaaagggcttcccgaatcgcattctctacggcgacttcaggcagcgttatcgcattttaaatccagctgccattcctgaagggcagttcattgatagccgcaagggagcagaaaaactgctgtcctcactagatatcgatcataatcagtacaaattcggccacactaaagtgttttttaaagcaggattattgggcctcctggaagagatgcgcgacgaaagactgagccgcatcatcacaagaatacaggcccagagcaggggcgtgcttgcaagaatggaatacaagaaactcctggagagacgcgatagcctgctggtgattcagtggaacataagggccttcatgggtgtcaagaattggccatggatgaagctatactttaagattaagcctcttctcaaatctgctgagcgggagaaagagatggctagcatgaaggaggagtttaccaggctcaaagaggccctggagaagtccgaagctcgtaggaaggagcttgaggagaagatggtctccctcctgcaggagaagaatgatttacaattgcaggtgcaggctgaacaggacaatctggcagacgccgaggagcgttgcgaccagctcatcaagaataagatccaattggaggccaaggttaaagagatgaacgaacgattagaagatgaggaggaaatgaacgcagagcttaccgctaagaaaagaaagctggaggacgagtgtagcgaactgaaacgggacattgacgacttggaactgacactggcgaaagtcgagaaggagaaacacgccacagaaaataaagtgaagaatctcaccgaggagatggccggactcgacgagatcatcgctaagttaactaaagagaagaaggccctccaggaggctcaccagcaagcattggatgatctccaggcagaggaggacaaggtaaatactctgacaaaagcgaaggtcaaactggagcagcaagtggacgatttagagggctccttggagcaggagaaaaaggtgcgcatggatcttgaacgggcaaagcggaagttggagggtgacctcaagctgacccaggaaagcatcatggatctggaaaatgacaaacagcagctcgacgagcgcctgaagaagaaggacttcgagctcaacgccttaaacgcccgaatagaggacgaacaggccctgggatcccagctgcagaagaagctcaaagaactgcaagctcggattgaggagctggaggaggaactcgaagctgagagaacagcccgtgcaaaggtggaaaaactccgtagtgacctgagtagagagctggaggaaatctctgaacgcctcgaagaagcaggtggtgcaacctcggttcagatcgagatgaacaagaagcgcgaggcggagttccaaaagatgcgaagagatctcgaggaggccactctgcagcatgaagcaacggctgccgcactgcgtaagaaacatgccgacagcgtggcagaattgggagaacagattgataatttgcagcgggtgaagcagaaactagaaaaggagaaatcagaatttaaacttgaactggatgatgtcacaagcaatatggagcagatcattaaggcaaaagctaatcttgaaaagatgtgccggaccctggaagaccagatgaatgagcaccggagcaaagccgaagaaacacagcggagcgtcaacgacctaacgagccagcgggctaaacttcaaactgagaacggggaattgagccgacaattggacgaaaaagaggctctgatcagtcagctgacaagaggcaagctgacttacacgcagcagctggaggatctcaagaggcagcttgaggaggaggttaaagctaagaacgcattagcccatgccctccaaagtgccagacacgactgcgatctactaagagagcagtacgaggaggagacagaggcgaaagccgaactccaaagggttctgagtaaggcgaactcagaggtggcccagtggagaactaaatatgaaactgatgcgattcagcggaccgaggaacttgaggaagcaaagaaaaaactcgcacagcgactgcaggaggcggaagaggccgtagaagctgtgaacgccaaatgctcctctctggaaaaaactaaacacagattgcagaatgaaattgaggacttgatggtcgacgtggaaaggtccaatgccgcagccgctgccctcgataagaaacagcggaatttcgataaaattctggccgagtggaagcagaagtacgaagagagtcagtctgagctagaaagctcccaaaaggaagcacgatcgctatccaccgaactgttcaagctgaagaacgcttacgaagagagcctggaacatctggagaccttcaaacgcgagaataaaaatttacaggaggaaataagcgacctgactgagcagctgggaagctcaggtaagacgatccacgaactggagaaggtgcgtaagcagctggaagctgagaaaatggaattgcagtccgccctcgaggaagcagaggctagtctggagcacgaggaagggaagatactccgggctcaattggagttcaatcagatcaaggctgagatcgagcgtaagcttgctgaaaaggacgaggagatggaacaggccaaaaggaaccatctacgtgtggtggactccttacagaccagcctggacgcagaaactagatcacgcaatgaagcccttagagtcaagaaaaaaatggaaggggacttaaatgagatggaaatccagcttagccacgccaacagaatggcggcagaagcccagaagcaggttaaatctctccagagcctgttaaaggatactcagatccagctggacgatgcagtgagggctaacgatgacttgaaggagaacatcgcaatcgtggagaggcggaacaacctgctacaggcggagctggaggaactgcgcgctgttgtagaacagactgaacgcagtcgcaaactcgcggaacaggagttgatcgagactagcgaacgtgtgcagcttctccatagccagaacaccagcctgatcaatcagaagaagaagatggacgccgacctgtctcagctacagacagaagtcgaagaagcggtccaggaatgcagaaacgccgaagaaaaagcaaagaaggcgatcaccgacgcggcaatgatggctgaagagcttaaaaaggagcaggacacctcagcacacctggagcgcatgaagaaaaatatggagcagaccattaaggaccttcagcacaggttggacgaggcagagcagatcgctctgaaaggcggtaagaagcagctacagaaacttgaagctagagtcagggagctggaaaacgagctcgaagccgaacagaagcgcaacgcggagagcgtaaaaggtatgcgaaaaagcgagagaagaatcaaggagttgacttatcagacagaggaagatcggaagaatctgctccgcctccaagacctagttgacaaactgcagcttaaggtgaaggcctacaaaagacaggccgaagaagcagaggagcaggcaaatacaaatttgtccaagttccggaaggtacagcatgaattggacgaagccgaggagcgagcggatatcgccgagtcccaggtgaataaactgcgggcaaagtctcgggatattggcaccaaagggcttaatgaagaata

SEQ ID NO: 231712 - DNA, 5822 bp, synthetic construct
  misc_feature 1..5822: note = Description of Artificial Sequence: Synthetic coding sequence
  source 1..5822: mol_type = other DNA
atgggtgactctgaaatggcagtgtttggcgctgccgcaccgtatctgcggaagagtgaaaaagagcggttggaggcgcagaccaggccattcgacctcaaaaaggacgtctttgtgcctgatgacaagcaggagtttgttaaagccaagatcgtatctagggaaggaggtaaggtcaccgctgaaactgaatatggaaaaacggtgacagtcaaggaggaccaggtgatgcagcagaaccccccaaaatttgataagatcgaagacatggctatgctaacctttctgcacgaacccgctgtgctgtacaatttgaaagatagatatggatcatggatgatttacacctactccggacttttctgcgtaacagtgaacccatacaaatggcttccagtgtacactcccgaggtggtcgccgcatatcgagggaaaaagcggtctgaggcaccccctcatatcttttctattagcgacaatgcctaccagtacatgttaacagatagagaaaaccagtccatattgattacgggcgagtctggcgctggcaagacagtgaatactaaacgagtgatccaatattttgccgtcatcgctgccatcggagacagatccaagaaagaccagagtcccggaaagggcacattggaagatcagataattcaggcgaatcccgctctggaagcattcgggaatgcgaagacagtgcggaatgataacagttcacggttcggcaagtttattcgaattcactttggtgccactgggaaattagcctcggctgatatagagacttatctcctcgagaagagccgggtgatctttcaactgaaagctgagagggattatcacatcttttaccaaatcctttctaataaaaaacctgagcttttggatatgctccttatcaccaataacccttacgactatgcttttataagccagggagagaccaccgttgcctccatcgacgacgcagaggagctgatggccaccgacaatgcttttgatgtcctcgggttcaccagcgaagagaaaaacagtatgtataagttgactggcgcaattatgcatttcggcaacatgaaatttaagctgaaacagagagaggaacaggcagagccagatggaaccgaagaagctgataagtccgcatatctgatgggactcaatagcgccgatttgttaaaaggtctgtgccaccccagggtcaaggtcggtaacgaatacgtgaccaagggccagaatgtgcagcaggtcatttatgctacaggggcactcgcaaaagctgtgtacgagaggatgttcaactggatggttacccgaattaatgccacattggaaactaagcagccacgccagtacttcatcggcgtgcttgacatcgccggattcgagattttcgactttaattcatttgaacagctgtgcattaactttacaaatgagaagttacaacagttctttaatcaccacatgttcgtgcttgaacaggaggagtacaagaaagagggcattgaatggacatttatcgattttgggatggatctgcaggcttgtatagatctcatcgaaaaacctatgggcattatgtcaatccttgaggaagaatgtatgtttcccaaggccacagatatgacattcaaggctaagcttttcgataatcatctaggcaagagtgcaaattttcagaagcctcgaaacataaagggcaaacccgaggcccacttctccctgatccactatgctggaatcgtcgactataatataatcggatggctgcagaaaaataaagatcccttaaatgagactgtggtgggcttgtaccagaagagtagtctgaagcttctgtccaccctcttcgccaattacgctggggctgatgcgcctattgagaaaggaaaagggaaagccaaaaaaggaagctcttttcagactgtgtcggccctgcatagagagaatctgaataagttgatgactaatttacggagtacacacccccacttcgtgcggtgcattatccctaatgagaccaagtcacctggcgttatggataatcccctcgttatgcatcagctccggtgtaacggcgtgctcgaggggatcagaatctgccgaaaaggatttcctaataggattctctatggggatttccggcagagatacaggatcttgaatcccgctgccatccctgaggggcaattcattgacagccggaagggcgcagaaaaactgttaagcagtctggatatagatcataaccagtacaagttcgggcacactaaagtctttttcaaggctgggcttctcgggctactggaagagatgagagacgaaaggctgagcagaatcattacgcgaatacaggctcagtctagaggtgttttagccagaatggaatacaaaaaactgctcgagagacgcgattcactgctggtgatccaatggaatatccgtgcctttatgggagttaaaaattggccatggatgaaactctactttaagataaagccgctcctaaagtccgctgagagagaaaaggagatggcatctatgaaggaagaatttacccgactcaaagaggccctggagaaatcagaagccaggagaaaagagctggaggagaagatggtgagtctgctccaggagaaaaatgatttgcagcttcaggtacaggctgaacaggacaacctggcggatgccgaggagcgctgcgatcagctcataaagaataagatacaactggaagcgaaagtgaaagagatgaacgagcggctcgaggacgaggaagagatgaatgcggagctcacagccaaaaaacgcaagcttgaggatgagtgcagtgaattgaagcgggatatcgacgaccttgagctgacacttgccaaggtggagaaggagaaacatgccacagaaaataaagtcaaaaatcttactgaagaaatggcaggccttgatgaaatcatcgccaaactgactaaagagaagaaagctttacaagaggcccaccagcaggccctggacgatctacaggctgaggaagacaaagtgaacaccttgaccaaggccaaggtgaaactcgaacagcaggtagatgacttggaaggatctctcgagcaggagaaaaaagtcaggatggacttagaaagagcaaagcgcaaattggagggtgacttgaaactcacccaggagtctattatggacttggaaaatgacaagcaacagttggacgaacggctgaaaaaaaaagactttgaactcaatgccctcaacgcgcgtatcgaagacgagcaggctcttggttcacaactgcagaaaaagttgaaggaattacaagccagaatcgaggagttggaagaggagctcgaggccgagcggaccgcaagagcaaaggtagagaagctcagatctgacctctcccgcgagttggaggagatcagtgagagactggaagaagccggaggtgccacgagcgtgcagattgagatgaataagaagcgtgaagccgaattccaaaaaatgaggcgcgatctggaggaagccaccctgcagcatgaggcaactgccgcagctctgcgcaaaaaacacgctgattctgtggcagagcttggagagcagattgacaatctgcagagggtgaagcaaaagctggaaaaagagaaaagcgaattcaagctggaactagacgacgcactgctcgggctcccgagttccaattttttgttgcccccacccctgtctgctaacctcgagaaaatgtgtcgaacgttggaggatcaaatgaacgaacacaggtccaaggctgaggagacccagaggagtgtcaatgacctgacgagtcagcgggcaaagctgcagactgaaaatggcgaactgagtcgccagctggacgaaaaggaggcccttattagccagctaactcgcggtaagctgacatacacacagcaactcgaagatctgaagcgccagctggaggaggaagttaaagccaaaaacgctcttgcccatgccttacagagcgccagacacgactgtgatctccttagggaacagtacgaggaagaaaccgaagctaaggccgaactgcagcgggtgctgtcgaaggcaaatagcgaggtcgctcaatggaggactaaatacgagacggatgctatccaaagaacggaggaactggaagaagccaaaaaaaagctggcccagcgactgcaagaggcagaggaagccgtggaggccgtgaatgctaagtgcagctcgctggaaaagacaaagcatagactccagaacgagatcgaggacctgatggtggacgtagagaggagcaatgccgctgccgctgctctggataaaaaacagcgcaatttcgacaaaatcctcgctgagtggaagcagaaatacgaggagagtcagtccgaactggagtcgtcacagaaggaagcgcgatccctatcaaccgaattattcaagctgaagaacgcgtacgaggagtccttggaacacctggaaactttcaagcgtgagaataaaaatttacaggaggaaatctccgacctgacagaacagctggggagttcagggaaaactattcacgaactagagaaggtaagaaagcaactggaagcagagaagatggaattgcagtctgccttagaggaggccgaggcttctctggaacatgaggaaggcaagatcctccgcgctcagctggaatttaaccaaattaaggcagaaatcgagaggaagctggccgaaaaagacgaggagatggagcaagctaaacggaatcatctgagagttgtcgacagtctgcagacgagcctagatgcagaaacgcggtccaggaatgaggctcttcgggttaagaagaagatggagggggatctcaatgaaatggagatccagctgtcccacgccaacaggatggctgccgaggcccaaaagcaggtaaaaagtctccagtcccttcttaaggacactcaaatccagctagatgatgccgtccgcgctaatgacgacctcaaagaaaatatcgccatcgtggaaagaagaaacaatctccttcaggcagagttggaggaactgagagctgtggtggagcagaccgagagaagtaggaagctagctgaacaagaactgattgagacgagcgaacgagtgcagcttctgcactctcagaacacgtccttgattaaccagaaaaaaaagatggacgcagacctgtcccagctgcaaacggaagtggaagaggctgtgcaggagtgcagaaacgctgaagagaaggccaaaaaggccatcacagatgctgcgatgatggctgaggaacttaaaaaggagcaggacacgtctgcgcacctggaaagaatgaagaagaacatggaacagacgatcaaggaccttcagcatcggctggacgaggcagagcagatcgctttgaagggaggcaagaagcaactacagaaactggaggcccgagtcagggagttggagaacgaactggaggctgaacaaaaaaggaatgctgaaagcgtgaagggcatgaggaaatccgagagaaggataaaagaactgacttaccagactgaggaggatagaaaaaacctgctgaggctgcaggacctcgtggataagctgcagcttaaggtgaaagcttacaaaaggcaggccgaggaggcagaagagcaggcgaatactaacttatccaaatttcggaaggttcagcacgaattagatgaagccgaagaacgggcagacatcgccgagtcccaggtcaataagctgagggcaaaatcccgggatataggcacaaaaggtctgaatgaggagta

SEQ ID NO: 231713 - DNA, 5814 bp, synthetic construct
  misc_feature 1..5814: note = Description of Artificial Sequence: Synthetic coding sequence
  source 1..5814: mol_type = other DNA
atgtccgccagttctgacgccgagatggcagtcttcggggaggctgcaccctatctgcgcaagtccgagaaagagcggattgaagctcagaacaagccattcgacgccaagacctcggtcttcgttgccgaacccaaggagagctatgttaagtccacaatccagtcaaaagaagggggaaaggttacagtgaagacagaggggggtgccacactgacagtgagggaggatcaggtgttccccatgaatcctccaaagtacgacaagattgaagacatggcaatgatgactcacctgcacgagcccggagtcctttataacctgaaagagcgatacgccgcatggatgatttatacctacagtgggctgttctgtgttacagtgaatccctacaagtggctccccgtgtacaaacctgaggtggtagccgcatacagggggaagaaacggcaggaagcgcctcctcacattttctctatctctgataatgcttatcagtttatgctgacagacagggagaaccagtcaatcctgatcacaggagaatccggcgcaggcaagactgtcaatacaaagagagttattcagtactttgcgacaattgccgtaacgggcgagaaaaagaaggatgagagtggcaagatgcaaggcactttagaagaccagattatcagcgcaaatcccctgctcgaagcatttgggaacgcaaaaacagtccgcaatgacaattcctctcgcttcggcaagttcataagaattcatttcggaactacaggaaagctagcaagcgcagacattgaaacatacctgctagagaaatccagggtcacctttcagctgaaagccgagcgctcctaccacattttctaccagatcacatctaacaagaagcccgacctcattgagatgttactgattacaacaaacccctatgattacgcatttgtgtctcagggggagatcacagtaccatcgatcgacgatcaggaggagctcatggcaactgattccgccatagacatcttaggattcactcccgaggaaaaggtgtcaatatataagctgacaggggcagtgatgcactacggcaatatgaaatttaagcagaagcagagagaagagcaagcagagcccgacggaaccgaggttgctgataaggcagcctatttgcagtccctgaactcagccgacctgttgaaagctctgtgttatcccagggtaaaggtgggcaacgagtacgtcactaagggacagactgttcagcaggtgtacaacgccgtgggagccctggctaaggccgtttacgagaagatgtttctgtggatggtgaccagaatcaaccagcaactggacaccaagcagcctcgacagtattttatcggagttcttgatatagctggctttgaaatcttcgatttcaactctctagaacagttgtgcatcaacttcaccaacgagaaactacagcagttctttaaccaccacatgttcgtgttagagcaggaagagtacaaaaaggaaggcatcgaatggaccttcatcgactttggaatggacttggccgcttgcatcgaacttatcgagaagcccctgggcattttctcaatcttggaggaggagtgcatgtttccaaaagccaccgacacctccttcaagaataaactgtacgaccaacatctcggaaagagtgccaacttccaaaagcccaaggtcgtgaagggcaaagccgaggcccacttctccctgatccactacgccggtacagttgattacaatataaccggatggctggataaaaacaaggatcctctcaacgacaccgtcgtgggactatatcagaagagcgcgatgaagacgttggcatccctgttttcaacctacgcttcagccgaagccgattcgtccgccaagaagggcgcaaagaaaaaaggtagttcttttcagacggtctctgccctattcagggaaaatctcaacaaactgatgactaacttaagaagtactcacccgcacttcgtcaggtgcattatccctaatgaaaccaagacacctggcgctatggagcacgaactcgtactgcaccaactgaggtgcaatggtgtgctggagggcatccgaatttgcagaaagggattcccgtcccgcatcctgtatggcgactttaaacagaggtacaaagtgttaaacgccagtgccatcccagaaggacagttcattgattctaaaaaagcatcagaaaaactattggcgagcatcgacattgatcacacgcagtataagttcggccataccaaggtgttctttaaagcaggcctgttggggctgctggaagagatgcgggacgagaaactcgcgcaaatcattaccagaacccaggctgtgtgtaggggtttcctcatgagggtcgaataccagaagatgctgcagcgtcgagaggcactgttctgcattcagtacaacgtcagggcatttatgaacgtgaagcattggccttggatgaagctgtttttcaagataaaacccctgctcaagtcagctgagacagagaaagagatggccactatgaaagaagagttccagaagacaaaagacgaattagctaagtcggaagccaaacggaaggaattggaagagaagatggttactctcctgaaagaaaagaacgatttgcagctacaagtccagtccgaagctgattctctggctgatgccgaagaacgttgcgagcagctgattaaaaacaagatccagcttgaggccaaaataaaagaggttacagagcgagccgaggaggaggaagagatcaacgctgagctaaccgccaaaaagcggaaacttgaggacgaatgttcagaattgaagaaagacattgacgacctggaactgacactggccaaggtggagaaagagaagcacgctaccgagaataaagtaaagaatttaacagaagaaatggcagggctcgatgaaactatcgctaaactgtccaaggagaagaaggccttgcaggagacccatcagcagactttagatgacctgcaggctgaagaggacaaggtgaatattctaacaaaagctaaaaccaagctcgagcagcaagttgacgacttggagggcagccttgaacaagagaagaagctgcggatggatctcgaaagggccaagagaaagttggagggcgaccttaagctggcgcaggaaagcacgatggatatggaaaatgataagcagcagctggacgaaaagttggaaaaaaaggaattcgagatctcaaatctcatctcaaagatagaggatgagcaggccgtcgaaatacagctgcagaagaagataaaagagctccaagccaggatcgaagaactgggtgaggagatcgaagcagagagagcgtccagagccaaggcagagaagcagcggtcggacctctcgcgggagttggaggagatctccgagcgcttggaggaggctggcggtgccactagcgcccaggttgagttgaataagaaacgtgaggcggagtttcagaagctccgcagggacctggaagaggcaactctgcagcacgaggctatggtggctgccctgagaaaaaagcatgccgatagtatggctgaattgggtgagcaaattgataacctgcaaagagtcaaacagaagttggaaaaagaaaaaagcgagctgaagatggagactgatgacctgagttccaacgcggaggctattagcaaggctaagggtaacctcgagaaaatgtgccggtccttagaggatcaggtgtccgagctcaaaacaaaagaagaggagcagcagcgtctcatcaacgatctcacggcacagcgtgcccgactacagacagaggcgggtgaatattcgcgccagctggatgagaaggacgcgttagtttctcagctctctcgctctaagcaggctagtactcagcagatagaggaactgaaacatcagcttgaggaagaaactaaggctaagaacgccttagcccatgcgttgcagtcttccagacacgattgtgaccttctacgggagcagtacgaggaggaacaagaaggcaaggcagaactccagagagcgctgtcaaaggcaaattctgaagttgcacagtggcggactaagtatgaaacggacgccatccagagaactgaagagctggaggaggcaaaaaagaagctcgctcagcggctccaggaagcagaggagcacgttgaagccgtcaacgctaagtgcgcttccctggaaaagacaaaacagcggttgcagaatgaggttgaagatcttatgttggatgtggaacgatccaatgccgcatgcgccgctcttgataagaagcagcgcaatttcgataaggtattatctgaatggaagcagaaatacgaagagactcaggctgaactcgaagctagccagaaagagtccaggtccctgtcaactgagcttttcaaggttaaaaatgtgtacgaggagtctctagaccagctcgagaccctgcgcagagagaacaaaaacctccagcaggagatctctgacctgacggagcagattgcagaagggggtaagcagattcacgagttggaaaaaattaagaaacaggtcgaacaggagaaatgtgagatacaagctgcgctcgaggaggccgaagcctccttagaacacgaggagggtaagatcctgcgcatccagctggagctgaatcaggttaagagcgaggtcgaccggaaaatagcggagaaggatgaagaaatcgaccagcttaagcgcaatcacacacgcgtcgttgagaccatgcagtcgaccttggatgccgaaatccgtagccgcaacgatgccttgcgcgtaaagaaaaaaatggaaggagatcttaacgaaatggagatccaactgaatcatgctaatcgcctcgcagcagaatcactaaggaattatcggaatactcagggcatccttaaagaaactcagctgcatctcgatgatgccctgcggggtcaggaggatcttaaggagcagctcgccattgttgagcgccgagcaaatctgctgcaggctgaaatcgaggaactctgggcaacactggaacaaaccgagaggagtcgcaagattgccgaacaggagctgttggatgcatccgaaagggtgcaactgttacacactcaaaatacctccctcattaatacaaagaaaaaactggagaacgacgtgagccagctgcaatcagaggtggaggaggtgattcaggagtcacggaatgccgaggagaaagccaagaaggccattacggacgccgcaatgatggcagaagaactgaagaaggaacaggatacaagcgcgcatctggagaggatgaagaagaacctagaacagaccgtcaaggatctgcagcacagactggatgaggctgaacaactagcactgaagggtggtaagaagcaaattcagaaactcgaagctcgggttagggaactggagggtgaggtcgagaacgaacagaaacgcaacgcagaagctgtaaagggcctgcggaaacacgagcgacgtgttaaggagctgacgtatcagactgaggaggaccggaaaaacgtcctgagattgcaggatctggtggataaactgcaggccaaggtaaagagctataagagacaggccgaagaagctgaggagcaatcaaacgccaatttgtctaaatttaggaagcttcaacacgagcttgaagaagccgaggagcgggctgatattgctgagtctcaggtgaataagctccgggtgaagtcacgggaagtccacacaaagatcagtgccgagtag

SEQ ID NO: 231714 - DNA, 5813 bp, synthetic construct
  misc_feature 1..5813: note = Description of Artificial Sequence: Synthetic coding sequence
  source 1..5813: mol_type = other DNA
atgtctgcatcctctgacgctgagatggccgtcttcggtgaggcggctccatacttgcggaaaagcgagaaagagagaatcgaggctcagaataagcccttcgatgcgaaaacatccgtgtttgtcgccgagccgaaagaatcctatgtgaagtcaacaatccaatctaaggaagggggtaaagttacagttaaaactgaagggggagccacactgacggtcagggaagaccaagtcttccctatgaacccgccaaaatatgacaagatagaagatatggccatgatgactcacctgcatgaaccaggagtcctctataatctcaaagaacggtacgccgcttggatgatctatacttacagcgggttattctgcgtcacggtgaacccctacaagtggctcccggtgtacaaaccagaggtcgttgccgcttatcggggaaagaagaggcaggaggccccacctcacatcttttctatttcggacaatgcatatcaatttatgcttaccgatcgagagaaccaaagcatcttgattaccggggagagtggagctggtaagacagtaaataccaagagagtgattcagtattttgcaaccatcgcagtgacaggtgaaaagaaaaaggacgagtctggaaagatgcaggggacattggaggatcagatcatcagtgcaaatcctctgctcgaagcgttcggaaacgctaaaactgtgagaaacgataactcttccaggttcggcaaattcattcgtatacatttcggtaccacaggcaagctcgccagcgcagatattgagacttaccttttggaaaagagcagagtaactttccagttaaaggctgaacggtcctaccacattttctaccagattactagcaacaaaaagcccgatctcatagaaatgctgcttatcaccaccaacccctacgattacgcattcgtttctcagggtgaaatcacggtcccttctattgatgaccaggaagaattaatggcaaccgactccgcaatagatatcctcggattcacacccgaggaaaaggtgagcatctataaactcactggagccgttatgcactacgggaacatgaagtttaagcagaaacaaagggaggaacaagcagagcccgatgggacggaggtcgctgacaaagctgcatatttacagtccctcaacagtgccgacctgctgaaagccctatgttatcccagagttaaggtgggaaacgagtacgtgactaaaggccagacggttcagcaggtgtacaatgcagttggtgccctggctaaggctgtgtatgagaagatgtttctgtggatggtgacgcgtatcaaccaacagctggatactaaacagcccaggcagtacttcatcggcgttctggacatcgctggtttcgagatttttgacttcaattcactggagcagctctgtatcaatttcacgaatgaaaagctgcaacaatttttcaaccatcacatgttcgtactggaacaggaagaatataagaaggaggggattgagtggactttcatagactttggcatggacttggctgcctgtatcgaactgatcgagaaacccctcggcatcttctccattcttgaggaagagtgcatgttcccgaaagcgacagatacatcgtttaagaacaaattatatgatcagcatctcggcaaatccgcaaactttcagaaaccgaaagtcgtcaagggaaaggccgaagctcactttagcctgatccactacgcaggcacagtggactataacatcacaggctggcttgacaaaaataaggaccccctgaacgacaccgtggtgggcctgtatcagaaatcagccatgaagaccttggcctccctcttcagtacctatgcttctgctgaggccgactcttctgctaagaagggcgctaaaaaaaaggggtctagttttcagaccgtctccgccctttttcgggagaatctgaacaagctcatgaccaatctcaggtcgacgcacccacactttgtacgctgtatcataccaaatgagaccaagacacctggggcaatggagcatgaactggtgttgcatcaactgagatgcaatggggtcctagagggaatccgcatttgtagaaagggattcccatcaaggatcctttatggtgattttaaacagaggtataaggtcctgaacgcctctgcaattcccgagggacagtttatagacagtaagaaggcttctgaaaaactcctggcgtccatcgatattgaccacactcagtacaagtttggacacacaaaggtctttttcaaggcgggactgctgggcctcctggaagagatgcgcgatgagaaactcgcccagatcattactaggacgcaggccgtgtgccgaggctttcttatgcgcgtggagtatcaaaagatgctccagaggagggaggccctcttctgcatacagtacaacgtgagggccttcatgaatgttaagcactggccctggatgaaactgttttttaagatcaaaccactgctgaagtctgctgagactgagaaagagatggcaacgatgaaggaggagtttcagaaaacaaaagacgagctggccaaatctgaggcaaagcgaaaggaactggaggagaaaatggtgaccctgcttaaagagaagaatgacctgcaacttcaggtgcaatcagaggccgattctctagccgatgcagaggaaaggtgtgaacagctgattaaaaacaagatacaactggaggccaaaattaaagaggtgacagagagagctgaggaagaggaagagataaacgcagagctcaccgctaagaagagaaaattagaagatgaatgtagcgagcttaaaaaggacatagacgacctggaactgacactggccaaagtggagaaggagaaacacgccacagaaaacaaagtgaagaatctgactgaagagatggcagggctggatgagactatcgccaagctgagcaaagagaaaaaggctttgcaggagacccatcagcagaccctggatgatctgcaagcggaagaggacaaagttaacatactgaccaaggcaaagacgaaactggaacagcaggtggatgacctcgaaggtagcctggaacaggagaagaagctccgtatggatttggaaagagccaagcgcaagctggagggggatttgaaacttgcacaagaatcaaccatggacatggaaaacgataagcagcaactggatgaaaaactggaaaagaaagaattcgagattagtaatctgatatctaagatcgaggacgagcaagctgtggaaatccagttgcaaaagaaaattaaagagttgcaagcgaggatcgaggagctcggcgaggaaatagaggcggaacgggcttcccgcgctaaggctgagaagcagaggagtgatctgagccgggagctggaggagatctctgagcgcttggaagaagccggaggggctacttccgcacaggttgagctgaacaagaagagagaagccgagttccagaagctgagaagggacctagaagaggccaccctgcagcatgaagccatggttgctgctctacgtaagaagcatgctgattctatggcggagctcggcgaacagattgacaacctgcagcgggttaagcagaagctcgaaaaagagaagagcgagctcaagatggaaaccgatgacttaagttctaatgccgaagccatatctaaagcaaaaggcaatctcgagaaaatgtgtcgttctctagaggaccaggtgtccgagttaaagacgaaagaggaggagcagcagaggcttatcaacgacctcaccgcgcagagggccagactgcagaccgaagccggtgaatactcacgccagctggacgaaaaagatgctctggtgtcgcagctctcccgctcaaaacaggcttcgacccagcagatcgaagagttgaagcaccagctcgaggaggagaccaaggccaagaatgcgctggcccatgcacttcagtccagtcgccacgattgcgacctcctgcgggagcagtacgaagaggaacaagaaggcaaagcggaactgcaacgggcactttcgaaggcaaacagcgaggtcgcccaatggaggaccaaatacgagaccgacgccatccagcgcaccgaggaattggaggaagcaaagaagaagcttgcccagagattacaggaagccgaagaacacgtggaggccgtcaacgcaaagtgtgccagtctggagaaaacgaagcagcgtcttcaaaacgaggtggaagacctgatgcttgacgtcgaacgctctaacgccgcttgtgcagccctagataaaaagcagaggaactttgataaagttctgtcagagtggaagcagaagtacgaagagacccaggctgagctcgaagcgtcccagaaagaaagtcggagcctgagtaccgaactcttcaaggtaaagaatgtgtacgaggagtccctggatcagctggagacactgcgaagagagaacaaaaatctgcaacaggagatctcggacctgaccgaacagattgctgagggtggtaaacaaatccatgagctggaaaaaattaagaagcaagtagaacaagagaagtgcgagatccaagccgcactggaggaagccgaggccagtctcgaacacgaggagggaaagatcttgaggatacagcttgagctgaaccaagtaaagtccgaggtggaccgtaaaattgcggagaaggatgaagagatcgatcagctaaaaagaaatcatacccgcgttgtcgaaactatgcagtctactctcgacgctgaaatccgatctcgcaatgacgctcttagagttaaaaagaagatggagggcgacctaaatgagatggaaattcaactcaaccatgctaatcgtctggctgcagagtctcttaggaattataggaacacacaggggattttaaaagaaacgcagctgcatctcgacgatgccctgcggggacaggaagatctcaaggagcagctggccatagtggagaggcgggcaaatctcctgcaggctgaaatagaagagctgtgggctactctggagcagacagagaggtcaaggaagatagccgagcaggagctgttggatgcatctgagcgtgtgcaactgctccacacacagaatacctcactcatcaacacaaagaaaaagctggagaacgatgtgagccagctccagagcgaggttgaagaagttattcaggagtctcgtaatgcggaggagaaggctaaaaaggctatcactgacgctgcgatgatggctgaagaactgaagaaggaacaggatacaagcgcacacctggagcgcatgaaaaaaaacttagagcagacggtaaaggacctgcagcataggcttgatgaggcagaacagctcgctcttaagggcggtaagaaacagatacaaaaattggaggcaagggtgagagagctggagggcgaggtcgaaaacgaacagaagagaaacgctgaagccgttaaagggctacgcaaacacgagcgcagagttaaggagctgacttaccagacagaggaagatcgtaagaacgtgctacgattgcaggacctggtagataaactccaggcaaaggttaaaagctacaaacgccaggcggaggaagctgaggaacagtctaacgccaacctctccaagttccgtaaattgcaacacgaactggaggaggctgaggagcgtgccgatattgctgaatctcaggtcaacaagctgagagtgaagtctagggaagtgcatactaaaattagcgcagagta

SEQ ID NO: 231715 - DNA, 453 bp, synthetic construct
  misc_feature 1..453: note = Description of Artificial Sequence: Synthetic coding sequence
  source 1..453: mol_type = other DNA
atgagcttctcagctgatcaaatcgctgagttcaaagaagcctttctcctttttgaccgaacaggggattccaagatcactctgagtcaggtgggggacgtgctacgggcacttggaactaaccccacgaatgctgaggttagaaaagtcctaggtaacccctccaacgaggagctgaacgcgaaaaagatcgaatttgaacagtttctgccaatgatgcaggccatttctaacaacaaagatcaggccacatatgaagatttcgtggagggcctccgggtgttcgataaggaggggaacggaaccgtaatgggcgcagaactgcggcatgtgttagcaacactcggagagaaaatgaaggaagaggaggtcgaggccctcatggcagggcaagaggatagtaacggctgtattaattatgaggccttcgtgaaacacataatgagtatttag

SEQ ID NO: 231716 - DNA, 585 bp, synthetic construct
  misc_feature 1..585: note = Description of Artificial Sequence: Synthetic coding sequence
  source 1..585: mol_type = other DNA
atggctccaaagaaagacgtaaagaaacctgtggccgcagctgccgcagcaccagcaccggctcctgcaccggcaccggcacctgcgccagcgaaacccaaagaggagaaaattgatctaagtgcgattaaaatcgagttctccaaggaacagcaggatgagtttaaagaggctttcttgctattcgatagaactggtgactcaaagataactctatctcaggtgggggatgtacttcgcgcactgggaactaacccaaccaatgccgaagtgaggaaggtacttggaaaccctagcaatgaggagcttaatgccaagaagattgagttcgaacaattcctgccgatgatgcaagccatcagcaataataaagaccaggcaacatacgaagacttcgtcgagggacttcgggtattcgataaggaaggaaatgggacagttatgggcgcagagcttagacatgtgttggcaacactcggggaaaagatgaaagaggaggaggtggaagctctcatggccggtcaggaagattctaacggttgcatcaactacgaggctttcgtgaaacatattatgtctatctag

SEQ ID NO: 231717 - DNA, 519 bp, synthetic construct
  misc_feature 1..519: note = Description of Artificial Sequence: Synthetic coding sequence
  source 1..519: mol_type = other DNA
atgagcagtaaaaaagccaaaacaaaaactacaaaaaagcgaccacaaagggcaacttccaacgtgtttgcaatgttcgaccagtctcaaatccaggagtttaaggaagcatttaacatgatcgaccagaatcgagacgggttcattgacaaagaggacctgcatgatatgctagccagcctgggaaaaaaccccactgatgcatacctagatgcgatgatgaatgaggcaccaggtcccataaattttacaatgttcctgacaatgtttggagaaaagcttaacggaacagacccggaggacgtgatcagaaacgcttttgcctgctttgacgaggaggctaccggcacgatccaggaagactacttgagggaactgctgactaccatgggagaccgatttacagatgaggaagtggacgaattatatagagaagctcccattgacaaaaagggaaactttaattacatcgagtttacgcggatattgaaacacggagccaaagataaggacgactag

SEQ ID NO: 231718 - DNA, 519 bp, synthetic construct
  misc_feature 1..519: note = Description of Artificial Sequence: Synthetic coding sequence
  source 1..519: mol_type = other DNA
atgtcatccaagaaagccaaaactaagaccaccaaaaagaggcctcaaagggccacatccaatgtgtttgcaatgttcgaccagtctcagatccaggaatttaaagaggctttcaacatgattgatcagaatagggacggcttcattgacaaggaggatctccacgacatgctggcctccctcggcaaaaatcccactgacgcatacctagacgctatgatgaatgaagctcctggtcctattaattttaccatgttccttacaatgttcggagagaagctcaatggcactgaccctgaggacgttatacggaatgccttcgcttgttttgacgaagaggcaacgggtacaatccaggaagactacctgagagagctgctgacaactatgggggaccgctttactgatgaggaggtcgatgaactttaccgcgaggcaccaatagataaaaagggaaacttcaactatattgagtttacgcgcatcctgaagcacggggctaaagacaaagacgattag

SEQ ID NO: 231719 - DNA, 519 bp, synthetic construct
  misc_feature 1..519: note = Description of Artificial Sequence: Synthetic coding sequence
  source 1..519: mol_type = other DNA
atgtcctccaagaaagccaagactaagaccaccaagaaacggccacagagagcaacctccaatgtcttcgcgatgttcgatcagagtcagatccaggaatttaaagaggcctttaacatgattgaccagaacagggatggattcatcgacaaagaggacctgcatgatatgctcgctagcctcggcaagaatccaaccgacgcatatctggatgccatgatgaacgaagcccctggtcccattaatttcacaatgtttctcacaatgttcggcgaaaagttgaatggcacagatcctgaagacgtcataaggaacgcctttgcttgtttcgacgaagaggcgactggtaccatccaagaagactacctccgggagctcctgaccacaatgggcgataggttcaccgacgaggaggtggatgagctgtaccgtgaagctcccatagacaaaaagggaaattttaattacatagagtttaccaggattctgaaacacggcgcaaaagataaagacgattag

SEQ ID NO: 231720 - DNA, 519 bp, synthetic construct
  misc_feature 1..519: note = Description of Artificial Sequence: Synthetic coding sequence
  source 1..519: mol_type = other DNA
atgtcaagcaagaaggccaagacaaagacaacaaagaagcgcccacagagagccacgtcgaatgtcttcgcaatgttcgatcagtcccagatccaggaatttaaggaagctttcaacatgattgaccagaatagagatggattcattgacaaggaggatctccacgacatgctggcctcacttggcaagaaccccaccgatgcatacctggatgcaatgatgaatgaagctcccggtccgatcaactttaccatgttcctgaccatgttcggggaaaaactcaatggaacagatccggaggacgtcatccggaatgcattcgcctgctttgacgaagaagctacgggcaccatccaggaagattatctgagggaacttcttaccactatgggagacagatttaccgatgaagaggtagacgaactctaccgggaagcccctattgataagaaggggaacttcaattatatcgagtttacgcgcattctgaagcacggcgctaaagacaaggatgattag

SEQ ID NO: 231721 - DNA, 627 bp, synthetic construct
  misc_feature 1..627: note = Description of Artificial Sequence: Synthetic coding sequence
  source 1..627: mol_type = other DNA
atggctctcggccagaaactgttcataacaatgagcagaggcgcagggcgtctacagggcactctgtgggccctggtgttcctgggtatcctggtgggaatggtggttccatctcctgctggcaccagagcaaacaatacattactagacagcagaggatgggggacattattgtcccgatctcgggcagggctggcgggagaaattgccggagttaattgggagtccggctatctggtcggcattaaacggcaaagacgactttactgcaacgtggggattggtttccaccttcaggttctcccggatggtcgaattagcgggactcacgaggagaatccatacagcttgctcgaaatttctactgtcgaacggggagtggtgtccctgtttggagtgagaagcgccctgtttgtcgccatgaatagtaagggacgactctacgcaaccccctctttccaggaggagtgtaagttcagggagaccctgcttcctaacaactacaatgcctacgagtcagacctgtatcagggcacctatattgcacttagcaaatacggccgtgtgaaaagaggttctaaagtctctcccataatgaccgttacccactttctccctagaatctag

SEQ ID NO: 231722 - DNA, 588 bp, synthetic construct
  misc_feature 1..588: note = Description of Artificial Sequence: Synthetic coding sequence
  source 1..588: mol_type = other DNA
atggccccaaagaagcctgagcccaagaaggacgatgccaaggcagcccctaaggccgcacccgcacctgcccctcctcctgagcctgaacgtcctaaagaggtggagtttgacgcgagcaaaattaaaatcgaatttacacccgagcaaatcgaggagttcaaggaggccttcatgctcttcgatcgtactcctaaatgcgagatgaagatcacttacggtcagtgcggagacgtattacgggctctggggcaaaatccgacccaggccgaggtgctacgcgtgctcggaaaaccacgccaggaagagttgaatacgaagatgatggactttgagacatttctcccaatgctgcaacacatctccaaaaataaggacaccggcacttacgaggatttcgtggaaggcctaagggtgttcgacaaagaggggaatggcacggtgatgggcgctgagctgcgacacgtcctggcgacgctcggagaaagactgactgaagatgaagttgaaaaattaatggctggtcaagaggactccaatggctgtatcaactacgaggcgttcgtaaaacacataatgtccagctag

SEQ ID NO: 231723 - DNA, 588 bp, synthetic construct
  misc_feature 1..588: note = Description of Artificial Sequence: Synthetic coding sequence
  source 1..588: mol_type = other DNA
atggctcctaagaagcctgagcccaaaaaggacgatgccaaggccgctccgaaggccgctccggctcccgctccgcctcccgaacccgaacgccctaaagaggttgagtttgatgcctctaaaatcaaaatcgagtttacacccgagcaaatcgaagaatttaaagaagcatttatgctcttcgacagaacacccaagtgtgagatgaaaataacctacggacagtgcggtgacgtattgcgggcactcggacagaaccctacacaagccgaggttctgagggtcctgggaaagcctcgtcaggaggagcttaatacaaagatgatggattttgagaccttccttcccatgctccagcatatcagcaaaaacaaggatacaggaacgtatgaagatttcgttgagggtctgcgagtgttcgacaaggagggcaatggcactgtgatgggcgctgagttacgccacgtcctggccactctgggtgagcgcctgacagaggatgaggtagagaagctgatggccggacaggaagacagcaatggatgcatcaattacgaggctttcgttaaacatattatgtcctcctag

SEQ ID NO: 231724 - DNA, 141 bp, synthetic construct
  misc_feature 1..141: note = Description of Artificial Sequence: Synthetic coding sequence
  source 1..141: mol_type = other DNA
atggcacctaagaagccggaacctaaaaaggacgacgcaaaggctgcacccaaggcggctcctgctccagccccacctcctgagccggaacgccctaaggaggtcgagttcgatgctagtaagataaaaattgagttttag

SEQ ID NO: 231725 - DNA, 594 bp, synthetic construct
  misc_feature 1..594: note = Description of Artificial Sequence: Synthetic coding sequence
  source 1..594: mol_type = other DNA
atggccccaaagaaacctgagccaaaaaaagaggccgctaaaccagcacccgctcccgcaccagccccagcacccgcaccggcaccagcgcctgaagcaccgaaggagcctgcatttgaccctaagtccgttaagatcgatttcaccgctgatcagattgaagaattcaaagaggcatttagcctttttgatcggactcccactggggaaatgaaaataacttacggccagtgcggggacgttctcagggctctggggcagaaccctaccaacgccgaggtgctgcgtgtgctaggtaaacctaaacctgaagagatgaacgtaaagatgctcgactttgaaactttcctgccaatcttgcagcatatatctcgcaataaggaacaggggacctacgaggattttgtcgaggggttgcgggtctttgataaagagtctaatgggaccgttatgggtgcggagctgaggcacgtactcgctaccttaggcgaaaagatgactgaggccgaggttgagcagctcctagctggacaggaggatgccaacggttgcatcaattatgaggcattcgtcaaacacattatgtccggttag

SEQ ID NO: 231726 - DNA, 594 bp, synthetic construct
  misc_feature 1..594: note = Description of Artificial Sequence: Synthetic coding sequence
  source 1..594: mol_type = other DNA
atggcaccaaagaagccagaaccaaagaaagaggccgcaaagccggcacctgcccctgccccagcacccgcaccagcccctgcacccgctccggaagcgcctaaggaacctgcatttgaccccaagtcagtaaaaatagacttcactgccgaccagatcgaggagttcaaagaggccttttccctattcgaccgtacgcctacaggcgaaatgaagatcacctatgggcagtgcggggacgtgctcagagcgctcgggcagaaccctaccaatgcagaagtcctgcgcgtgttgggcaagccaaagcccgaggagatgaacgttaaaatgttagatttcgagaccttccttcctatccttcagcacatatcccgcaataaggaacagggcacttacgaagatttcgtggagggcctgcgcgtgtttgacaaggagtcaaatggcaccgtgatgggtgccgagctccgtcatgtcctcgccactcttggcgagaagatgactgaagcagaggtagagcagctcctggcaggccaagaagacgcaaacggatgcattaattatgaggcctttgtaaaacatatcatgagcggatag

SEQ ID NO: 231727 - DNA, 264 bp, synthetic construct
  misc_feature 1..264: note = Description of Artificial Sequence: Synthetic coding sequence
  source 1..264: mol_type = other DNA
cctgaagcaccaaaggagcccgctttcgatcccaagagcgtgaaagtgatcgggtgtccatgtcccaggtctcagtcccacggagcagtaatcgactttaccgctgatcagattgaggaattcaaggaggcttttatgggagcggaactccgccacgtcctcgcgacactcgtcattaagtccgctcctccccctaagcccacagccggagagaaaatgaccgaagcagaggtcgagcaactccttgccggacaggaggactag

SEQ ID NO: 231728 - DNA, 522 bp, synthetic construct
  misc_feature 1..522: note = Description of Artificial Sequence: Synthetic coding sequence
  source 1..522: mol_type = other DNA
atggccagccgcaagacaaagaagaaggagggcggagcgttacgcgctcagagagctagttctaatgtgttcagtaattttgagcaaactcagattcaagagttcaaagaagccttcacgctgatggaccagaatcgggatggctttatagataaggaagatctgaaagacacatacgccagcttggggaagacaaatgtgaaagatgatgaacttgacgccatgctcaaagaagcttcaggccctatcaacttcactatgtttctgaacctgttcggcgagaagctgtctgggaccgatgccgaggagacaatcctgaacgcattcaaaatgctggaccccgatggcaaggggaagatcaataaagaatacattaagagactgctcatgtcccaggccgataaaatgacagccgaggaggtcgaccagatgttccagtttgctagcatagacgtagccggtaacctggattataaagccttgtcctacgtaatcactcacggagaggagaaggaagaatag

SEQ ID NO: 231729 - DNA, 399 bp, synthetic construct
  misc_feature 1..399: note = Description of Artificial Sequence: Synthetic coding sequence
  source 1..399: mol_type = other DNA
atggaccagaatcgcgatgggtttattgacaaggaggatctgaaagacacatacgcttcactcgggaaaaccaacgtgaaagatgatgaactggatgcaatgctaaaggaagcctccgggcctattaacttcaccatgttcctgaatcttttcggggagaaactatctgggacagatgctgaggaaaccattctgaatgcgtttaagatgctggaccccgatgggaagggcaagatcaacaaggagtatatcaagcggctgttgatgtcccaggccgataaaatgacagctgaagaggtagaccaaatgtttcagttcgccagtattgacgtggcaggcaacctggactataaagctctgagttacgtgattacacacggggaggaaaaggaggaatag

SEQ ID NO: 231730 - DNA, 399 bp, synthetic construct
  misc_feature 1..399: note = Description of Artificial Sequence: Synthetic coding sequence
  source 1..399: mol_type = other DNA
atggaccagaatcgcgatggctttatcgataaggaggacctgaaagatacctacgcctccctcgggaagaccaacgtcaaggatgacgagcttgacgccatgttaaaggaggcctcaggaccgataaattttactatgttcctcaatctgtttggcgagaaactgtccggaaccgatgctgaggagaccatactgaatgctttcaagatgcttgacccagacggcaaaggaaaaattaataaggaatatattaaacggttactgatgagtcaagcagataagatgacagccgaagaggtcgatcagatgtttcaattcgcctcaatcgacgttgccggaaaccttgactataaggccctgtcatacgttatcacccatggagaagaaaaagaggaatag

SEQ ID NO: 231731 - DNA, 399 bp, synthetic construct
  misc_feature 1..399: note = Description of Artificial Sequence: Synthetic coding sequence
  source 1..399: mol_type = other DNA
atggaccagaatagagacgggttcatcgacaaagaagatctgaaagacacatatgcatccctcggcaagactaatgtcaaggatgacgagctggatgccatgctaaaagaggcaagcggacctattaattttacaatgtttcttaaccttttcggggagaaactttccggcacagatgcagaggagacaattctgaatgcgttcaaaatgttggatcctgacggaaaggggaagatcaataaggagtacattaagcgcctgctgatgagccaggcagataagatgactgccgaagaagtggatcaaatgttccagtttgccagtatagatgtcgccggtaacttggactacaaggccctttcctacgtgattacacacggcgaggaaaaggaagagtag

SEQ ID NO: 231732 - DNA, 456 bp, synthetic construct
  misc_feature 1..456: note = Description of Artificial Sequence: Synthetic coding sequence
  source 1..456: mol_type = other DNA
atgtgtgacttcacggaagatcaaactgctgagttcaaggaggcattccagctgttcgaccggaccggagacggaaaaattctctacagtcaatgtggggacgtcatgagagctctgggccagaatcctaccaatgccgaagtcctaaaggtgctggggaatccaaagagcgatgaaatgaatgtaaaagtgctcgattttgagcacttcctaccgatgttgcagaccgtggcgaaaaataaggaccaggggacctatgaggattatgtggaggggcttagggtgtttgacaaagaggggaacggcactgttatgggcgctgaaatccggcacgtgttggtcaccctgggggagaagatgacagaagaggaagtggagatgctcgtggccggacacgaagattccaacggctgtataaactacgaggaattagtccgaatggtgctgaacggctag

SEQ ID NO: 231733 - DNA, 456 bp, synthetic construct
  misc_feature 1..456: note = Description of Artificial Sequence: Synthetic coding sequence
  source 1..456: mol_type = other DNA
atgtgcgacttcaccgaagaccagaccgccgaattcaaagaggcattccagttattcgatagaactggagacggtaaaattttgtatagccagtgtggcgacgtcatgagagcactgggtcagaaccccactaatgctgaagtattgaaagtccttgggaatcctaaatccgacgagatgaacgtgaaagtcctggattttgagcacttcctaccaatgctgcagacagtagcgaagaataaggatcaaggtacatacgaggactacgtggaaggcctgcgggtcttcgataaagagggaaacggtaccgtcatgggggctgaaatcaggcacgttctcgttactttaggagagaagatgactgaagaggaggttgagatgctcgtcgccggacacgaagattctaacggatgcattaattatgaagcatttgtgcgccatatcctatcaggatag

SEQ ID NO: 231734 - DNA, 456 bp, synthetic construct
  misc_feature 1..456: note = Description of Artificial Sequence: Synthetic coding sequence
  source 1..456: mol_type = other DNA
atgtgtgattttaccgaagaccagacagcagagtttaaggaggcatttcagctgtttgataggacaggggacggaaaaatcctgtacagtcagtgcggcgatgtgatgagggccctcgggcagaaccctacgaatgccgaagtgctgaaggtgctcggcaatcctaaatcggacgaaatgaatgtaaaagtgctggactttgagcatttccttcccatgctccaaaccgttgcgaagaacaaagatcaaggcacatacgaggactacgttgagggcctccgtgtgtttgataaggagggcaacgggaccgtgatgggggctgagatcaggcatgttcttgtgaccctcggggagaaaatgaccgaagaagaagtggaaatgctcgtagctgggcatgaggatagcaacggctgtattaactatgaggccttcgttcgacatatcttgtctggctag

SEQ ID NO: 231735 - DNA, 1491 bp, synthetic construct
  misc_feature 1..1491: note = Description of Artificial Sequence: Synthetic coding sequence
  source 1..1491: mol_type = other DNA
atgtcctctatggaggagatacaggtagagctgcagtgtgccgacctttggaagcggttccacgacattggcaccgagatgataataactaaggccggaaggcgcatgtttcccgcaatgagggttaagattacaggcctggatccccaccaacagtattacattgcaatggacattgtccccgttgataacaagcgttataggtacgtataccactcaagcaagtggatggtagctggaaatgccgattctcctgtgcctcctagagtgtacatccacccagattcactggcatcaggggacacatggatgcggcaagtagtttcattcgataaactaaagctcaccaacaatgaactggacgaccaaggtcatataattttgcacagtatgcataagtaccaaccacgcgttcacgtgattaggaaggacttcagctctgacctgagtccgaccaagccagttcctgtgggcgacggcgtgaaaacctttaacttcccggagacagtgtttaccactgtcactgcctaccagaaccagcagattacacgcctcaagatcgaccgaaacccattcgccaaggggttccgcgattcaggacgcaatagaaccgggctggaggccatcatggagacatacgctttttggcggccacctgtgcgaacccttacttttgaagacttcacaacgatgcagaagcagcagggcggttctaccgggacaagtcccactacgtccagtactggcaccccgtctccaagcgctagctcccacctactgagcccaagctgctccccgccaacattccacctggccccaaatactttcaatgtcggatgtagggagtcgcaactgtgtaaccttaatttgtcagactaccccccttgtgcacgaagtaacatggccgcactccagagctatcccggactgtcagatagtggttacaatcggctgcagagcggcaccacgtcagccacccaaccatccgagaccttcatgccccagagaaccccctcgttgatttccgggatccccactcccccaagtcttccaggcaattcaaagatggaggcatacggcggacagctgggcagcttcccaacatctcagttccagtacgtgatgcaagctggcaacgccgcatcaagcagtagtagccctcatatgttcgggggttcccacatgcaacagagctcctacaatgcttttagcctgcataatccttataacctatacggctacaactttcccacttcgccacggctggctgccagtcctgagaagctgagtgccagccagtcaacccttttgtgttcctcgccctcaaatggggctttcggtgagaggcagtacctgccttccgggatggagcacagcatgcacatgatcagtccctctcccaacaatcagcaagcgacgaatacatgtgacggccgacagtacggcgcagtgcccggttccagcagtcagatgagcgttcacatggtgtag

SEQ ID NO: 231736 - DNA, 627 bp, synthetic construct
  misc_feature 1..627: note = Description of Artificial Sequence: Synthetic coding sequence
  source 1..627: mol_type = other DNA
atgccccctaagaaggacgtcccagtgaagaaacccgcaggtccctccattagcaagcccgcagccaagcccgcagccgctggggctccgcctgccaaaacaaaagccgaaccagctgtgccacaagcaccccagaagacccaagagccccctgtggacctctctaaggtggtgattgaatttaacaaagatcagttggaggaattcaaggaggcttttgagctttttgatagggtcggtgatggaaagattctgtatagccagtgcggtgatgttatgagggccttggggcaaaaccctacaaacgcggaagtcttgaaggtccttggtaatccgaaatctgacgaacttaaatctcgaagagttgacttcgaaacattcctgcccatgcttcaggctgtggccaaaaatagaggacaaggaacgtacgaggactacctggaaggctttcgggtctttgacaaggaagggaatgggaaggtcatgggagctgaactgcgacatgttctgacgaccttaggggagaaaatgacagaagaggaggtggaaactgtactggcaggtcatgaggattccaacggttgcataaactacgaagcttttttgaaacacatcctctcggtctag

SEQ ID NO: 231737 - DNA, 90 bp, synthetic construct
  misc_feature 1..90: note = Description of Artificial Sequence: Synthetic coding sequence
  source 1..90: mol_type = other DNA
atgcccccaaaaaaggacgtaccagtgaagaagcctgccggtccatccatttccaaaccagccgcaaaacccgcagccgctggcgcttag

SEQ ID NO: 231738 - DNA, 627 bp, synthetic construct
  misc_feature 1..627: note = Description of Artificial Sequence: Synthetic coding sequence
  source 1..627: mol_type = other DNA
atgccacctaagaaagatgtgccggtgaagaagcccgctggaccctccatatcaaaaccggcagcaaaacccgcagccgcaggcgctcctccagctaagaccaaggccgaacctgcagtgcctcaggccccacagaagacccaggagccccctgtggatctaagtaaggtagtaattgagttcaataaggatcagttagaggagttcaaagaagcttttgaactgttcgatagagttggcgacggtaagatcctttattcgcaatgcggcgacgtgatgcgtgccctgggccagaatcccacaaacgctgaggtacttaaggtgctgggcaaccccaagagtgacgaactcaagagcagaagggtggatttcgaaacttttctacccatgctccaggcggtggccaaaaatagaggccaggggacttacgaagactatcttgaaggcttcagagtgtttgataaggaggggaacggcaaggtgatgggtgcagagttgcggcatgtcctcacaacgctaggcgagaaaatgaccgaagaggaggtggaaactgtgctcgcaggtcatgaagatagtaacggctgcataaattatgaagccttcctcaagcatattctgagtgtatag

SEQ ID NO: 231739 - DNA, 3477 bp, synthetic construct
  misc_feature 1..3477: note = Description of Artificial Sequence: Synthetic coding sequence
  source 1..3477: mol_type = other DNA
atggctgccgttcgaggggctcctcttttatcttgtttgctggctctgttagcgctgtgtcccggagggaggccccaaaccgttttgacagatgatgagattgaggagttcctagaaggcttcctgagtgagttagaacccgaacctcgtgaggatgatgtggaagctcctccacctcccgagcccaccccccgtgttaggaaggcacaggccggtgggaagccaggcaagcgcccagggactgctgctgaagttccgcctgagaagactaaggataaaggcaaaaaagggaagaaggacaaggggccaaaagttccgaaggaatcgctcgagggttcccccagacctcctaaaaaagggaaggagaagccaccaaaagctacaaagaaaccgaaagaaaaaccccctaaggccaccaaaaagccgaaggaaaagcccccaaaggcaactaagaaacctaaagaaaaaccacctaaggcgactaaaaagccacccagtgggaaacggccacctattctagcaccatctgaaacgctcgagtggccgttgccacctccaccaagtcctgggccagaggagctgcctcaggagggaggtgctcctttgagcaacaactggcagaatcctggcgaagagacccacgtggaggctcgcgaacatcaaccagagcctgaagaagaaacagagcagccaacacttgattacaacgaccaaatcgaacgtgaggactatgaggatttcgagtacattcgccgtcaaaagcagccgaggcctcctccatcgaggcggagaagacctgaaagagtttggcctgaacccccagaagaaaaggcgcctgcccctgcacctgaggagcgtatcgaaccacccgtcaagccactgttgcctcctctgccaccggactacggcgatgggtacgtgattcccaattatgatgatatggactattatttcgggcctcctcctcctcagaaaccagacgccgagagacaaacggatgaagagaaagaggaactcaagaagcctaagaaggaggactcgtctccaaaagaagagacggataagtgggcagttgaaaagggcaaggaccacaaagagcctcgcaagggggaagagctcgaagaagagtggacccccacagaaaaagttaagtgtcctcccatcggcatggagtctcaccgcatcgaggataatcagatcagagcctccagtatgcttcggcacggcctgggtgctcagcgcggacgcctgaatatgcagactggcgcaaccgaggacgattactatgacggagcttggtgcgcagaggatgatgctagaactcagtggatcgaagttgacacccggaggaccacgcgcttcaccggcgtcattacacaaggaagagacagcagcatacacgatgattttgtgacgacattctttgtcggtttctctaacgacagtcaaacatgggtgatgtacaccaacggatatgaagagatgactttccacggaaatgtagacaaggatacaccagtactgtctgagcttccagagccggtggtggcccgtttcattcgtatataccccctgacctggaacggctccctctgtatgcgactggaagtcctgggttgcagcgtggccccagtttactcttactacgcacagaatgaagtagtggctactgatgatttggatttcagacaccactcctacaaagatatgcggcagttaatgaaagtagttaacgaggaatgtcccacaatcaccagaacttatagtctgggaaagtccagccggggtttaaagatctacgccatggaaatctcagataacccaggggagcacgagctgggcgagcccgaatttcgctacactgcaggcatccacggcaatgaggtgctgggtcgcgagttgctgctgctcctgatgcagtacctgtgccgagagtatagagatggcaacccaagggtgcggagcctggtccaggatacaagaattcatctagtgcctagcctaaaccctgacggctacgaggtagccgcacaaatgggatctgagttcggaaattgggcactgggcctgtggacagaagaggggttcgatattttcgaggacttccccgatctgaactccgtgctgtggggggcagaagagcggaagtgggtgccctaccgtgtgcccaacaacaaccttccaataccggaaaggtacctgtctcccgacgcgacagttagcacagaagttagggccataattgcatggatggaaaaaaatccgttcgtgcttggtgcaaatcttaatgggggtgagagactcgtttcctatccttatgacatggctagaacaccaacacaggagcagcttttggctgcagccatggcagccgcacggggtgaggacgaggacgaggtgtctgaagcccaagagaccccagaccacgccatcttccggtggttggctatctccttcgcctctgcccatttgacactgaccgaaccgtaccggggtggctgtcaagctcaagactacaccggcggtatgggtattgttaatggagctaagtggaatccgcgaacaggcaccatcaacgatttttcctaccttcatacaaattgtctggaactctccttttacttaggttgtgataaattcccacacgagtccgagcttcctcgcgagtgggagaacaataaggaggctcttttaacctttatggagcaggttcatcggggaatcaaaggggtagtaaccgatgagcagggcatccccattgcaaatgccactatctccgtaagcggaatcaatcatggagtgaagacagcaagcggtggcgactattggaggattctgaaccctggggagtaccgcgttaccgctcacgcagaaggctacacgccctctgccaagacttgtaacgttgattatgacatcggcgctacccagtgcaattttattttagccagatctaactggaagaggatccgtgaaattatggccatgaatggcaatagaccgatcccccatattgacccaagccgaccaatgacgccacagcagcgaaggttgcagcagcggaggctgcagcacagactgaggctccgggctcaaatgaggctgcggaggctgaatgcaaccaccactctagggcctcatacggttcctcctacactcccaccagctcctgcaaccactttaagtacaacgatcgagccttggggcctgattccacctaccactgccggatgggaagaatccgagacagagacttataccgaagtagtgacggaattcgggactgaggtcgagcccgagttcggaactaaggtggaaccagaatttgaaacacaacttgagccagagtttgaaactcagctcgaacccgagttcgaagaggaggaggaggaagaaaaagaggaagaaatcgctaccggccaggcattcccatttaccaccgtggagacatacactgtaaattttggggacttttag

SEQ ID NO: 231740 - DNA, 447 bp, synthetic construct
  misc_feature 1..447: note = Description of Artificial Sequence: Synthetic coding sequence
  source 1..447: mol_type = other DNA
atgttcgaacaagctcaaatccaggagtttaaggaggccttctcttgcatcgaccaaaacagggacgggataatctgcaaagccgatttgcgtgagacctatagccaactggggaaagtgagtgtgccagaagaagagctggatgctatgttgcaggaggggaaaggaccaattaactttacagttttcctcactctcttcggcgagaaactgaatgggactgacccagaagaggcaattctctccgcctttagaatgtttgacccctctggcaagggagtcgttaataaagatgagttcaaacagctgctcctcacacaggctgacaagtttagccccgctgaagtcgagcagatgtttgctctgactcctatggatttggcgggaaatatcgattataaatcgctatgctacatcattacacacggtgatgagaaggaagagtag

SEQ ID NO: 231741 - DNA, 1128 bp, synthetic construct
  misc_feature 1..1128: note = Description of Artificial Sequence: Synthetic coding sequence
  source 1..1128: mol_type = other DNA
atgcagaaacttcaactgtgtgtatatatatatctgttcatgctcatcgtggctggaccagtcgatctgaacgaaaattccgaacagaaggaaaatgtcgaaaaggaggggctttgcaacgcctgcacgtggaggcagaatactaaatccagtaggatcgaggccatcaaaatccaaatactgagcaagcttcgattggagacagctcctaacataagcaaggatgtcattcggcagctcctccccaaggctccacccctgagagagctgatcgatcagtacgacgtgcagcgggacgattcctccgatggctccttggaagatgacgactatcacgcgaccaccgaaactattattacgatgccaaccgaaagtgacttcttaatgcaggtcgatggaaagccgaaatgctgttttttcaaattctcctccaaaattcaatacaataaggtggtcaaggcccagttatggatttatctcaggcctgtggagacccccacaacagtgtttgttcagatcttgcgacttatcaagcctatgaaggacggaactaggtatacagggatcaggtctctcaaactcgacatgaaccccggaaccggcatctggcaatccattgatgtgaaaaccgttctacaaaattggctgaagcagccagagtctaacctgggtattgagataaaagcgctggacgagaacggccatgatctcgctgtgacatttcccggtcctggcgaggatggcctgaacccattcctagaagtgaaagttaccgatactcccaagagatcccgacgcgattttggactggattgtgatgaacactctaccgaatcccgttgctgcagatatcccctgaccgtagattttgaagcatttggctgggattggattatcgccccaaagcggtataaagctaactattgcagtggcgagtgtgagtttgtctttctccagaaatatccccatacccacctcgtacaccaggctaaccctagagggtccgctgggccttgctgtacgcctactaagatgagtcccataaacatgctatatttcaacggcaaagaacagattatttacggcaagatcccagctatggttgtcgatcggtgtggctgcagttag

SEQ ID NO: 231742 - DNA, 1497 bp, synthetic construct
  misc_feature 1..1497: note = Description of Artificial Sequence: Synthetic coding sequence
  source 1..1497: mol_type = other DNA
atgtttaactacgaaagacccaaacacttcattcagtcccaaaatccctgtggctcccgactccagccaccaggcccagaaacaagctctttcagttctcagactaagcagtccagcatcattattcagcctcgtcagtgtactgagcagaggttctcagctagcagcaccttgtcgtcacacatcacaatgtctagtagtgcttttcccgctagcccaaaacagcacgccggtagcaatcctggccagcgtgtgacaacaacctataaccagagcccagccagctttttaagcagtattctgccgagtcagcccgactataattcatccaaaatcccctctgccatggatagcaactatcagcagagctctgccggacagcccatcaacgcaaagccgtcgcagacggctaacgctaagccaatcccccgtacccccgaccacgagattcagggctccaaagaggcacttattcaagaccttgaaaggaagttgaagtgcaaagacacattacttcataatggaaatcagaggctgacgtacgaggagaagatggccagaagattactgggccctcagaacgctgcagcagtgtttcaggcacaggacgattctggggctcaagacagtcaacagcataatagcgaacatgccagactacaggttcccacttcacaagtccgatccagatccacctcacgaggagatgtgaatgaccaagatgctatccaggagaaattctaccccccaagatttattcaagtgcctgagaacatgagtatcgatgaaggacggttttgccgcatggatttcaaagttagtggactccccgcacctgatgtctcatggtacctaaatggccgaacagtccaaagtgatgacttgcataagatgatcgtaagcgaaaagggcctgcacagccttattttcgaggtggtccgagccagtgacgcaggagcatacgcctgcgtagccaagaaccgcgcaggcgaagcgaccttcacggtacagctggacgttctcgcaaaggagcacaagagggccccaatgtttatctataaacctcagagtaagaaagtcctggaaggcgattccgtgaagcttgaatgtcagatcagcgctatcccacctcccaaactgttctggaaaagaaacaatgagatggtccagttcaacactgacagaatttcactgtaccaggacaacaccggtagggtaacactgctgattaaagatgtgaataagaaagacgccggttggtacaccgtgtccgcggtgaatgaagccggtgtgacgacctgcaacacaaggcttgatgtgacggcaaggcctaatcagaccttgccagcacccaaacaacttagggtgcgaccaacattctcaaagtatctcgcccttaacggaaaaggactcaacgtcaagcaagccttcaatcccgaaggagaatttcaaagattggctgcccagtccggcttatatgagtccgaggagctatag

SEQ ID NO: 231743 - DNA, 945 bp, synthetic construct
  misc_feature 1..945: note = Description of Artificial Sequence: Synthetic coding sequence
  source 1..945: mol_type = other DNA
atggcacgacgacttctgggaccacagaatgctgcggctgttttccaggcccaggatgacagcggcgcacaagactcccagcaacacaattcagaacacgcccgtctccaggtccctacaagccaagtccggagcaggagcacgtcccgtggtgatgtgaatgatcaggatgccattcaagagaaattctacccaccacgctttattcaagtacccgagaatatgtccatcgacgagggtcgtttctgtcggatggacttcaaggtatcagggctcccagcccctgatgttagttggtacctaaatgggagaactgtacagtccgatgatctgcacaagatgatcgtgagcgaaaaaggcctgcactccctgatttttgaggtcgtacgcgcatctgatgcaggggcttacgcttgtgttgcaaagaaccgggcaggggaggccacctttacagttcagctcgacgtgctcgccaaagaacacaaaagggctccaatgtttatctacaaaccccagagcaagaaggtcctggaaggagatagcgttaagctggagtgccagattagcgctatacctccgcctaaactcttttggaagcggaacaacgagatggtgcagttcaatactgaccgaatatccctgtatcaggataataccgggcgagtgaccctgctgattaaagatgtgaacaaaaaagatgcaggttggtataccgtttccgccgttaatgaggctggtgtcaccacctgtaatacgcgccttgatgtcacagcacgccctaaccaaacattgccagcgccaaaacagctgcgtgtaagacctacatttagcaagtacctcgccctcaacggaaagggcctgaatgtcaagcaggccttcaacccggagggggagtttcagagactggcagcccagtccggcctctatgaatcagaggaattgtag

SEQ ID NO: 231744 - DNA, 357 bp, synthetic construct
  misc_feature 1..357: note = Description of Artificial Sequence: Synthetic coding sequence
  source 1..357: mol_type = other DNA
atgtgcgacaaggaattcatgtgggctctgaagaatggcgatcttgacgaggtgaaggattacgtcgcgaagggggaggacgttaatcgaaccttggaaggaggaagaaagccactgcactacgctgccgattgtggccagttagagattctagagtttttgctgctgaaaggggcagacattaatgcaccagacaagcaccatataacccctctactcagcgccgtgtatgaaggccatgtgtcctgcgtgaaactactactgtctaaaggggcagacaagacagtgaagggtccagacgggctaaccgcctttgaggccacggacaatcaggccatcaaagccctgctgcagtag

SEQ ID NO: 231745 - DNA, 1812 bp, synthetic construct
  misc_feature 1..1812: note = Description of Artificial Sequence: Synthetic coding sequence
  source 1..1812: mol_type = other DNA
atggccagcgcctcaacatcaaaatataattcccattccctggagaacgaatccatcaaaaggacgtccagggatggtgttaaccgggatctgacagaggctgtacctcgcttacccggagagacgcttattacagacaaagaagtgatttacatttgtccattcaatgggcctattaaaggcagagtgtatattaccaattatcgcttgtatcttcgctcactggaaaccgattcctccctgattctggacgtaccacttggagttatcagtcggattgagaagatggggggagccacctcacggggtgaaaacagctatggcctcgatataacatgcaaggacatgcgaaaccttcgcttcgcgctgaaacaagaagggcacagccgcagagacatgtttgaaatattaacccggtacgccttcccgctggcccattccctaccactgtttgcatttctgaacgaggagaagttcaacgttgatgggtggacagtgtacaatcccgtggaggagtacaggcgccaaggccttcctaatcaccactggaggattacatttatcaataagtgttatgagttgtgcgatacctacccggctctcttggttgtgccttatcgggcttccgatgacgatctgaggcgcgtcgccactttcaggtctagaaaccgcattcctgttctcagctggatacatcctgagaacaagactgtgatagtgcggtgcagtcaaccattagtgggaatgtcggggaagcggaacaaggacgatgagaaataccttgacgttataagggagactaataaacagatcagcaagctcaccatctatgacgcacggccttcagttaatgcggttgctaacaaggccacaggaggcggatacgaatctgacgatgcctatcacaatgccgagctgttcttcctggatattcataatatccacgtaatgcgcgaaagcctaaagaaggtcaaagacatcgtgtatcccaacgtggaagaaagtcattggttgtcgtccctggagtctacccactggctggagcacatcaagctcgtgctgaccggcgctattcaggttgctgataaagtttcctcaggcaaatcgagcgttctggtccattgctcagacggctgggaccgaaccgcccagctgacatctctggccatgttgatgctggattcattttaccgttctattgaaggctttgagattctggtccagaaagagtggatctcctttggccataagttcgcttcccgtataggtcacggtgacaaaaaccacaccgatgccgatcggtcccctatcttcttacagtttattgattgcgtctggcagatgtcaaaacagtttccaactgctttcgaatttaatgagcaattccttattattattctcgatcacctgtactcatgccggttcggcacctttctgtttaattgtgaatcagcacgtgaaaggcaaaaggttaccgagagaacagtgtccctctggtccctgatcaacagtaataaggaaaagttcaaaaacccattttacacaaaggaaataaatcgagttttgtaccctgttgcatccatgaggcacctggagttgtgggttaactactatatacgatggaaccccaggataaaacagcagcagccgaatccagtggagcagcggtacatggaactgttggcgctgcgggacgaatacattaaacgcctggaagagcttcagctcgctaacagcgctaaactgtccgacccaccaacttccccatcaagcccctcgcagatgatgcctcatgtgcagacacacttctag

SEQ ID NO: 231746 - DNA, 1701 bp, synthetic construct
  misc_feature 1..1701: note = Description of Artificial Sequence: Synthetic coding sequence
  source 1..1701: mol_type = other DNA
atggcctcagcttccacttccaaatacaactcccactcactggagaacgaatcaattaaacgaacatcccgcgacggtgtgaacagggatctcaccgaggccgtgcccagactccccggagagacgctaataactgataaagaagtgatctatatttgtccattcaatgggccaataaaaggcagggtatatatcacgaactacagactgtatctgaggtctctggagacagacatgagaaatctacgctttgcactgaagcaggagggacactctaggcgtgacatgttcgaaatccttacccggtatgccttcccgctggcccatagtctgcctctgtttgcgtttctgaacgaagagaagtttaatgtggatggttggactgtttataatcccgtggaggagtaccggcgacaaggtctgcctaaccaccactggaggattacgttcattaacaagtgctacgagctgtgtgacacatatcctgccttactggtggtgccctacagggcctccgatgacgacctcagacgggtcgccacattccggtctagaaatcgtattccggtgttatcctggatacacccagaaaataaaactgtaattgtcaggtgtagtcagcccctggtgggaatgtcagggaaaagaaataaggacgacgagaagtatctggacgtcatcagggaaaccaataaacaaatttctaagttgaccatttacgacgcccgaccctctgtgaacgccgtggcgaataaagctacaggtggtggttatgagtctgatgatgcttatcacaatgccgagttgttcttcctggacatccacaacatccacgtgatgagagagtcactgaaaaaggtgaaggacatcgtctacccaaatgtggaagagagccactggctgagctcactggagtccactcattggctggagcatataaagttagtgttgacgggggcaatacaggtggctgataaagtgagttctggaaagagctcagtcctggttcactgtagcgatggatgggatcgcacagctcagttgaccagtctggctatgctgatgctggacagcttctaccgctcgatcgagggattcgaaatcctcgtccaaaaggaatggatcagctttggccacaaatttgccagccgcattggccatggggacaagaaccacactgatgctgacagaagtcccatctttctacagtttattgactgcgtgtggcaaatgtctaaacagttccccacagctttcgagttcaacgagcagttcctgattattatcctagatcacctgtattcttgcaggttcgggacatttctgtttaactgtgagtcagccagagagcgacagaaagttacagagagaacagtctctctgtggtcattaattaactcgaacaaggagaagttcaagaaccctttttacacaaaagaaattaaccgggttctctacccggttgcttcgatgagacacttagaactgtgggtaaattattatatccgctggaatcccagaatcaagcaacagcagccaaacccggtggagcagcgctatatggagctcctggccctccgggatgagtacatcaagcggctggaggagctacaactggctaattctgccaagttatctgatccccctacgagcccatctagccccagccaaatgatgccccatgtgcagacacacttctag

SEQ ID NO: 231747 - DNA, 1251 bp, synthetic construct
  misc_feature 1..1251: note = Description of Artificial Sequence: Synthetic coding sequence
  source 1..1251: mol_type = other DNA
atgggcggagcgacctcgcgcggagaaaactcctacggactagacataacatgcaaagatatgcgcaacctaagattcgccctgaaacaggagggccacagtcggagagacatgtttgagatattaacccggtacgccttcccactggcccacagcctcccactttttgcttttctcaacgaggagaaatttaatgtggacggatggacagtgtataaccctgtggaggagtacagaagacagggactccctaaccaccactggcgcatcaccttcattaataagtgctacgaactctgcgacacctatcccgcacttctggtggtgccctacagagcatccgacgacgatctgcggagggttgcaacctttaggagcaggaataggatacccgttctcagttggattcatccggaaaacaaaaccgtgattgtgcgctgctcccaacccctggtcggtatgtccggaaagaggaacaaggacgatgagaaatatttggatgtgatcagggagacaaacaagcagatctcgaaactgactatttacgatgccaggcccagcgtgaatgctgtcgccaataaggcaactggcggtgggtacgagagtgatgacgcgtaccacaacgccgaactcttttttttggatatccataacatccacgtcatgcgggagtcgcttaagaaagtgaaggacattgtatatcctaacgtcgaggagtctcattggctgagttcactggagtctactcactggctggagcatataaaattggtcttgacaggcgctatccaagttgccgacaaggtgtcctccggcaagagttctgtcctggtgcactgctcagatggttgggatagaacagcccagctgactagtttagccatgctgatgctggactcgttttatcgcagcattgaagggttcgagatcctggtgcaaaaggagtggatctcttttggccataagttcgcatctagaattggacacggtgataagaaccacacagatgccgatcgaagccccatcttcttgcagtttattgattgtgtttggcaaatgagcaagcagtttccaacagcttttgaattcaatgaacagttcttgatcatcatcctggatcatctctatagttgccggtttgggacgtttctgtttaactgcgaatccgctagggaacggcaggcactgcacttccttagcctctcgctttgtcgacggttacagaaaggactcttcctctacgggcactag

SEQ ID NO: 231748 - DNA, 1467 bp, synthetic construct
  misc_feature 1..1467: note = Description of Artificial Sequence: Synthetic coding sequence
  source 1..1467: mol_type = other DNA
atgcgcaacttgcgattcgcgctaaagcaggaagggcactcacgcagggacatgtttgagatcctaacacgctacgcctttccgctggcccacagccttccccttttcgctttcttgaacgaagagaaatttaatgtggacggctggactgtttacaaccctgtcgaggagtaccggcgtcaggggttgccaaatcaccactggcgtattaccttcataaacaagtgctatgagctgtgtgacacctacccggctctgttggttgtcccctatcgcgcttccgatgatgacctccggcgagtggcaaccttcagatccaggaaccggatccctgtcctgtcttggatccacccagagaataagacagtgatcgtgaggtgctctcaacccctggttggcatgagtggaaagcgcaacaaggatgacgaaaagtacttggatgtgatacgggaaactaacaagcagataagtaagttgaccatctatgatgccagaccctctgtaaatgcagtggctaacaaggcaacaggaggcggttacgaatccgacgacgcttaccataacgccgaactgttcttcctggatatacacaatattcacgtcatgagggaaagcctgaagaaggtaaaggacattgtttatcctaacgtggaggaaagccactggctctcttctcttgagagcacacattggttggaacatataaagctagttttgacaggagccattcaggtggcggacaaggtgtcgtccggcaagtcctctgtgctcgtgcactgcagtgacggctgggatagaaccgcccagctgacctcacttgccatgctgatgttagacagcttctaccgctctatagaaggtttcgagatcctcgttcagaaagagtggatctccttcggccacaagttcgcctcacgaatcggacatggggacaaaaatcacacagatgccgatcggtcacccattttcctccagttcattgactgcgtttggcagatgtccaagcagttccccactgcctttgaattcaatgaacagttcttaataatcatactcgaccacctgtatagctgtcggttcgggaccttcttgtttaactgcgagagtgcacgcgaacgccagaaagtcaccgagcgaacggtgtcgctttggtcccttatcaatagcaacaaagagaaatttaagaaccccttttacacgaaggaaattaatcgagtgctttacccggtcgccagcatgagacacctggaactgtgggtcaattattacatccgctggaatccaagaattaagcaacagcagccaaacccagtggaacagcggtacatggagctactcgccctacgggacgaatacataaaaaggctcgaggagcttcagctggccaacagtgctaagctcagcgacccaccgactagtccctccagtccgtctcaaatgatgccccatgtgcagacccacttctag

SEQ ID NO: 231749 - DNA, 1998 bp, synthetic construct
  misc_feature 1..1998: note = Description of Artificial Sequence: Synthetic coding sequence
  source 1..1998: mol_type = other DNA
atggatcgtcctgctgctgccgctgctgccggatgtgaggggggtggtggcccaaaccccggacccgctggcggtcgacggccaccacgcgcagcagggggtgctacagccggaagtaggcaaccctcagtagagacactggactctcccactggtagccacgtcgagtggtgcaagcagttaatagcggctactatcagttcgcagatttcggggagcgtgacgtccgagaatgtgtcccgggattataaggccctgcgcgacgggaacaagcttgcacagatggaagaggcccctttgttcccgggtgaatctattaaagccatcgtaaaggacgtcatgtatatctgccctttcatgggagccgtatccggcactctgactgtcaccgattttaagctgtacttcaagaatgttgagcgcgatccacacttcattctcgacgtcccactgggagtcatcagtcgcgtcgaaaaaatcggcgcacagtctcatggagacaactcttgtggcatcgagatcgtgtgcaaggatatgcgaaacctgagactggcttacaagcaggaagagcaaagcaaactgggaatcttcgaaaacttgaacaagcatgcgttcccactgagcaatgggcaggctctgttcgctttcagttacaaggagaagtttcccataaacggatggaaagtgtacgaccccgtgtccgagtataagagacagggactgcctaatgagtcatggaaaatctccaaaatcaatagtaattatgagttttgtgatacttatcccgcaattattgtagtgcctacttccgtgaaagatgatgacttatcaaaagttgctgcttttcgtgccaagggaagggtgccagttctctcttggatccaccctgagtctcaggcaactatcactcgttgtagtcagccactggtgggcccaaacgacaaaaggtgtaaggaggacgaaaagtatctgcagactatcatggacgcaaacgcccagagtcacaagctgatcattttcgacgccaggcagaactccgtggctgatactaataagacaaaagggggtgggtatgagtccgaatccgcgtatccgaacgcagaactggtgttcctggaaattcacaatatacacgttatgagggagagcctgagaaaactgaaagagatcgtgtacccgtctattgacgaggccagatggctatctaatgtggacggaacgcattggttggaatatattcggatgcttctggctggcgcagtgcgcatcgcggacaaaattgagagcggaaaaacttctgtcgtggtacattgtagcgacggttgggaccggacggcccagctcacgtccttggccatgttaatgctggatagctattaccggaccatcaaaggatttgagactctggtagagaaagaatggatcagctttggccatcgatttgccctcagggttggccatgggaatgataatcacgccgacgctgaccgcagtccaattttcctgcaatttgttgactgcgtgtggcagatgacccgtcaatttccatccgccttcgagttcaacgaattattcctcatcaccattctggaccatctgtatagttgcttgttcgggacatttctttgtaattgcgagcagcagcgcttcaaagaggatgtgtatactaagactatctcactttggagctatatcaactcccaactggatgaattctctaaccccttctttgtgaattatgagaaccacgttctctaccccgtcgcttctctgtcacacttggagctatgggttaactattatgtacggtggaatccacgaatgcggccacagatgccaatccaccagaaccttaaggaattactagcagttagggcagagctccagaagagagtagaagggttacagcgagaggtagcaaccagggcagtatcctcttcatctgagagaggaagtagcccctcccattcagcgacgtctgtgcatacatcagtatag

SEQ ID NO: 231750 - DNA, 264 bp, synthetic construct
  misc_feature 1..264: note = Description of Artificial Sequence: Synthetic coding sequence
  source 1..264: mol_type = other DNA
atggaagaggctcctttgttccccggtgaaagcattaaagcaatcgtgaaagatgtcatgtacatctgccctttcatgggtgccgtttctggcaccctcacggtgaccgacttcaagctttactttaaaaatgtggagagagacccgcactttatcctggacgtgccactgggggtgatttcacgcgttgaaaagattggtgcccaaagccatggcgacaactcatgcggcattgagattgtgtgcaaggatatgcgtaattag

SEQ ID NO: 231751 - DNA, 264 bp, synthetic construct
  misc_feature 1..264: note = Description of Artificial Sequence: Synthetic coding sequence
  source 1..264: mol_type = other DNA
atggaggaagctccactcttccccggagagtccatcaaagcgatcgtgaaggatgtgatgtatatctgccctttcatgggcgcagtgagcggaactctgaccgtcaccgacttcaagctgtattttaagaatgttgaaagagacccacatttcattctggatgtgccactcggcgtaatctcgagagtggagaaaataggcgcacagtctcatggtgataactcctgtgggattgagatcgtgtgtaaagacatgaggaattag

SEQ ID NO: 231752 - DNA, 273 bp, synthetic construct
  misc_feature 1..273: note = Description of Artificial Sequence: Synthetic coding sequence
  source 1..273: mol_type = other DNA
atggaggaagctccactgttccctggggaatccatcaaggcaatcgtgaaggacgttatgtatatttgtccatttatgggagccgtaagcggtaccctgacagtcaccgacttcaagctatactttaaaaatgttgagagagatccacattttattcttgatgtgccactcggagttatatccagggtggagaagatcggtgctcagagccacggcgataacagctgcgggatcgaaatcgtctgtaaggacatgcgcaacctgcgactgtag

SEQ ID NO: 231753 - DNA, 2022 bp, synthetic construct
  misc_feature 1..2022: note = Description of Artificial Sequence: Synthetic coding sequence
  source 1..2022: mol_type = other DNA
atggatcgtcctgccgctgctgccgcagcaggctgcgagggtggaggtggcccaaaccctgggcctgcaggcggacgacgacctcctcgcgctgctggcggtgccactgcgggatcacggcagccatcagtggaaacgttagattcacccactggatcccatgtggaatggtgcaagcaactgatagcagccactatcagtagtcagatttccggttccgtgaccagcgagaacgtttcccgcgattacaaagtgttccggagacctgacctacgcgcacttcgagatggcaacaaactggctcaaatggaagaggcacctttattccccggagagagcatcaaggcaattgtcaaggatgtgatgtatatttgccctttcatgggcgcagttagcggaaccctgactgtcaccgactttaagctttatttcaagaacgtcgagcgggacccacacttcattctggacgtccccttgggcgtgattagcagagtagagaaaatcggggcacagtcacacggcgataattcatgcggtatagaaatcgtgtgcaaagatatgaggaacctccgcctggcctacaagcaggaggagcagagcaaactgggtattttcgagaaccttaataagcacgcctttccgttaagtaacgggcaggccttgtttgccttttcatataaggaaaaattccctatcaatggttggaaggtgtatgatcctgtgtccgagtataaaaggcaggggctgccaaacgaatcatggaagataagtaagatcaatagtaattacgaattctgcgacacctatcccgctattatcgtggttccaaccagcgtcaaagacgacgatctatccaaggtcgcagctttccgcgcaaagggaagggttccagtcctgagctggattcaccctgaatcacaagccaccatcacgcggtgttcccagcccctcgtaggacctaacgataagagatgcaaggaggacgaaaaatacctgcaaacaattatggacgcgaacgcacagagccacaagctgatcatcttcgatgcacgacagaattctgtcgccgacacaaacaagaccaagggcggtggctatgaaagtgagtcagcttacccaaacgcagaattagtgttcttagagattcataatattcatgtgatgagggaatctctgcgcaagctcaaggaaattgtgtatcctagcatcgatgaagccaggtggttaagtaatgtagacggcacacactggctggaatacatcaggatgctgttggcgggtgccgtcagaatcgccgataagatcgaatctggtaagacatcagtggtggtacactgctccgacggctgggaccgtactgcgcagctgacctcactcgcaatgctgatgctggacagctattaccgaaccatcaaaggattcgagacactggtggagaaagaatggatttccttcgggcaccgctttgctctgagagtgggacacggcaacgataatcatgctgatgcagatcgcagtcctattttcctacaattcgtcgactgtgtatggcaaatgactcgtcagttcccttctgcttttgagttcaacgagttgttcctaattactattctagatcacttgtattcatgcctattcgggacattcctttgcaattgcgaacagcaaagatttaaggaagatgtctacactaagacaatcagtctttggtcatatatcaatagtcagctcgatgaattctccaatcccttctttgtcaattatgaaaatcatgtgctgtatcccgtggcgagcctgtcccaccttgagctatgggtgaattattacgtgcgttggaatcctcgcatgcggcctcagatgccaattcatcaaaaccttaaggagctgcttgccgtgcgcgcagaactccaaaaacgcgtggaaggtctgcagcgcgaagtggccacaagagcagtgtcatcatcttcagagcgtggttcaagtccttcacatagcgctacaagcgtgcacacctctgtctag

SEQ ID NO: 231754 - DNA, 1707 bp, synthetic construct
  misc_feature 1..1707: note = Description of Artificial Sequence: Synthetic coding sequence
  source 1..1707: mol_type = other DNA
atggatagacccgcagctgccgcagcggctggctgcgagggaggaggtggccctaatcccggtcctgcaggagggaggagaccacctcgagccgcaggcggagctacagctggtagccgacagccttcagtggaaactctggacagtcccactggctcccacgtggagtggtgcaagcagctgattgccgctaccattagcagtcagatcagcgggtcagttactagtgagaacgtgtcaagggactacaaggccctcagggacggcaacaaactagctcaaatggaagaggctccactctttcctggagaatccattaaggccattgtaaaagacgttatgtacatttgtccttttatgggggctgtgtccgggaccctgacggtcactgatttcaagctctacttcaaaaatgtcgagagagacccacatttcattctagacgtgcccttaggcgtgatctcccgcgtagagaagatcggtgctcagtctcatggcgataacagctgcggaattgaaattgtgtgtaaagatatgcgcaacttaagattggcatacaagcaagaagagcagtcaaagctgggtatcttcgagaatcttaataagcacgctttccccctttccaacggtcaagcacttttcgcctttagctataaggagaagtttccaattaatggttggaaagtttatgaccctgtgtctgagtacaaacgacagggtcttccaaacgagagctggaaaatttcaaagatcaactcaaactacgaattttgcgacacttatccagccatcattgttgtgcccacgtccgtcaaagacgacgacctcagcaaggtggcagctttccgggcaaagggaagagtgcctgtgctgtcgtggatccacccggagagccaggccacaatcacccgttgcagccaacccctggtgggaccaaatgataaacggtgtaaagaggacgaaaaatacctgcaaacaatcatggacgccaacgctcagtcccataagctgatcattttcgatgccagacagaacagcgtggccgacacaaataaaactaagggcggtgggtacgagagtgagagcgcctatcccaatgcagaactcgtgtttctggaaatacacaatattcacgtgatgcgggagagtttaaggaaactcaaggagatagtatatccttctattgacgaggctagatggttgagcaacgtagacggcacacactggctggagtatatacggatgttactggctggcgcagtgcggatcgctgataaaattgagagtggcaaaacctccgtagtcgttcactgtagcgatgggtgggatcggacagcgcagctgacctccctcgcaatgttgatgctcgactcttactatagaaccattaaagggttcgagacgctggtggagaaggaatggatttccttcggtcaccggtttgccttaagagttggtcacggcaacgacaaccatgccgacgccgatcggtcacccatatttctgcagttcgttgattgtgtctggcagatgacccgccagttccctagtgcgttcgagttcaacgagctttttttaataactattcttgatcatctatactcttgtctgtttggcacctttctgtgcaattgcgaacagcaaaggttcaaagaggcttggggcgctggaactcaaagggcaagaggcagcttgcgatcacgctag

SEQ ID NO: 231755 - DNA, 444 bp, synthetic construct
  misc_feature 1..444: note = Description of Artificial Sequence: Synthetic coding sequence
  source 1..444: mol_type = other DNA
atggaggaggcccctttattcccaggggagtccattaaagcgattgtaaaggacgttatgtatatctgcccattcatgggggctgtgtctgggacgcttaccgtgaccgattttaagttgtactttaagaacgtggagagggacccccattttatacttgatgtgcctctgggagtgattagccgcgtcgagaagataggtgcgcagtcccatggggataattcctgtggaatcgaaatcgtgtgcaaggacatgcgtaatcttaggcttgcctacaagcaggaggagcagtctaaactggggatctttgagaatcttaataagcacgcctttcccctgtcaaatgggcaggcattgttcgccttttcgtataaggaaaaattccctattaatggatggaaggtgtacgatcccgttagcgaatacaagagacaggggctgtag

SEQ ID NO: 231756 - DNA, 1182 bp, synthetic construct
  misc_feature 1..1182: note = Description of Artificial Sequence: Synthetic coding sequence
  source 1..1182: mol_type = other DNA
atgtacatctgccccttcatgggtgctgttagcggcacccttacagtcaccgattttaagctgtactttaagaatgttgagagagatccacatttcatactggatgtccctctgggagttatcagcagggttgagaaaatcggggcacaatcccatggcgacaatagctgtgggattgagatcgtatgcaaggacatgcgaaatttgaggttggcctacaagcaagaagagcagtcaaaactcggaatatttgagaacttaaacaagcatgctttccccctgtcgaatggccaggcactctttgctttctcttacaaggaaaagtttcctataaatggctggaaggtctatgatccagtgagcgagtataaacggcagggcctgccgaacgaatcctggaaaataagcaaaatcaactctaactacgagttttgtgacacgtatcccgctatcattgtggtacccacctccgttaaagatgatgacctgtccaaggtggctgcctttcgggcaaaaggccgagtgcccgtcctctcctggatccacccagaatctcaagcaaccataacacgatgcagtcagcctctcgtggggcctaatgacaagcgatgcaaagaggatgagaaatacctgcagactataatggatgctaacgcacaatcgcataagctcattatctttgacgccaggcagaacagcgtggctgacacaaataagatgctgttggctggggcagttagaatcgcagataaaattgagagcggtaaaacctcagtggttgtgcattgcagtgatgggtgggaccgcactgctcagcttacaagccttgctatgttgatgttggattcatattacaggacaatcaagggcttcgaaacgctcgttgagaaagaatggatctcctttggccaccggttcgcgctaagagtgggtcacggcaacgataaccacgccgatgctgatcgctccccaatatttctccagttcgtggattgcgtctggcagatgactcggcaatttccatcagcctttgaatttaacgagctgttcctgattactattctcgatcacctgtactcatgtctttttggcaccttcctgtgcaactgtgagcagcagcggtttaaagaagcttggggcgcagggacacagagggccagggggagtttgcggagcaggtag

SEQ ID NO: 231757 - DNA, 1716 bp, synthetic construct
  misc_feature 1..1716: note = Description of Artificial Sequence: Synthetic coding sequence
  source 1..1716: mol_type = other DNA
atggaagaggctccacttttcccaggggagagcataaaagcaatagttaaagacgtgatgtacatatgcccgtttatgggcgcagtgagcggaacactgaccgtcacagattttaagttgtacttcaaaaacgtcgaaagggatccccacttcattctggacgttcccctgggagtgatctcacgcgtggagaagattggcgctcagtctcacggtgacaattcatgcgggatagaaattgtctgcaaggacatgaggaacctgcgattggcatataagcaggaagaacagtcaaagttgggcattttcgagaatctgaacaagcacgcgttccccttaagcaacggccaggccctatttgcctttagctataaagaaaaatttcccataaacggctggaaagtatatgatccagtgtccgagtacaagcgtcaggggctcccaaacgagagttggaagatctctaaaatcaacagcaactacgaattctgcgacacttatcccgcaataatagtggtgccgacctcagttaaggacgacgatttgagcaaagtcgccgcttttagagccaagggcagggtccctgtgctgagctggattcaccccgaatcccaagccacaatcacacgctgtagtcagccgctcgtgggtcccaacgataagcggtgcaaggaggacgagaagtacttgcagaccatcatggacgccaatgcccaatctcataagctgataatcttcgatgctcgccagaattctgtcgcagataccaataagactaaggggggaggctatgaatcagagtccgcctaccccaacgctgaactggtgtttctcgagatacacaacatccacgttatgcgggaatccctgcgaaaactgaaggagattgtgtatcctagtatcgacgaggctaggtggctcagcaatgtggatggaacacattggctggagtacatccgtatgctattggctggggcagttcggattgcagataaaatcgaatcaggcaaaacctccgtggtggtgcattgctctgatggttgggaccgcaccgctcagctcacttcactagccatgctgatgctcgattcctattatcggactattaagggttttgagacactggttgaaaaagagtggattagcttcggccatcggttcgccttgagggtggggcacggcaatgataaccacgccgatgctgatcgcagtccgatattcctacagttcgtggactgcgtgtggcagatgacccgacagttccctagcgcctttgaatttaacgagctgttccttataacaatactggatcacctgtacagttgtcttttcggcacattcctgtgtaactgcgagcaacagcgcttcaaagaagatgtgtacacgaagaccatctctctctggtcgtacatcaattctcagctggatgagtttagtaatccgttcttcgtgaattacgagaatcatgtgctatacccagttgcttcgcttagccatctggagctgtgggtaaattactacgtcaggtggaatcctagaatgaggccccagatgcctatacaccagaacctgaaggagctgttagctgttagagccgagctgcagaagcgcgtggaaggactgcagcgtgaggtggcaaccagagctgtgagctctagtagcgaacggggttcctccccctcacactcagctaccagcgttcatacatccgtgtag

SEQ ID NO: 231758 - DNA, 1092 bp, synthetic construct
  misc_feature 1..1092: note = Description of Artificial Sequence: Synthetic coding sequence
  source 1..1092: mol_type = other DNA
atggacagaccggctgctgccgctgctgccggatgtgaaggtggagggggtcctaatcctggtccagctggcggtaggcgtcccccaagagctgctggcggtgccacggcaggctccagacagccaagtgtggaaacactagatagccctaccgggtcccacgtggaatggtgtaaacagctcatcgcagcaactatctcttcccagatcagtggcagtgtaacttcagagaacgttagtagagattacaaggcactgagggacggcaataagctggcacagatggaggaagcgccactgtttcccggagaaagcattaaagcaatcgtcaaagatgtgatgtatatctgtcccttcatgggagctgtttccggaacccttacagtcaccgactttaagctttacttcaaaaatgttgagcgggatccgcacttcatcttagatgtgccactcggcgtaatatctcgagtcgagaaaattggggcacagtcacacggagacaattcttgtggcattgagattgtttgcaaagacatgagaaacctgagactggcctacaagcaggaggaacagtccaagctgggaatctttgaaaacctgaataaacatgcattcccactctctaacggccaggccttgttcgcatttagttacaaagagaaattcccaattaacggctggaaggtctacgacccggtttcggaatacaaacggcaggggcttcctaacgagagctggaagatcagcaaaatcaattccaattacgaattctgcgatacctatcctgctattattgttgttcccacctccgtgaaagatgacgacttgtccaaagttgctgctttccgagcaaaaggaagggtacccgtactatcttggatacatcctgaatcccaggctactattactcggtgcagccaaccattggtcggaccgaatgacaagcggtgtaaggaagatgaaaagtacctgcaaacgatcatggacgcaaacgctcaaagccataaactgatcatcttcgatgccagacagaattcggtagccgacaccaacaaactttggtaccaggatactgcgtcgcttatggaatag

SEQ ID NO: 231759 - DNA, 1998 bp, synthetic construct
  misc_feature 1..1998: note = Description of Artificial Sequence: Synthetic coding sequence
  source 1..1998: mol_type = other DNA
atggaccggccagcggcagctgccgcagccggatgcgaaggcggaggaggccctaacccaggaccagcaggaggacgccgtccaccaagggcggctggaggtgctacggcaggcagtcgccagcctagtgtggaaacgctggactctccaacgggctctcacgttgagtggtgtaagcaattgatcgcagctacgatttcatctcaaatctcgggctccgtgacttctgaaaatgtttctagagattacaaagctctgcgcgacggcaacaagcttgcacagatggaggaagctcctcttttccctggcgaatcgattaaggcaattgtgaaagacgtgatgtacatttgcccttttatgggcgcagtctcagggacgctcaccgtcactgatttcaaactctacttcaagaatgtcgagagagaccctcatttcatcctcgatgttcctttgggggtgatcagccgcgtggaaaaaatcggcgctcaaagtcatggcgataattcttgcggcattgaaattgtgtgcaaagacatgaggaacctccgcctggcatacaagcaggaagagcagtcaaaactggggatctttgaaaatctcaataaacacgctttccccctgagtaatggtcaggccctcttcgctttcagttacaaggaaaaatttccgattaatggttggaaagtgtatgatccggtcagcgagtataaaaggcagggccttccaaacgagtcctggaagatctcaaaaattaacagtaattacgagttctgcgatacgtatccagcgattatcgttgtgcctacgtccgtcaaggacgatgatctctcaaaagtcgccgctttccgcgctaaaggtcgagtacctgtgttatcctggatccatcccgaatcacaagcaactataactcggtgctcccagcccctcgtgggacctaacgataaacgatgcaaagaggacgagaagtatttacaaactatcatggacgccaatgcacaaagccacaagctgatcatttttgatgccagacagaattctgtggccgacaccaacaaaacaaaaggcggtggctatgaatccgaaagtgcttatccaaacgctgaacttgttttcctggaaattcataacatccacgttatgagggagtccctgagaaaacttaaggagatcgtatacccctccatagacgaagcccgttggttatccaatgtggacggcacccactggctcgaatatatcagaatgctactggctggcgcagtgagaatcgcagacaagattgagagtggcaaaacctctgtggtagtccattgctctgatggatgggaccggacagctcagctgacctctcttgcaatgcttatgctggacagttattaccgcacaattaagggcttcgagacgcttgtcgaaaaagagtggatcagctttggccatcgatttgcattgagagtggggcacggtaatgacaatcacgctgacgccgaccggtcccccattttcctccagtttgtcgattgcgtgtggcagatgacgaggcaattcccctcagcttttgaattcaatgaacttttcctcattacaatcctggatcacctgtacagttgtcttttcggtactttcttatgcaattgcgagcagcagcggttcaaggaagatgtttacaccaagacgattagtctctggtcttacattaactctcagctcgacgaattctctaaccccttttttgttaactacgagaaccatgttttgtaccccgttgccagtctttctcacctagagctttgggtcaattactatgtgcgttggaatccacggatgaggccccaaatgcctatccaccaaaaccttaaagagctgttagccgtaagggccgagctacagaagagagtggaaggcctccagagagaggtagcgactagggcggttagctcttcaagcgaaagaggttcttcaccctctcactcagctactagtgtgcacacatccgtttag

SEQ ID NO: 231760 - DNA, 1914 bp, synthetic construct
  misc_feature 1..1914: note = Description of Artificial Sequence: Synthetic coding sequence
  source 1..1914: mol_type = other DNA
atgctgggcaaaggcgtggtcgggggagggggaggtactaaggcgccaaagccctcattcgtgtcttacgtgaggcctgaagagattcacacgaatgagaaggaagtaaccgagaaggaggtgacgctccacctgctgccaggagagcagctactctgtgaggcctcaacagtccttaagtatgtccaagaagactcttgccagcacggcgtgtacggtcggctggtgtgcacagactttaagatcgcctttcttggggacgatgagagtgctctggataacgatgagacccagttcaaaaataaggtgattggggagaacgatatcaccttacattgcgtggatcagatttacggcgtctttgatgagaagaaaaaaaccctttttgggcagctaaagaagtaccctgagaagcttatcattcattgcaaggacctccgagtatttcaattctgcctgcgctacaccaaggaagaagaagttaagagaattgtgagtgggataatccaccatacccaggcaccgaagcttctgaagcgcctttttcttttctcttacgctaccgcagcgcagaataacacggtgaccgaccctaagaaccatactgtgatgttcgatacgctgaaggattggtgctgggaactggagcggacgaagggtaatatgaagtacaaggcagtgtctgtcaacgagggatataaagtctgtgagaggcttcccgcatatttcgtagtgcccacacccctcccagaagagaacgttcagcgcttccaaggccatgggattccgatatggtgttggtcttgccacaacgggtctgctctcctcaaaatgtctgcactgccaaaggagcaagatgatgggatactgcagatccagaaatcgttcctagatgggatttacaagaccattcaccgtcctccctacgagattgtgaagacagaagacctttcatcaaacttcctctctctgcaggaaatacagaccgcttacagtaaattcaaacagctatttctgatcgacaacagcacagaattttgggataccgatatcaaatggttttcactgctggaatcaagcagctggctagatattatacggcgatgcctgaaaaaagctatagaaatcactgaatgcatggaggcgcaaaatatgaacgttctcctactcgaggaaaatgccagtgacctttgctgcctgatctcatcgctggtgcagctgatgatggacccccactgcaggactaggattgggtttcaaagtctgattcagaaagaatgggtgatggggggtcattgctttctggacaggtgtaatcatctcagacagaacgataaggaagagcaccagcggcaattgtcccttccattgacacagtccaagagctcgcccaagcgcggattttttcgcgaggaaacagaccatctaatcaagaacctgctggggaaaaggatttctaagctgatcaactcatctgatgaactgcaggataattttagggaattttacgattcatggcacagcaagtcgaccgattaccatggattgctgctgcctcacatcgaaggcccagagatcaaagtgtgggcacaacgttacctgcgatggatccccgaggcacaaatacttggcggagggcaggtggctactctgtcaaaattgctggagatgatggaagaagtgcaatccctgcaagagaaaattgatgaacgacaccactcacagcaggccccacaggctgaggctccatgcctgcttagaaattctgcgagactctctagtctctttccctttgccctgctgcagagacatagttctaagccggtactgcctacctctggctggaaagccttgggggacgaagatgatctggcaaagagggaggacgagttcgtggatctgggcgacgtgtag

SEQ ID NO: 231761 - DNA, 2082 bp, synthetic construct
  misc_feature 1..2082: note = Description of Artificial Sequence: Synthetic coding sequence
  source 1..2082: mol_type = other DNA
atgctcggtaagggggtggtggggggaggaggaggcacaaaagcaccaaagccgagtttcgtaagctacgtccgacccgaagaaattcatactaacgaaaaagaggtgaccgaaaaggaagtgacgctgcacctgctcccaggtgaacagcttctatgcgaagcttccaccgttctcaaatatgttcaggaggacagctgtcagcacggggtatacggtcgattagtgtgtactgactttaagatcgccttcctgggcgatgacgagtcagccctggacaatgatgagacccagttcaagaacaaggttatcggcgaaaatgacatcacgctgcactgtgttgaccagatctatggagtcttcgatgaaaagaagaaaactctgtttggccagctcaagaagtatcctgagaaactcataatccactgcaaggacctgcgagttttccagttttgtctgcgctacacaaaggaagaggaggtgaagagaatagtgtccggcatcatccatcatacacaggcccctaaactcctcaagaggctgttcttgttctcttacgctacagcagcgcagaacaacactgtgactgatcccaaaaatcataccgtcatgtttgacacgctgaaggattggtgctgggaactcgaaaggaccaaggggaacatgaagtacaaggctgttagtgtgaatgaaggttacaaagtgtgtgagaggctcccggcttattttgtcgtccctacgccacttccagaggaaaatgtacaacgattccagggtcacggcataccaatatggtgctggtcatgtcacaacggctctgcgctcctgaagatgtcagccctgccaaaggagcaagatgacggcatcctgcaaatccagaagtcattcctggacggtatctataaaacaatccaccgccctccttatgagatcgtgaagacagaggacctcagtagcaatttccttagcctgcaggaaatccaaacagcatattccaaatttaagcagttgtttttgatcgacaactccacagaattttgggatactgacatcaaatggttttctctcctcgagagctcaagttggcttgacatcatcagacggtgcttgaagaaggccatcgagataaccgagtgcatggaggcccagaacatgaacgtccttctgctcgaggagaatgcctccgatttgtgttgtcttattagtagccttgtgcagctcatgatggacccacattgcaggacgaggatcggatttcagagcctgatccaaaaggagtgggtgatgggcggtcactgctttttggaccggtgtaatcatctgaggcagaatgacaaagaagaggtacccgtgtttttgctgtttctagactgtgtgtggcaactggtccaccagcatccgccagcattcgaattcaccgagacatacctgaccgttctctctgactccctgtatattcctatcttttccacctttttttttaactccccgcaccaaaaggacacaaacatgcatcaacgacaacttagtcttcccttgacacagagcaagtccagcccaaagagagggttttttcgtgaagaaacagaccacctgatcaagaaccttctgggaaaacgaatctctaagctgattaatagtagcgatgagttgcaggacaattttcgagaattctacgactcatggcatagtaagagcactgactaccacgggctactgctacctcacatcgagggacccgagataaaagtatgggctcaacgctaccttaggtggatccctgaggcccaaattttgggcggagggcaggtggccactctaagcaagctgctggagatgatggaagaggtgcagtcgcttcaggagaagatagacgagagacatcattcgcagcaggcgcctcaggctgaggccccttgcttactccgtaatagcgccaggctatcttcccttttcccttttgccttgctgcagagacacagctccaagcctgtgctgcctaccagcggctggaaggccctcggagacgaagacgacttggctaagcgggaggacgaatttgtggatctcggcgatgtttag

SEQ ID NO: 231762 - DNA, 2244 bp, synthetic construct
  misc_feature 1..2244: note = Description of Artificial Sequence: Synthetic coding sequence
  source 1..2244: mol_type = other DNA
atgctcggaaagggggtggtgggcggtgggggtggtactaaagcgccaaagccttccttcgtctcttatgtacgccctgaggaaatacacactaatgagaaagaggtcactgaaaaggaagtcaccctgcatctcttgccaggagaacagctcctgtgtgaggctagtacggtactgaagtatgtccaggaggacagttgtcagcatggcgtttacggaaggctggtgtgtaccgatttcaaaatcgccttcctgggcgacgatgaatctgcccttgataacgacgagactcagtttaaaaacaaggtgattggagagaatgatattaccttacactgcgttgaccagatttatggagtctttgacgaaaagaagaagacgctcttcggccagctgaaaaagtatcccgagaagctgattatacactgcaaggatctccgtgtgttccagttctgccttcgctacacaaaagaagaagaagtcaaaagaattgtttctggcatcattcaccacacccaggctcccaagcttctcaagcgtctcttcctgttctcatacgcaacagcggctcaaaacaacactgtcacagaccctaaaaatcacacggtgatgttcgacacccttaaagattggtgctgggagctcgagcggaccaaagggaacatgaaatacaaagccgtgagcgtaaatgaaggttacaaggtttgcgaacggctgcctgcttatttcgttgtccctacaccgcttcctgaagagaatgtgcagagatttcaggggcatgggattccaatttggtgttggtcttgtcacaatggttctgcccttctgaaaatgagtgcattacctaaggagcaggacgatggcatcctccagatccaaaagagctttctcgacggaatttataagaccattcaccggccaccttatgaaattgtaaagaccgaagatctgtcatccaactttctttcactgcaagagatacagacggcatattccaagttcaaacagctctttcttatagacaacagtacggaattctgggacacggacattaaatggtttagcttgctggaaagttctagctggttagatataattaggaggtgtcttaagaaggccattgaaatcacagaatgtatggaagcgcagaatatgaacgttctcctgcttgaggagaacgcgtccgatctctgttgcctaatcagctctctggtgcagctcatgatggatcctcattgcaggaccagaattggattccaatccttaattcaaaaggagtgggtgatggggggtcattgttttctcgatagatgcaaccatttacgacagaacgacaaggaggaggtgccggtatttctgctcttcctggattgtgtgtggcagctggtacaccaacacccccctgcgtttgaattcaccgagacatatctgacggtgctgtccgatagtctctacattccaatttttagcacgtttttcttcaatagccctcaccagaaagacaccaacatgggtagagagggccaggatactcagtccaagcctctgaacctactcacagtgtgggactggtcagtccagtttgagcccaaagcccaaaccctattgaaaaatcccctttacgtcgagaagccaaaactggacaaaggacagagaaaaggcatgcggtttaagcatcagaggcaactaagcctgcctcttacccagagcaagtcctccccgaaacgaggattctttagggaagaaaccgaccacttaatcaagaacctgctggggaagaggatcagcaaactgatcaattcctcagatgaactacaagacaacttccgcgaattctacgacagttggcactccaagtcaacagactaccacggcctactccttccccatatagaggggccagaaataaaagtctgggcccagcgctatcttcgctggatcccggaggctcaaatcctaggaggaggccaagtcgctactctctctaaacttctcgaaatgatggaggaagtgcagtccttgcaggagaaaattgacgaaagacatcactcacaacaggctcctcaggctgaggccccatgcctcctgagaaactccgctaggctctcttcactgtttcctttcgccctgctgcaacgtcattcctctaagcctgtgctgcctacctccgggtggaaggcactgggggatgaggacgacctcgctaagcgtgaggacgagttcgtcgatctgggtgacgtgtag

SEQ ID NO: 231763 - DNA, 1953 bp, synthetic construct
  misc_feature 1..1953: note = Description of Artificial Sequence: Synthetic coding sequence
  source 1..1953: mol_type = other DNA
atggcaggcgctcgcgctgcagccgctgctgcttctgccggatcctcagcatcgagcgggaatcagccaccacaggaactgggtttgggcgagttgctggaagagttctcccgcacacaataccgagccaaggatggctcaggtaccgggggtagtaaagtggaaaggattgagaagaggtgcctggagttgttcggccgagattattgtttttcggtaatacctaacaccaacggcgacatctgtggccactatccacggcatattgtgttcttagagtacgaatcctcagagaaggagaaggacacctttgagtcaaccgttcaagtaagcaaattacaggacctgattcatcggtcgaagatggccaggtgccggggaaggttcgtttgccctgtcattctgttcaagggcaagcatatttgtagatctgcgaccttagccggatggggggagctgtatggcaggagtggatataactatttcttttctggtggggcagacgacgcttgggcagacgttgaggatgtgaccgaggaagactgcgccctccgctcaggagacacacacctatttgacaaggtccgtggctatgacattaaacttctgcgttacctcagcgtcaagtatatttgcgacctgatggtggagaataaaaaggtgaagttcgggatgaatgtgacctcatcagaaaaggtggacaaggctcaaaggtacgctgactttactttactcagcatcccttatccaggatgtgagttcttcaaagagtataaagaccgggattacatggcggaaggacttattttcaattggaaacaggactatgtcgacgcccctctctcaattccggatttcctgacccactcactgaacattgattggtcacaataccaatgctgggatcttgtccagcagacacaaaactatctgaagcttcttttgagcctagtcaactcagacgacgattccggcctattagtacattgtattagcgggtgggacagaacacccctgtttattagcctccttagacttagcttatgggccgacggattgatccacacgtcacttaaaccgaccgagatattatacctgacggtggcctatgactggtttttattcggacacatgctagtggaccgtttgtctaagggcgaagaaatttttttcttttgtttcaacttcttgaaacacattacgtcagaggagttcagcgctctgaaaactcaaaggcgaaagagtctaccagcaagagacgggggattcacactggaggacatctgcatgctgaggaggaaggaccggggtagtacgacctcactcggatccgatttcagcctggttatggagtcgagccctggagcgaccggcagttttacctacgaggccgtggaactggtgcccgcaggggcacctacccaggcagcgtggagaaagagccactcttcatcgcctcagagtgtcctttggaacaggccccagccgtctgaggacagactgccatctcagcagggcctggcagaagctcgaagctcctctagctcatccagtaaccactccgataacttctttagaatgggctcaagtccgctggaagttcccaagcctcgatctgtagatcatccgcttccgggtagcagcctttctactgattatggctcatggcagatggtcaccggctgtgggtcgatccaggagcgggcagtgcttcatacggattcttctctcccatttagcttccccgacgagctgcctaatagttgcctgttggcagcactgagtgatcgtgagacccgactgcaggaggtgagatcagcttttttagctgcatactccagcaccgtcgggttgcgggctgtggctccttctcctagcggagccatcggaggacttctggaacagttcgccaggggagttgggctcaggagtatctctagtaacgccctttag

SEQ ID NO: 231764 - DNA, 1617 bp, synthetic construct
  misc_feature 1..1617: note = Description of Artificial Sequence: Synthetic coding sequence
  source 1..1617: mol_type = other DNA
atggcaggagctagggcggctgccgcagccgcttccgctgggtcaagtgcgagctctggaaaccagccacctcaagaactgggcctgggcgaactgctggaggaattctcacgaacccagtatcgggcaaaagatggatccggaacgggaggctctaaagtggaacgcatcgagaaaagatgcctggagttgtttgggcgtgattactgtttctcggtgatacctaataccaacggcgacatttgcgggcactatccacgccatatcgtgtttcttgagtacgagtcttctgaaaaagagaaagacaccttcgagtcaaccgtgcaggttagtaaacttcaggacctgatccacaggtctaagatggcccgatgtaggggcagattcgtgtgtcccgtgattctgtttaaaggaaaacacatctgtagatcagccactttggccggatggggcgagctgtatggcaggagtgggtacaactactttttttctggcggagcggatgacgcctgggcagacgtagaggacgtgacagaggaagactgtgccttgagatcaggtgatactcatctgttcgacaaagttcgcggttatgacattaagctgctccggtacctgtctgtcaagtatatatgcgatctgatggtggagaataagaaggttaagtttgggatgaatgtgacgtcttcagagaaggtggacaaagctcagaggtacgctgactttactcttctaagtataccatacccaggctgcgaattttttaaagaatacaaggaccgggactacatggcggagggcctgatattcaattggaaacaagactatgtagatgctccactgagtattcctgattttctgacccacagcctgaacattgactggtctcagtaccagtgttgggatctagtgcagcagactcagaattatcttaagcttctgcttagtctcgtgaactccgacgacgacagtggcctcctggtacactgcatcagcggttgggataggaccccattgttcataagccttctgcggctatccttgtgggctgacgggctcatccatacgtctctaaaacccacagagatcttgtaccttaccgtagcctacgattggtttctcttcggccacatgctcgtggatcgattatccaagggcgaagagatcttcttcttctgttttaatttccttaagcatattacatccgaggaattctctgccctgaagacccagcgacgaaagtctctccccgctcgtgatggtggatttaccctggaggacatctgtatgttgcgaagaaaagacagggggagtaccacgtcactgggctccgacttctctctggtgatggagagctcgcctggcgcaaccggcagcttcacctacgaggccgtggaacttgttccggctggtgcccctacccaggcagcctggctcgccgcattgagcgaccgagagacacgacttcaagaagtgagatctgcttttctggctgcttatagctccacggtgggactgagagctgtcgcgccaagcccaagcggtgctatcggcggtctactcgaacagttcgccagaggggttggcctgcgttcaatctcttcaaatgcactctag

SEQ ID NO: 231765 - DNA, 1797 bp, synthetic construct
  misc_feature 1..1797: note = Description of Artificial Sequence: Synthetic coding sequence
  source 1..1797: mol_type = other DNA
atggctggtgccagagcagcggcagctgccgcatccgccggatccagtgcctcctccgggaaccaaccaccacaggagcttggactgggcgaactgttggaggagttttccagaactcagtaccgcgctaaagacgggtccggtactgggggatccaaggtcgaacgaatcgagaaacgatgcctggagctgtttggtcgggattattgtttcagtgtaataccgaacactaacggggacatttgcggccactatccacgtcacatagtgttcttagagtatgaaagctcagagaaagaaaaggatactttcgagagcacagtccaggtaagtaagctccaggatctgatccataggagtaaaatggctaggtgtagaggccgttttgtttgcccagtaatcctgttcaaggggaaacatatctgccggtctgcaacgctggcaggctggggcgagctatatggcagatctggatataactatttcttcagcggcggagctgatgacgcctgggcagacgtcgaggatgtgacagaagaagattgcgccttgcggagtggagatacacatttattcgacaaagtgcgtggctacgatatcaaattgctgcgatacttgtccgttaagtatatttgcgatctaatggtcgagaacaaaaaagtgaaatttggcatgaatgtcacttcctcagagaaggtagacaaggcgcaaagatatgctgacttcaccctgctcagtatcccctatcctggctgcgaatttttcaaggaatataaggaccgggactacatggctgagggccttatctttaactggaaacaggactacgtggacgcccctctcagcattcctgactttctgacgcattccctgaatattgattggtcccaataccagtgttgggatttggttcagcaaacccagaattacctgaaactgctactttccctggtgaactctgacgacgatagtggactactcgtccactgcatttccggatgggacagaaccccactttttattagcctgctgcgcctgagcctgtgggccgatggactgattcacacgtccctgaagccaaccgaaatactgtatctgactgtggcctatgactggttcctgttcggccacatgctcgtggaccgattaagcaaaggcgaggagatttttttcttttgtttcaacttcctgaagcacataacctccgaagagttcagcgccctgaaaacccagcgcaggaagtcactgccagcacgcgacggaggttttacactggaagatatttgcatgctaaggcgaaaggaccgcggaagcaccaccagcctgggcagcgacttcagcctcgtgatggagagcagcccgggtgcaacgggcagtttcacgtatgaagccgttgaactcgtgcctgccggagccccaacccaagctgcatggcgcaagagtcactcttctagcccccagagtgtgttatggaacagaccgcagccatcagaagataggttaccatctcagcaaggcctcgccgaagctcggtcctcttccagcagcagcagtaaccacagtgataacttctttcggatgggctccagcccactggaagtacccaagcccaggctggcagcgctgtctgaccgagagacccgcctgcaggaggtaaggtccgcctttctggctgcatattcttcaactgtgggattgagagcagttgccccatccccaagtggtgctattggaggtctgttggagcagtttgcccgaggagtggggctaagatctatcagctctaacgccctctag

SEQ ID NO: 231766 - DNA, 1563 bp, synthetic construct
  misc_feature 1..1563: note = Description of Artificial Sequence: Synthetic coding sequence
  source 1..1563: mol_type = other DNA
atggccggagcaagggccgctgctgcagccgcatctgccggatcttccgcttcttctggcaatcagccaccacaggagctcggtttaggggagctgctggaggagttctctaggacgcagtatagggccaaggatggttctggtacagggggaagcaaggtcgagcgtattgagaaaagatgtctcgagctatttggcagggattattgttttagcgtgattccaaacaccaatggtgatatttgcggacactaccccaggcatatcgtattcctggagtacgaaagttccgagaaggaaaaagacacattcgagagtaccgtccaggtctcgaagctgcaagacctaatccaccgttccaagatggcgaggtgccggggacggttcgtgtgcccagtaatattgttcaaaggtaagcacatttgccgctcagctacactggccggatggggagagctctatggacgtagcggctacaactattttttttcaggaggtgctgacgacgcctgggccgacgtcgaagatgttactgaggaagactgtgccttacgttccggggacactcacttatttgataaggtcaggggatatgacattaaattgttgcggtatctttcggtcaaatatatttgtgacctgatggttgagaacaaaaaggtgaagttcggcatgaacgtcacctcttcagagaaggttgataaggcacagaggtacgcagacttcacattactctcaataccatacccgggttgtgaatttttcaaagaatacaaagatcgagattatatggccgaagggctgatctttaactggaagcaagactacgttgacgctcccttatcaatccctgatttcctgactcacagcctgaatatcgactggtctcagtatcagtgttgggatttagtccaacagactcagaattatctcaagctgttgctcagccttgtcaatagcgatgatgatagcggactactcgttcactgcatatccgggtgggacagaacacctctgtttatatccctgctgagactgtccctttgggcagatgggctcatacacacatctctcaaaccaacagaaatcctgtacctcactgtagcctacgactggttcctgttcggtcacatgcttgtagacagattgtccaaaggcgaagaaatcttctttttttgttttaatttcctgaaacatatcacctctgaggagttcagcgctctgaaaactcagagaaggaagtccctccccgcacgagacgggggtttcaccctggaagatatctgcatgctcaggaggaaagaccgcggatcaacgacatcccttggaagtgacttcagtctggtgatggaatcgtctccaggcgcaactggatcttttacttatgaaagaggagctgggcctagcagaagcgctaactcaggctcgttggaagaggaaccgctaatattgagcacggagtgcccacttgagcccgctacaaccctgcgtgggcctttggctttccctgccggagccggtggtagccaggtgtttcaattattattcctgaaacccttttag

SEQ ID NO: 231767 - DNA, 1932 bp, synthetic construct
  misc_feature 1..1932: note = Description of Artificial Sequence: Synthetic coding sequence
  source 1..1932: mol_type = other DNA
atggagaaatcctcctcttgcgagtctttagggagtcaacccgcagcagccagacccccaagtgtggattccctttcaagcgcaagcacgagccatagtgaaaatagcgtgcacactaaatccgcctctgtggtaagctccgactccatctccacctctgccgacaacttctcacctgacttgcgtgtcttgcgggaatctaataagctagctgagatggaggaaccacctctattgcccggagaaaacataaaagacatggctaaagatgttacttacatttgtcccttcaccggagccgtcagaggcacgctcaccgtcacaaactatcggctttactttaagtctatggagcgtgaccctcctttcgtgctggatgcctccctgggagtgataaatcgcgttgagaagatagggggagcttcctcgagaggtgagaatagctatggcttagagaccgtgtgtaaggacattcgcaatcttaggttcgcccataaacccgaaggaagaaccagacgctctatttttgagaaccttatgaagtatgccttcccagtgagcaataacttacccttatttgctttcgaatacaaagaagtgttccccgagaatggatggaagctctacgatccgttactggaatacaggcgccaaggtattcccaatgagtcctggaggatcactaaaatcaatgaacgctacgaactgtgtgatacttatcctgcgctgctggttgttcctgccaacattcctgacgaagaactgaaacgcgtcgccagctttagatccagggggagaatccccgtcctgagctggatccatcctgaaagccaggctaccatcacccgctgctcccagcccatggtgggggtctccggcaaacggagtaaagaagacgaaaagtatttacaggcaattatggattccaacgctcagtcacacaaaattttcatttttgatgcccgtcccagcgttaatgctgtcgctaataaagccaaaggtggcggatatgagtccgaagacgcttatcagaatgccgaactagtgttcttggatatccataatatacatgtcatgcgcgagagtttgcgaaaattgaaggaaatagtgtacccaaacatcgaggagacccactggctatctaacctggaaagcactcattggcttgaacacatcaagcttatcctcgccggagcccttcgcatcgcggacaaagtagagtcaggaaagaccagtgtcgtcgtgcactgctccgacggatgggaccggactgcgcagctcaccagcctggctatgctcatgttagatggctattaccgcacaatccgtggattcgaggtacttgtcgaaaaggagtggctgtcattcggacaccgattccagctgagagtcggccacggggacaagaaccatgccgacgccgacaggagtccggtcttcctgcagttcattgactgtgtgtggcagatgacccgccaattcccaacagcgttcgagttcaatgagtactttttgataacaatcctggatcacttgtactcttgtctgttcgggacctttctgtgcaatagcgagcagcagagaggaaaagagaatctaccgaaaaggacagtgagcctgtggagttatatcaacagccagctggaagacttcactaatccgctgtatggcagttattccaatcacgtcctgtatcccgtcgcttcaatgagacacctggagctttgggtgggctattacatccggtggaacccacggatgaaacctcaagagccaatccacaatcgatacaaagaattgctggcaaagcgcgcagagctgcagaagaaagtggaagagcttcagcgcgagatttccaacagaagtacaagctcatctgaacgggcatcctcgccagcccaatgcgtgacccccgtgcaaacggtagtttag

SEQ ID NO: 231768 - DNA, 1716 bp, synthetic construct
  misc_feature 1..1716: note = Description of Artificial Sequence: Synthetic coding sequence
  source 1..1716: mol_type = other DNA
atggaggagcccccacttctgcctggcgaaaatatcaaggatatggctaaagacgtgacctacatctgcccatttaccggcgctgtcaggggcacattgacagtcacaaactatcggctgtatttcaagtccatggaacgggaccctccgtttgttctggatgccagtctgggagtaattaatcgcgtggaaaaaattggcggagcctcttctcgtggcgagaactcctacggcctggagaccgtgtgcaaggatattcgtaatcttcgatttgctcacaagcccgaggggagaacgcggaggtctattttcgaaaatctgatgaagtacgcatttcccgtgtccaacaatctgccgctttttgccttcgaatacaaggaagtcttccccgagaacgggtggaagctctatgatcctcttttggaatatcgaaggcaggggattcctaacgaatcctggcggatcaccaagattaatgagcgctatgaactatgcgacacctatccagcactcttggtggtgcctgccaacatcccggacgaggagctcaagagagtggcttcgtttcgctctcggggaagaattcccgtgctctcatggatccaccccgaatctcaggctacgattacgaggtgcagccaacctatggttggcgtgtcagggaaaaggtccaaggaggacgaaaagtacctgcaggctattatggacagtaacgcgcagtctcataaaattttcatcttcgatgccaggccaagtgtcaatgcagtcgccaacaaagccaaaggcggtggttacgagtcagaagacgcctatcagaacgctgaactagtgtttctggatatccacaacattcacgttatgcgcgaatccctgcggaagctgaaggaaatcgtgtatccaaatatcgaggaaacacattggctttcaaacttggagagtacacactggcttgagcatataaaactgattctcgccggagctctgaggatagccgacaaagttgagtccgggaagacgagcgtcgtcgtccactgctcagacggttgggatcgcaccgctcaattgacctctttggcaatgcttatgcttgatgggtattatcgcactatcagaggcttcgaagtgctggtggaaaaggaatggctctctttcggccacaggtttcaactcagagtgggtcatggcgacaaaaaccacgcagatgccgatagatctccggtgtttctacaatttatcgactgcgtgtggcaaatgacccgccaattccccacagcttttgagtttaatgagtactttcttatcaccatcctggaccatctgtatagctgcctgttcggcacgttcctgtgcaacagcgagcagcaaagggggaaggaaaacctgcccaagcgtaccgtgagcctctggtcatacataaattcacagcttgaggatttcactaacccactgtatggctcatattctaatcacgtactgtatcccgtggccagcatgaggcatctggagttatgggtcgggtactatatccggtggaatcccagaatgaaacctcaggaaccgatccacaatcggtataaggaattgttagccaagagagcagaactgcagaagaaagtggaagaactgcagagagagatctctaatcgatccacatccagctccgaaagagcttccagccccgctcagtgtgttactcctgtgcagactgtagtgtag

SEQ ID NO: 231769 - DNA, 1716 bp, synthetic construct
  misc_feature 1..1716: note = Description of Artificial Sequence: Synthetic coding sequence
  source 1..1716: mol_type = other DNA
atggaggagccaccccttcttcctggggagaatatcaaagatatggctaaagacgtcacctacatctgtcccttcactggcgcagtccgaggtactctaaccgtaactaactatcgcctatactttaaaagtatggagagggatcctcccttcgtgctggacgcaagtctgggcgttattaatcgggtcgagaagattgggggagcctcttcccgcggagagaactcctacgggctggagaccgtgtgcaaggacatccgaaacctgagattcgctcacaaacccgagggcagaacgcggaggagcatctttgagaatctgatgaaatatgccttcccagtatcaaacaacctccccctattcgcatttgagtacaaggaggtgtttccagaaaatggctggaaactctatgaccctctgctggagtatcgcagacaaggaatcccaaacgagagctggcgcatcaccaagataaacgagcggtacgagctatgcgatacctaccccgctttactggttgtccctgctaacatccccgatgaagaactgaagcgggtcgcatcttttagatctcgcggacgcatccctgtgctgagctggatccatccagagtctcaagcgaccatcaccagatgctcccaacccatggttggagtatctggcaagcgctctaaagaggacgagaaatacctccaggctatcatggactccaatgcacagtcccacaaaatatttatttttgatgccaggccctcggtgaacgccgtggccaacaaggccaaaggaggcggatatgaaagcgaggacgcataccaaaatgctgagttggttttcctagacatccataacatccatgtaatgagggagtcgttgcgcaagctgaaagagatcgtgtatccaaatatcgaggaaacgcactggctatccaaccttgagtctacgcactggctggagcacataaagcttattctggctggggctctgagaatcgccgacaaggtcgagtcgggaaagacatcggtggtcgtgcactgttccgatggatgggatcgcaccgctcagctgacttccctggccatgctcatgctggatggctattaccgaacaattcggggattcgaagtcctggtcgagaaagagtggctctccttcgggcatcggttccaactgagggttggccacggcgataagaatcatgctgatgctgataggagcccagtctttcttcagtttattgattgtgtctggcagatgacccgtcagtttccaaccgcattcgagtttaacgaatacttcctgatcacgatcctcgaccacttatatagctgtctgttcgggaccttcctgtgcaattccgaacagcagcgtggaaaggagaacctgcctaagcgcaccgtgtccctgtggtcatatatcaatagtcagctggaggacttcacaaatccactttacggcagctattctaatcacgtattataccctgtggcctctatgcgtcacttggagctctgggtcgggtactatatcaggtggaatccacgcatgaagccacaggagcctattcacaacaggtacaaagaactgttggctaaacgcgcagagctgcagaagaaagttgaagaactgcaacgggagatctcaaatcggtcaacgtcatctagcgagcgcgcatctagccccgctcagtgtgtgactcccgtacagacagtggtgtag

SEQ ID NO: 231770 - DNA, 1716 bp, synthetic construct
  misc_feature 1..1716: note = Description of Artificial Sequence: Synthetic coding sequence
  source 1..1716: mol_type = other DNA
atggaagagccacctctgctgcctggagaaaacatcaaggatatggccaaagacgtgacatacatctgtccttttaccggggcagtgaggggcactctgaccgtgacaaactaccgactttacttcaaatccatggaaagggatcctcctttcgtgctcgatgctagtcttggcgttattaacagggtggaaaagataggtggcgcatcaagcaggggtgagaacagttatggactggaaaccgtgtgcaaagacatccgaaatctgcgattcgctcataaaccagaagggcgaaccaggaggagtatcttcgagaacttgatgaaatacgcctttccagtgtccaacaatctgcccttgttcgcatttgaatacaaagaggtgttcccagaaaacggatggaaattgtacgatcccctgttagagtaccgcagacaagggatcccgaacgagagttggcgcatcaccaaaattaatgaaaggtatgaactttgtgacacttacccagccctcctggtcgtgcccgctaacatccctgacgaggaactgaagagagttgccagtttccgcagcaggggccgtatccccgtattgtcctggattcacccagaatcccaggccaccattacccggtgtagtcagcctatggtgggggtctctggaaaacggagtaaagaggacgagaaatacctccaagccataatggattctaatgcccaatctcataaaatttttatatttgatgccagaccaagcgtaaacgcagtcgcaaacaaggcaaagggaggcggatatgagtcggaagacgcataccagaatgcagaattggtgttcctcgacatccacaatattcacgtgatgagggagtcactgaggaagttaaaggaaatcgtgtaccccaatatagaagaaacacattggctatccaatctcgagagtacccattggctggagcatatcaagttgatcctggcaggcgctctacggattgccgacaaggtggagtccggaaaaacgagcgtcgttgtccactgttcagatgggtgggatagaactgcccagctgacctcactcgcgatgctaatgctcgatggatactatcgaacaataagaggattcgaggtgctggtcgagaaagaatggctctccttcggtcaccgttttcagcttagagtgggccatggtgacaagaaccacgcggatgcagacaggagccctgtgttcctacagtttatcgactgcgtttggcagatgactcgtcagtttcccactgccttcgaattcaatgagtattttcttatcacgatcctcgatcatctgtattcttgtctgtttgggacattcctgtgcaactctgagcagcagcggggaaaggagaacctgccgaagagaacagtctcactctggagctatataaactcccagttggaggatttcaccaatcctttatacggctcctattccaaccacgttctgtaccccgtggccagcatgcgccatctggagctgtgggtcgggtattatatcaggtggaatccgagaatgaagccacaagagccaattcataaccggtacaaggaattgttagctaaacgggctgaactccagaagaaagtcgaagaactgcagagggagatcagtaacagaagcacctcatctagtgaaagggcctcaagccctgctcaatgcgtgacccccgtgcagactgtcgtgtag

SEQ ID NO: 231771 - DNA, 981 bp, synthetic construct
  misc_feature 1..981: note = Description of Artificial Sequence: Synthetic coding sequence
  source 1..981: mol_type = other DNA
atgctggccgttgccctgacaatactgtcagcatccacatcccatagcgagaactccgtccatacgaaatccgcaagcgtggtgagtagcgactccatatcgacgagcgctgacaattttagtcctgacctgcgagtcttgcgggagtccaacaaacttgctgagatggaagaacctccacttttgcccggagagaatataaaggacatggctaaggacgtaacctacatttgtcctttcactggagcggtgcggggaacactaactgtgacaaactatcggctgtactttaaatctatggaacgggatccaccttttgtgctagatgctagtctcggcgtgataaatagagtcgaaaaaatcgggggagcatcgagccggggagagaactcctacggactggaaacggtgtgtaaagacattaggaatctgagatttgcccataagcctgaaggcagaaccagacgcagcatcttcgaaaacttgatgaaatatgcattccccgtgtcaaacaacttgccactcttcgcgttcgagtacaaagaagttttccccgaaaacggctggaaattgtatgaccctcttttggaatatcgacgccagggaatccccaatgaaagctggagaatcaccaaaattaacgagcggtatgagctttgcgatacatacccagccctgctggtggtccctgccaatattcccgacgaggaactgaaacgtgttgccagtttccggagtagaggacgcattccggtgctgtcctggattcaccccgaatcccaggcaaccatcacacgatgcagccagccaatggtgggcgtctctggcaaacggagtaaggaggatgagaaatacctgcaagcaatcatggattcaaacgcccaatcccataaaatcttcatcttcgatgccagaccgagtgtgaacgcagtcgcgaataaggccaagggaggaggatatgaatcagaggatgcttattag

SEQ ID NO: 231772 - DNA, 3513 bp, synthetic construct
  misc_feature 1..3513: note = Description of Artificial Sequence: Synthetic coding sequence
  source 1..3513: mol_type = other DNA
atggatgaggaaacccgccactccctcgagtgcatccaggctaatcagatctttcccaggaaacagttaattcgagaagatgaaaatctgcaggtgcccttccttgaactacacggcgaatctaccgagttcgtcggcagagccgaggacgcaataatcgctctgagtaattacaggctacacattaagttcaaggagagtctggttaacgtgccccttcaacttattgaaagcgtggagtgtcgggatattttccaactgcacttaacttgtaaggattgtaaggttatacggtgccagttctctacgttcgaacagtgtcaggagtggttgaagcgcttgaacaacgctatccgccctccggcaaagatcgaagacttgttctcattcgcctaccacgcatggtgtatggaggtttatgcctcggagaaagagcagcacggtgacctctgtcgcccaggagagcacgtgaccagccgctttaagaacgaagttgagcgtatgggattcgatatgaacaatgcctggcggatatccaacatcaatgaaaagtacaagttatgtggttcgtaccctcaggagctgattgtacccgcatggattacagacaaggagctggagtccgtatcttcctttagaagctggaagaggatccctgcggtgatctaccgccaccagtcaaatggcgctgtgatcgccagatgcggtcagccagaagtctcctggtgggggtggcggaacgccgatgacgagcaccttgttcagagcgtcgccaaagcttgtgccagcgactcaagatcttcaggttccaagcttagcacccgaaacacttctcgggacttccccaacggaggggatttgtcagatgtggagtttgattcttctctcagcaacgcctcgggtgccgagagtctggctatccagccccaaaagttgctgatattggacgctcgcagctatgctgccgctgtggccaatagagctaagggcggaggctgtgaatgtcctgagtactatcccaactgcgaagtggtctttatgggtatggctaacatccattctataagaagatccttccagtctctgcggctgctgtgcactcagatgccagaccccggaaactggctaagtgccctggagtctactaagtggctgcatcatctgagtgtgctcctgaaatctgcactgctggtggtccatgccgttgatcaggatcagcgccctgtcctggtccactgctcagacggctgggatagaacacctcagatagtcgccctagccaagctgttattagatccctactaccgaacgattgagggctttcaggtgctggtcgagatggagtggctggactttggtcacaaattcgcggataggtgcggacatggggagaatagcgatgacctgaacgagcgctgccccgttttccttcagtggcttgactgcgtgcaccagctccagcggcagtttccttgttcatttgagtttaatgaagctttcctggtcaaactggttcagcacacctattcttgcctgtttgggacattcctgtgcaacaacgctaaagaacggggtgagaagcatacgcaggaacgcacgtgctcagtgtggtcactgttgcgcgctggaaataaagcttttaagaatctgctttatagttcgcaaagtgaggctgtgctgtacccagtctgtcacgtgcggaatctgatgttatggtccgctgtatatcttccatgtccctcacccaccacaccagtggacgactcctgtgcaccatatcccgcacctggtactagccctgatgacccccctctctctcgcttgccaaagactcggagctacgacaatctcaccactgcatgtgacaacacagtccctctagctagcaggagatgttccgatcccagcctaaacgaaaagtggcaggaacacagaagatcccttgaattgtctagcctggcaggaccaggggaggatcccttatctgcagactctctgggaaagccaacccgcgttcctggaggagctgagctctccgtggcagccggagttgcagagggccagatggagaacatactgcaagaagctacaaaggaggaaagcggtgtcgaagaacctgctcaccgtgccggtattgaaatccaggagggcaaggaggatcccttgttggagaaggaaagccgcagaaaaacccccgaagccagcgctattggattacatcaagaccctgaacttggcgacgctgccctccgctcgcatctcgacatgagttggcctcttttctcccaaggcattagcgagcaacagtccggcctttctgttctgctgagctcgctccaggtaccacctagaggcgaagattctctggaggtcccggtcgaacagtttcggatcgaggagatagccgaagggagggaagaggccgtgctgcccatccccgttgatgcaaaggtgggctacgggacatcacagtcttgttcgttactgccttcccaagtgccattcgagacacgaggccctaacgtggactctagcaccgacatgctggttgaggataaggtgaagtcagtcagtggccctcaggggcatcaccgttcctgcttagttaatagcggaaaagatcgcctcccccaaacgatggaacccagtccttccgagacgtcactggtggagcgaccacaggtggggtccgttgtgcaccggacctcgttgggatcaaccttgtcgctgactcggagtccctgcgccctccccctcgccgagtgcaaggagggtttggtttgcaatggggcacccgaaactgagaatcgcgctagcgaacagccacccggactctcaacactgcaaatgtatcccactccaaatgggcactgtgccaatggcgaggccggacggtccaaagactccctgtctcgtcagctcagcgccatgagctgctcctcggctcatctgcactcacgtaacctgcaccacaaatggctgcactcccacagcgggaggccttcagctacctcttctcccgatcaaccgtctcgatcccacctggacgacgacggcatgagtgtgtatacagacacaatccagcagcgactcaggcaaattgagagcggccatcagcaggaagtagaaactctgaaaaagcaagttcaggagctgaaatcaagattagagagtcaatatctgacatctagtctgcatttcaacggcgacttcggagatgaggttatgactcgctggctcccagatcacttggccgcacattgttacgcatgtgatagcgccttttggttggccagtcgtaagcaccactgtagagacactgatcgggtcgaccaaacatggaactgcggaaatgttttttgtagcagttgctgcaatcagaaggtgccggtgcctagtcagcaactgtttgagcccagtcgcgtctgtaagtcttgctactcctctctacatcctacttccagcagtatcgacctggagctcgataagccaatcgccgctacaagtaactag

SEQ ID NO: 231773 - DNA, 3486 bp, synthetic construct
  misc_feature 1..3486: note = Description of Artificial Sequence: Synthetic coding sequence
  source 1..3486: mol_type = other DNA
atggacgaggaaacgagacacagtctcgagtgcattcaggcaaatcaaatatttcctcgaaagcagttgatcagagaggacgagaacttacaagtgcccttccttgagctccacggcgagagtaccgagttcgtgggacgagctgaagacgccatcatcgccctgtcaaattatcgtctgcatatcaagttcaaagaatctctggtcaacgtccccctgcagttaattgaaagcgtggaatgtcgggacatatttcagctgcaccttacatgcaaggattgtaaagttatcagatgtcaattctccacattcgaacagtgtcaagaatggcttaagaggcttaataacgctatccggccacccgctaaaattgaggatttgttttctttcgcataccatgcctggtgtatggaagtgtatgcctcagagaaggagcagcatggggatctgtgtcgcccaggagagcacgtcacatctaggtttaagaatgaagtggagaggatgggattcgatatgaataatgcctggcggatctctaatattaatgaaaagtacaagctttgtgggagttatcctcaggagcttatcgtgccggcttggataaccgacaaggagctggaaagcgtttcctcatttagatcgtggaagaggattcctgcagttatataccgccaccagtctaacggggctgtgatcgcccgttgtggccagcccgaagtttcatggtggggttggcgcaacgccgatgacgagcacttggtccaatctgttgcaaaggcctgcgcgtcggattcacggagctctgggagcaaattgtctacacgaaatacctctcgggactttcccaacggaggagacttgtctgacgtggaatttgatagtagcctgtcgaacgccagtggggcagaatctctcgccatacagcctcagaagctgcttatactagacgcccgatcctacgccgcagcagtggctaatagggccaaagggggagggtgcgaatgtccggaatactatcctaattgtgaagtcgtcttcatggggatggccaacatccacagtattagaaggtcctttcagagcctgagactcctgtgtacccagatgcccgacccgggtaattggctctcagcgctcgagagtacgaaatggctccaccacctgtccgtgttgttgaagagcgcacttctcgtggttcacgctgtcgaccaggaccagcgacctgtattggttcattgtagtgacgggtgggatcgtactccacagattgtggcccttgccaaactcttgctggatccttactatagaaccatcgagggctttcaggtgttagtggaaatggagtggctagatttcggccacaaatttgcagacagatgtggccacggagagaacagcgatgacctgaacgagcgatgcccagttttcctgcagtggttggactgtgtgcaccagttacagcgccaattcccttgctcgttcgagttcaacgaagcctttctcgtcaaactcgttcaacacacctactcatgcctgttcggcaccttcctgtgcaataatgcgaaagagagaggcgagaaacacacacaggaacggacctgctcagtttggagcctactgcgcgcaggcaataaagcttttaagaacttactttatagcagtcagagcgaggcggtgttgtatcctgtatgccacgttcgaaacctaatgctctggagtgccgtgtacctcccatgtccgtctcctacaactccggtggacgattcttgtgcgccttaccccgcaccaggaacgagtcctgacgaccctccactctcccggctgccaaaaacacggagttatgataacctgacaaccgcctgcgacaatacggtccctctggcctccaggcggtgcagtgacccatccttaaacgaaaagtggcaggagcaccggagatccttggaactgtccagtctggcaggaccaggcgaagacccgttatccgctgacagtctgggaaagcccacacgggtgcccggaggtgccgaactgtctgtggccgctggagtggcggaaggacaaatggagaacatcctccaggaagcaacaaaagaggagagcggagtcgaggagcccgctcatcgcgcaggcatagagatccaggagggcaaggaagatcccttgctcgagaaagagtctaggcgtaagacaccggaggctagcgcaatcggcctacaccaggaccctgaattaggggacgccgctctcagaagccatttggatatgagctggccgctgttttcccagggcatcagcgagcagcaatccggtctcagtgttctgctttcttcactgcaggtcccacccagaggagaagatagtctcgaggtccctgtggaacaatttaggattgaggaaatagccgagggcagagaagaggccgtcctgcccattccagttgacgctaaggtgggatatgggacatcccagtcatgttccctgttaccctcccaggttcctttcgaaacgcggggtccgaatgtggattcctcaactgatatgctggtcgaagacaaagtgaaatctgtctctggacctcagggccatcaccgctcatgtctggtgaactccggcaaagaccgactcccgcagactatggaaccatcaccttcggagacaagcttggtcgagcgccctcaggtagggtccgttgttcacagaacaagcttgggcagcaccctgagccttactaggtccccttgtgctcttcctttggcagaatgtaaggagggcttggtctgtaatggtgctcccgaaaccgagaatcgtgcgtccgaacagccacccggtcttagtacccttcagatgtatcccacgccgaacgggcattgtgcgaatggagaagctgggagaagcaaagattctctgtcgaggcagctgagcgcgatgtcctgctcctcagcccacttgcacagcaggaatttacaccataaatggctgcatagccatagcggccgtcccagcgcaacttcatcaccagaccagccatcccgctcccacttggacgacgacggcatgagtgtgtatacagacactatccagcagagattgaggcagatcgaaagcggtcatcagcaggaggttgaaactctgaaaaaacaggtacaggagctaaaaagccggctggaatctcagtacctgacctcatctctccatttcaatggagattttggcgatgaagtgatgacacgttggttaccagatcaccttgcagcacactgttatgcgtgcgactccgccttttggctggccagtagaaaacatcactgccgcaactgcggaaacgtcttctgttcttcttgctgtaatcagaaggtccctgtgccctcacaacagctgttcgaaccatccagagtctgtaaatcatgttacagctcactgcaccccacatccagctctatcgatctggagttggataaaccaatcgctgcgacaagcaactag

SEQ ID NO: 231774 - DNA, 3597 bp, synthetic construct
  misc_feature 1..3597: note = Description of Artificial Sequence: Synthetic coding sequence
  source 1..3597: mol_type = other DNA
atggacgaggagaccaggcacagtcttgagtgtatccaagctaatcagatttttccaaggaagcaactaatccgagaagatgaaaatctgcaggtgcccttcctggagctgcacggagaatccaccgaattcgtcgggagggctgaggatgccattatcgctctgtccaactaccgcctccacattaagtttaaggagtccctggtaaatgtgcccttacagctgatagagtcggtcgagtgccgggacattttccaactccacctcacttgtaaagactgcaaagtcatcaggtgtcaatttagcacattcgagcagtgccaggagtggcttaagcgtctgaacaatgctatccgtcccccagccaaaattgaggacctttttagcttcgcttaccacgcatggtgcatggaagtgtatgcgagcgagaaagaacagcatggagacctctgccggcctggggagcacgtcacgtctcgattcaaaaatgaggtcgagcggatggggttcgacatgaacaatgcatggcggatatcaaatattaacgagaaatataagctgtgcgggtcctatccacaggaacttattgtgccagcttggatcacggacaaggagctggaatctgtgagcagctttcggtcgtggaagagaatcccggctgtcatatacaggcaccagtcaaacggagcagtgatagcaagatgtgggcaacccgaggtttcctggtggggttggcggaacgcggatgatgaacatcttgtgcagagcgttgccaaagcgtgtgcctctgactcgaggtcctctggcagtaaactgtccaccagaaatactagccgcgattttcccaatgggggagatttatccgatgtggagtttgattccagcctctctaatgcctcgggtgctgagtctctcgcaattcagccccagaagctgcttatattggacgccaggtcatacgcagcagcggtggccaatcgggcaaaagggggtggatgcgagtgtccagaatattatcctaactgcgaagtggtgttcatgggaatggccaatatacactctatcaggcgatcgtttcagagtttgcggttgctttgcacgcaaatgcccgaccctgggaactggctcagtgcacttgaatccaccaagtggctgcatcacctgtccgttcttctgaagtcagctcttttggtagtgcatgcagtggaccaagaccagcggccagtgctcgtgcactgcagtgacggctgggacaggacccctcagatcgtggccttggctaagctcctgctggatccctactacagaactatagagggcttccaggtcctcgttgagatggaatggctggatttcggacataagttcgcagacagatgtgggcatggagagaacagcgatgatctgaatgaacggtgtccagtcttccttcaatggctcgactgcgtgcatcagttacaacgacagtttccgtgttcttttgaattcaacgaggcattcctggtgaaactggtccaacatacttacagctgcttgtttggaactttcctctgtaataatgcaaaagagcgcggtgagaaacatacacaggagcgaacttgcagcgtttggagcctgctgcgcgctggcaataaggctttcaaaaacctgttatattcatcacaatccgaggctgtcctttaccctgtgtgtcacgtgaggaacctaatgttgtggtcagctgtatatttaccttgcccttcccccactactccggttgatgacagttgcgctccatatcccgcacctgggacatcaccagacgatccacccttatctcggctgccaaaaacacgcagttacgataacctcactaccgcatgtgacaacacagtccctctggcctctcggcgatgttctgatccgtctttgaacgagaaatggcaagagcataggcgctcgctcgaactctcctccctggcgggtccaggcgaggatccactgagtgctgattcactagggaagcctacccgggtgcccggaggggcagagctgtcggtcgctgcaggtgttgccgaagggcagatggaaaacattcttcaagaagctactaaggaagagtccggtgttgaagagccggcacatcgggctgggattgagattcaggaggggaaagaagatcctttactggagaaagaatcaagacggaaaacgcccgaagcctcagcaattggccttcaccaggaccccgaactcggtgatgctgccctgaggtcacacctggatatgtcgtggcccctcttcagccaggggatctctgaacagcagtcaggcctcagcgtgcttctgtctagtctgcaggtcccaccccgtggtgaggactccttggaggtccccgttgagcagtttcgaatcgaggagattgcagaggggcgagaggaggccgtcctccccatccctgtggatgccaaggtaggctacgggacaagccaatcgtgtagtctcttgccatcccaggtgcctttcgagacaagaggacccaatgtggattcttctactgacatgctagtggaggacaaggtgaagagcgtgagcggtccccaggggcatcacaggagctgcttagtgaatagcggcaaggacaggctgccccagacaatggagccgagcccctcagaaacttctcttgtcgagcgacctcaagttgggagcgtggttcacagaactagcctcggaagcaccttgtccttgacaagatctccctgcgcactgcctctggctgaatgcaaggaaggcctggtgtgtaatggggcacccgaaacggaaaatcgcgcatcagaacagccgccagggctgtccaccttgcaaatgtacccaacccctaatggacactgtgctaatggcgaggctgggagatccaaggattcactctcgcgccagctctccgcaatgtcatgcagttcggcgcaccttcacagtcgaaatctccaccacaaatggctgcacagccactcaggccgaccttctgcaacttcgtcacccgatcagcctagtcggtctcatctggacgatgacgggatgtcagtgtatacagacacaatacagcagagattgagacagattgaaagtggccaccagcaagaggtggagacactgaagaaacaggtgcaggagctgaagtctcggttggaaagccagtacctcacctcttctctgcatttcaacggagacttcggagacgaagtaaccagtattcctgattctgagagcaatctggatcagaattgcctgtccagatgttccacagaaatattctccgaggccagctgggaacaggtggacaagcaggacacagaaatgactcggtggctgccagaccacctggctgcacactgttacgcgtgtgattccgcattctggctggccagccgcaaacatcactgtcggaactgtgggaatgtgttttgttcctcatgttgtaaccaaaaggtccccgtgccgagtcagcagttgttcgaaccatcaagagtgtgcaagtcctgctacagctccctccaccccacttcttccagtattgatttggaactggacaaacccatcgctgccacgtcgaattag

SEQ ID NO: 231775 - DNA, 3513 bp, synthetic construct
  misc_feature 1..3513: note = Description of Artificial Sequence: Synthetic coding sequence
  source 1..3513: mol_type = other DNA
atggatgaggaaacgcgacacagccttgaatgtatccaggctaaccagatattccccagaaagcaactgattcgcgaggatgagaacctgcaggtgccatttttggaactgcacggggagtccactgaatttgttggacgggctgaggatgccattatagccctgtccaattatcgccttcacattaaattcaaggagtcattggttaatgtgccgctccagttgatagaatcggtggaatgtcgagatatattccagcttcatctgacctgcaaagactgcaaagtgataaggtgccagttttctacttttgagcagtgtcaggagtggttgaaacgactgaacaacgccatccgcccaccagcaaagattgaggacttattttcttttgcataccatgcctggtgtatggaggtgtacgcctccgaaaaggagcagcacggagatctctgtcggcctggggagcacgttactagccggttcaaaaatgaagtggagaggatggggttcgatatgaacaacgcctggagaatatctaatatcaacgagaagtacaagctgtgcggctcttatccacaggaattaatcgttcccgcttggatcaccgataaggaactggaatccgtgtcaagcttcagatcctggaagcggattcctgccgtcatttacagacaccagtccaatggagcagtcatagccaggtgtggccagcctgaagtcagctggtggggctggcgaaacgccgacgacgagcacctagttcagagcgtggccaaggcttgcgccagtgactcccgctcatccgggtccaaactgtctacacgtaacacctccagagattttcccaatgggggagatcttagcgacgtcgaatttgacagcagcctgtcaaatgccagcggtgccgaaagtctggctatccaacctcagaagctgctgattcttgatgctagatcttatgctgcagccgtagcaaaccgtgccaaggggggaggatgtgaatgcccagagtattaccctaattgcgaagtggtatttatgggcatggcaaatatacatagcattaggcgctctttccagtccctgcggttattgtgtacgcaaatgcctgaccctggcaactggctatcagccttggaatcgacaaagtggctccaccatctgtcagtgttactgaaaagtgcactcctggtggtgcatgccgtcgatcaggatcaacggcctgtgcttgtgcattgttctgatgggtgggacaggacccctcagatcgtcgctctagctaagctgctgctggacccctactaccggaccatagagggatttcaggtcctggtcgagatggaatggttggatttcgggcacaaatttgcggacaggtgcggccatggggaaaactccgatgacttgaatgaacgctgtccagtgtttcttcaatggcttgactgcgtacatcagctccagagacagtttccttgtagctttgaattcaatgaagccttcctcgtgaagctcgtccagcatacctactcatgtctcttcggaacctttctgtgtaataacgccaaggaacgtggtgagaagcacacccaggagagaacttgttccgtatggtcactgttgcgtgctggcaataaagcgttcaaaaatctgctctactcctcccagtcggaagccgttctgtaccctgtctgtcacgtcagaaatctgatgctgtggtctgctgtttatttgccctgtccgtcccccaccacccccgtcgacgatagttgtgctccataccccgctccaggcacatcccccgacgatcctccgctgagcaggcttcccaagaccaggagctacgataacctcacaacagcctgcgataataccgtcccccttgcgtcgagacgctgctctgatcccagccttaacgaaaaatggcaggagcatagaaggagcctggaactgtcctcactggccggtcccggagaggaccctctgagcgcagatagtctcggaaagcctacacgggtaccaggcggagccgagttgtcagtcgctgctggagtcgctgagggccaaatggagaatatcctgcaagaggcaacaaaggaggagtcaggggtggaggagcccgctcaccgggcaggcatcgagatccaggaggggaaggaagaccccctgctcgaaaaggaaagccgtcgaaaaaccccagaagcctccgcaatcggcctgcaccaagatcccgaacttggagatgcagccctgcggtctcatcttgatatgagctggccactgttcagccagggcataagtgagcaacagagtggactgtccgtgctccttagcagtctacaggtgcctccccgtggcgaggacagcctcgaggtccctgttgagcagttcagaatcgaggagatcgctgagggtcgggaggaggctgtgctgcccattccagttgatgccaaggtgggttacgggacttctcaatcctgctcactgctgccttcgcaagtccccttcgaaacaagaggcccaaatgttgattcttctactgatatgctcgtggaggacaaagtcaagtctgtaagtgggcctcaggggcaccacaggtcttgtctggtgaatagtggtaaagatcgactgcctcagaccatggagccctcgccatcggagacatctttggttgagcgccctcaagtcggatccgtggtgcaccgcaccagtctcgggtccaccttatcactgacgcgtagcccctgcgctttgcccctggcggaatgtaaagagggtttagtgtgtaatggcgctcccgagactgagaaccgtgcgagcgaacagcccccagggctgtctaccttgcaaatgtatccgaccccaaatggccattgcgcgaatggagaggcgggtagatcaaaggattctctgtcccgccagctgtcagcaatgtcttgcagcagcgcccacctgcactcacgtaacctgcaccacaaatggctgcattctcactctggcaggccgagcgccacgagctcccccgaccagccctcccggtcacacttagacgacgatgggatgtccgtgtacaccgacaccattcaacagaggcttcgtcagatagagagcggccatcagcaggaggtggagacacttaagaagcaggtccaggagttgaagtctcgcctggagtcccaatatcttactagctccttgcattttaatggcgattttggcgacgaggtgatgacaaggtggttgccagaccatttggccgctcactgctatgcctgtgacagcgccttctggctggcaagccggaaacaccattgtcgtgataccgatagagtcgaccagacctggaactgtggtaacgttttttgcagctcttgctgtaaccagaaagtgcctgtcccttcacagcagctgttcgaacctagtagggtgtgtaaatcctgttattcgagcttgcacccaacctcatctagcatcgaccttgagctggataagccaatcgcagccactagcaattag

SEQ ID NO: 231776 - DNA, 420 bp, synthetic construct
  misc_feature 1..420: note = Description of Artificial Sequence: Synthetic coding sequence
  source 1..420: mol_type = other DNA
atggacgaggagacgaggcactccctggaatgtatccaggccaatcagatattcccccgaaagcagctgattagagaagacgaaaatctacaagtgcctttcttagagttgcacggtgagtcaacagagtttgttggcagggctgaggatgctatcattgccttaagtaactacagactacacatcaaattcaaagagtcccttgtcaatgtgccgcttcaactgatcgagagtgtggaatgtcgtgatattttccagctgcaccttacctgtaaagactgcaaggtgattcggtgccaattttcaactttcgaacagtgccaggagtggctgaagcggttgaataacgccatcagacctcctgctaagatcgaggatctgttttcttttgcctaccacgcctggtgcatggaggtctag

SEQ ID NO: 231777 - DNA, 3588 bp, synthetic construct
  misc_feature 1..3588: note = Description of Artificial Sequence: Synthetic coding sequence
  source 1..3588: mol_type = other DNA
atgggcgaagaaggccctcctagtctagaatatatccaagccaaggacctttttccaccaaaggagctggtgaaggaggaagagaatttacaggtaccgtttaccgttctccagggcgaaggggtggaattcctgggtcgcgcagcagatgctctcattgcgatctccaattatcggcttcacattaaatttaaagactccgtcatcaatgtgccgctgcgtatgatcgactctgtggagtcaagggatatgttccagctgcacatctcttgcaaggatagcaaggtggtgaggtgccatttctcgacattcaagcaatgccaagagtggctctcccggctgagtcgggctacagccagacctgccaaaccagaggacttattcgcttttgcctaccacgcatggtgtctcggcttaacagaggaagaccagcacacccacctatgtcagccgggtgagcatattaggtgccgccaggaagcagagctcgcacgcatgggctttgacctccagaacgtgtggagagtttcacatatcaattccaactataaactgtgcccaagctatccacagaaactgttggtgcccgtgtggattacagacaaggaactggagaacgtcgctagctttcggagttggaagcggatccctgtggtcgtatatagacacctacgcaacggcgcagctatcgcaaggtgctcgcagcccgaaatcagctggtggggatggcggaacgcagatgacgagtacctggttacaagtatcgccaaagcttgcgcactggatcctggcaccagggccaccggcggtagtctcagtaccggaaataatgacacaagtgaagcctgcgatgcggattttgattcctctcttacagcctgttcaggggtagaaagcaccgccgctccgcaaaagctcctgatcctcgacgctaggagttacacggctgcagtagcaaacagagcaaagggagggggttgcgagtgtgaggaatattaccctaactgcgaggtggtgtttatgggcatggccaatatacacgcgattagaaatagttttcaatacttaagggcggtatgttctcaaatgcccgacccaagtaactggctgtctgcccttgagagcaccaagtggctacagcatctgtctgtgatgctgaaagctgccgtgctggtagccaacacagttgaccgggaaggcagaccagtattggtccactgttctgacggatgggatcggactcctcagatagttgccctggctaagattctgttggacccctattatagaactctcgaggggttccaagtgctcgtggaatcagactggttggatttcggccacaaattcggggatcgttgtggacaccaggaaaatgtggaggaccagaacgaacagtgtcccgtgttcctccagtggctcgatagcgtgcatcagttactgaagcagtttccgtgtctgtttgaattcaacgaggcgtttctggtgaaactcgttcaacatacttactcctgtctttacgggacttttttagctaataacccttgcgaaagagaaaaacgaaatatttacaagagaacctgtagtgtatgggctctgctcagagccggaaacaagaacttccataactttctttataccccatcaagtgacatggtcctacacccagtctgccatgtgcgggcactccacctatggacagctgtgtacctgcccgcaagcagtccctgtactcttggcgaggagaacatggacctgtatctgtcccctgttgcccagtcacaggaattctctggtagatccttagatagactcccaaagacccgatcgatggatgatctactgtccgcctgcgatacttcatctcccctcacccgaacgagctccgatccaaatttgaacaatcattgtcaggaggtgcgcgtggggctggaaccttggcatagcaatccggagggcagcgagacctcattcgtcgattccggcgtgggcggtcctcaacagaccgtgggcgaggtgggattgcctcctcccctgccctcttcacagaaagactacctgtctaacaagccatttaagtcccacaagtcctgcagcccgagttacaaactgctgaatactgcagtgccccgagaaatgaagtctaatacaagcgaccctgagatcaaggtgctggaagagactaaaggaccagccccagacccctcagcccaagatgaacttggtagaactctggatggcatcggcgagccaccggagcattgtccagagaccgaagccgtatctgcgttgtctaaagttatctcaaacaagtgcgatggcgtctgcaactttcctgagtcgagccagaacagccctacaggcactccccaacaggcccagccggactccatgctaggagtgcctagtaagtgtgtgctcgatcattccttgagtacagtgtgtaatcccccatctgcggcatgtcagacacctctcgatccatcaaccgatttcttgaaccaagatcccagcggctctgtggcatctatttctcaccaggagcagctatcttcggtgcccgatcttacccatggtgaggaggatatcggaaagcgtgggaacaaccggaatggccaactgctggaaaacccacggtttggaaagatgccgctggagctcgtccgcaagccgatctcccagtctcaaatcagtgagttcagcttcctcggttccaactgggactccttccagggaatggtcacatccttcccaagcggcgaggccaccccaagaagattattgagttatggctgctgctcgaaacggccaaattctaagcagatgagggccacggggccatgcttcggcggtcagtgggcgcagcgggaaggagtgaagagtcccgtgtgcagctcccatagcaacgggcactgtacaggccctggcggtaaaaatcagatgtggctctccagtcaccctaagcaggtctcttccaccaagcctgttcccctgaattgtccttcaccagtgccaccactgtacctcgatgatgacgggttgccttttcccacagacgttatacagcaccggttgcgccagatcgaagccggatataagcaagaggtggagcagctgcgacgtcaggtgagggaactacagatgaggctggatataagacactgttgcgcaccgcctgccgaaccccctatggactacgaagatgatttcacttgtctcaaagaatccgacggctcagataccgaggatttcgggagcgaccactctgaagattgcctgagtgaagcctcctgggagcctgtcgataaaaaggaaaccgaggtaactagatgggtgccggaccacatggcctcacattgctacaactgtgattgcgagttctggctggctaagaggcggcaccactgtcggaactgcggcaacgtgttttgcgctggctgctgtcatctgaagctaccaatccccgaccagcagctgtacgaccctgtgctcgtgtgcaatagctgctacgaacatatccaggtgagtcgggctcgggaactcatgtcgcagcagttaaagaagcctattgctactgcatcttcctag

SEQ ID NO: 231778 - DNA, 570 bp, synthetic construct
  misc_feature 1..570: note = Description of Artificial Sequence: Synthetic coding sequence
  source 1..570: mol_type = other DNA
atgcctgtgtggaaactgccatggaaactcagcgaggggaaaaggcgagcccaggttgaaggggaggatctgttcccggtcgccatcagcttcgggcgtccaaaagaagtcctgcccctttatagcagtgaaagtcatcggtttacagtgctcgagcctaataccgtatctttcaattttaagttttggcgaaacatgtaccaccagtttgacagaacattgcatcctagacaatccgtcttcaatatcattatgaatatgaacgagcagaataagcagctagagaaagacattaaagatctcgagagtaagatcaaacagcgcaagaacaaacagaccgatggtatcctcacgaaagagctcctgcatagcgtccaccccgaaagccccaatttgaaaaccagcttgtgtttcaaggaacagaccttgctccccgtgaacgacgcactccgtacaattgagggctcttcgccggctgataacagatacagtgaatacgccgaagaattctccaagagtgaacccgctgtggtgagcctcgagtacggtgttgcaagaatgacctgctag

SEQ ID NO: 231779 - DNA, 1866 bp, synthetic construct
  misc_feature 1..1866: note = Description of Artificial Sequence: Synthetic coding sequence
  source 1..1866: mol_type = other DNA
atggaacacatccggacaacaaaagtcgagcaggttaaacttctggacagattctcaacgtctaacaaaagcctcacagggactctataccttacggccacacacctgctttttatcgacagccatcagaaggaaacctggattctgcaccaccacatcgcttcagtggaaaaacttgcgttaaccacatcagggtgtccacttgtcattcagtgcaaaaactttcggaccgtgcacttcatcgtgccgagggagcgggattgccatgatatctataattccctccttcaactgtccaagcaggccaagtatgaagacctctatgccttctcctacaaccccaaacagaacgactctgagcgcctccaaggttggcagctaatagacctggctgaagaatacaagcgcatgggagttccaaactcgcactggcagctgagtgacgccaaccgggactacaagatatgtgagacctaccccagagagctctatgtccccagaatagccagcaaacctattatagtgggttcttctaaattccgctctaaggggaggtttcccgttctgtcctactaccaccaggataaagaggcagccatttgccgctgttctcagccactgagtggcttctctgccaggtgcctggaggacgagcacctactgcaggccataagtaaagccaatccggtgaaccggtatatgtatgtgatggatacaagaccaaaactgaacgcgatggcgaaccgggctgcaggaaaaggctacgagaatgaggataactatagcaacatccgattccagttcgtgggcatagagaacattcatgtcatgagatccagcctccagaaactgctagaggtcaacgggaccaagggcctcagcgtgaacgatttttactctggcctcgagtcatctggatggttgagacatatcaaagccgtgatggacgctgccatttttttggccaaggccatcacagtagagaatgcaagcgtgctcgttcactgcagcgacggttgggataggactagccaggtgtgctcacttgggagcttgttgttggattcttactatagaacaatcaagggattcatggttttgatagagaaggactggatctcttttgggcacaagttttccgagcgctgtgggcagctagacggtgaccctaaagaggtatcaccagttttcacccaattcctggaatgcgtctggcaccttaccgagcagttcccacaggcattcgagtttagcgaggcctttctgctacagatacatgagcacatacactcctgtcagttcgggaatttcttggggaattgccaaaaagagcgggaggagctgaaactgaaagagaaaacatactccctttggcctttcctcttggaggaccaaaaaaagtatcttaatcccctttactcatctgaaagccaccggttcaccgttctggaaccaaatactgtgtccttcaattttaagttctggcgaaacatgtatcaccagtttgataggactttacatcctcgacagtccgtatttaacattatcatgaacatgaatgagcagaacaagcagctagagaaagacatcaaagacctcgagagtaaaatcaaacagcggaagaataaacagactgacgggatcctcactaaagaactgctccacagcgttcatcccgagagcccaaatttgaaaacttccttgtgttttaaagagcagacattacttcctgtgaatgacgccctgcgaacaatagagggcagttctccagcggacaatagatactccgaatatgccgaggaattcagcaagtcggagcccgcagtggttagcctcgaatacggtgttgcccgtatgacctgctag

SEQ ID NO: 231780 - DNA, 1647 bp, synthetic construct
  misc_feature 1..1647: note = Description of Artificial Sequence: Synthetic coding sequence
  source 1..1647: mol_type = other DNA
atggaacatattagaactactaaggtagaacaggtcaaacttctggatagattctccaccagcaataagtctctcacaggcactctgtatttaacagctacccatctgctcttcattgatagccaccagaaggagacttggattttacatcaccatatcgcatctgtagaaaaactggcgctcacaacatctgggtgtcctctagtaatccaatgcaaaaacttccggaccgtccactttatagtccctcgtgagcgcgattgccacgacatctataattctctgctccagctctcaaaacaagcgaagtatgaggatctctacgccttctcttacaatccaaagcagaacgactctgagaggctgcaagggtggcagctgatcgatctggcggaagaatacaaacgcatgggagttcccaattcacattggcagctttcagacgccaatagagactataagatttgtgagacatatcctcgcgagctgtatgttccacggattgcgagcaaaccaattattgtcggtagctcaaagttccgcagtaagggccgattcccagtgctgtcctactaccatcaggacaaagaggcagccatatgccgctgctctcagccattgtctggcttctcagccaggtgcctggaagatgagcatctacttcaggctatttctaaagcgaacccagtcaacagatatatgtacgtgatggacactcgccctaaattgaacgcaatggcaaacagggcagccggaaagggctatgagaacgaagacaattactccaatatcaggttccagtttgtcgggattgagaatattcatgtcatgaggtcctccctgcagaaacttctggaagttaatgggactaagggacttagtgtgaacgatttttacagtggcttagaatcctccgggtggctccgccatatcaaagctgtgatggatgccgcaattttcctggctaaagcaataactgttgaaaacgcctccgtccttgtccattgctccgacggttgggacaggacatcccaagtttgctcactcggcagtttgcttctcgactcatactataggaccatcaagggattcatggtactgattgagaaggactggatatccttcggacacaaatttagcgagcgatgcggacagttggacggtgatccgaaggaagttagccccgtattcacacagttccttgagtgcgtctggcacctgacagagcagtttcctcaggcatttgagtttagtgaggccttccttctgcagattcatgagcatatccacagttgccagtttggtaatttcttggggaactgtcaaaaagaaagagaggaattaaagttaaaagaaaagacctactccttatggccgttcttacttgaggaccaaaagaaatacttgaatcccctctattcttctgaaagccaccgctttacagtccttgaaccgaacaccgtctccttcaactttaagttctggagaaacatgtatcatcagtttgatcgcacgcttcaccctagacaatcagtcttcaacatcattatgaacatgaatgaacaaaacaaacagctcgagaaagacattaaagatctcgaatccctgacctcatatagctctttcaagatcatcgtgggccagtag

SEQ ID NO: 231781 - DNA, 1647 bp, synthetic construct
  misc_feature 1..1647: note = Description of Artificial Sequence: Synthetic coding sequence
  source 1..1647: mol_type = other DNA
atggagcacattcgcactacgaaggtggaacaggtcaaattactcgacaggttcagcacttctaataaatcactgacaggcacactttatctcaccgccacgcatctgttgttcattgattcccatcagaaagagacatggatactacatcatcatattgctagtgtggagaagttagctttgacaacctctggctgtccgttagtgatacagtgtaagaattttcgcactgttcattttattgtgcccagggaacgcgattgccacgacatctataacagcctcctacagctcagcaaacaggctaaatacgaggatctgtatgcgttctcttataaccccaagcagaacgattctgagcggctgcagggctggcagctgattgacctggctgaggaatacaaacgcatgggtgtgcctaattcccactggcaactaagtgatgccaacagagactataaaatttgcgaaacttaccccagagagctgtacgtgccccgaattgcctcaaagcccatcatcgttggaagcagcaagttccgctcgaagggtaggttcccagtcctgtcttactaccaccaggataaggaagccgctatctgccggtgctctcagccgcttagcggcttcagcgcacgctgcctggaggatgagcatctcctgcaggcaataagcaaggccaatcccgtaaacaggtacatgtatgttatggacacaagacccaagctaaacgccatggccaaccgtgccgcaggaaagggttacgagaacgaggacaattatagcaatatcaggtttcaattcgtgggaatcgagaatatccacgttatgcgctcctctctccagaagttgctggaagtgaatggtacaaaaggcttgagcgtaaacgacttctactccggcctcgagtcctccggctggctgcggcacatcaaagccgttatggatgctgcaattttcctcgctaaggccattaccgtggagaacgcgtccgtcctggtgcattgctcggatgggtgggataggaccagtcaggtctgctccttggggtccctgctgttggacagctattatcggaccatcaagggcttcatggtgctgatcgagaaggactggatctcttttggtcacaagttcagcgagcggtgtgggcagcttgatggtgatcccaaagaagtatcccccgtttttactcagttcctggaatgcgtttggcaccttacggagcagttccctcaggcctttgagttcagtgaagccttcctgctacagatccacgagcacatccactcttgccagtttggcaatttcctgggaaattgccagaaagagagagaggaactgaagttgaaggagaagacatacagtctgtggccgtttctgcttgaggaccagaagaagtacctaaatccgctgtacagttcagagtcccatcggttcactgtgctcgagccgaatacggtgtcttttaatttcaagttctggagaaacatgtaccatcagttcgaccgaacactgcatccccgtcaatcagtctttaacatcatcatgaacatgaacgagcagaacaagcagcttgaaaaggacattaaggatctagaatcattcactagtttcgcagctgcgagagttattcagggccagtag

SEQ ID NO: 231782 - DNA, 1983 bp, synthetic construct
  misc_feature 1..1983: note = Description of Artificial Sequence: Synthetic coding sequence
  source 1..1983: mol_type = other DNA
atggaacatattagaactccgaaagtggagaatgttcggttggtggatagagtttccccaaagaaggcggctctcgggacattatacctgactgcaacgcacgtcatcttcgtggagaattctcccgatcccaggaaagaaacatggattctgcactcacagatttcaacgatagaaaagcaggccactaccgccaccggctgccccctgttgattcgctgcaagaatttccaaataatccagctcatcatccctcaggaacgcgattgtcatgatgtgtacatctcgctaatcaggttggccaggcccgtgaaatacgaggagctgtattgcttttccttcaatcctatgctggacaaagaggaacgtgagcagggatgggtgctcatagatctgtctgaagagtatacgcgtatgggtctccccaaccattactggcagttgtcggacgttaatagggactatcgggtatgcgattcgtatcccacagaactgtacgtgcccaagtctgcaactgcccatattatcgtcgggagctccaaattccgatcccgacgacgcttccctgtgctgtcatactattacaaggataaccatgcaagcatttgccgcagcagtcagcccttaagcggatttagtgcccgttgtctcgaggacgagcagatgctgcaggcaattcgaaaggcaaatcccggtagcgactttgtgtacgtagttgacacccgaccaaaacttaacgccatggcaaatcgggcagccggaaagggctatgaaaacgaagacaattattcaaatatcaagttccagttcattgggattgaaaacattcatgtgatgcgcaatagcctgcaaaagatgctcgaggtctgcgaactgaagtctccatccatgtccgatttcttgtggggactggagaactcaggctggcttaggcatattaaagctattatggacgctggcattttcattgctaaggctgtgtcagaggaaggcgcatctgtgctggtccactgctcggacgggtgggatagaacagcccaggtgtgctctgtcgctagtctcttactggatccccattacagaacgttaaagggtttcatggttctgattgagaaagactggatttctttcggacacaaattcaaccatagatatggcaaccttgacggagatcccaaggaaatcagtccagtgattgaccagttcatcgaatgtgtctggcagctgatggaacaatttccttgtgctttcgaattcaatgaacggtttctcatccacatacagcaccatatatactcatgccagtttgggaacttcctctgcaactcccagaaagagaggcgcgagctaaaaatccaggagagaacctactcattatgggctcatctttggaagaaccgcgcagactatctgaatcctttatttcgagccgatcattcccagactcaagggaccctgcaccttcctaccacaccctgtaactttatgtacaagttttggtccggcatgtataatcgatttgaaaaggggatgcaacccaggcaatctgtaacggattacctcatggctgtaaaggaagaaacccagcagctggaagaagaattagaggcacttgaagaaagactggaaaagatccagaaggttcagctgaactgtactaaagtaaaatccaagcagtccgagccgagcaaacactcagggttttctactagcgataattccatagcaaacactccccaggactactcaggcaacatgaagtcatttccttcacggtccccttcccagggggacgaggacagcgccctgattctgactcaagataacctgaaaagctccgatccggatcttagcgctaacagcgatcaagagtcgggagttgaagatctgagctgtcgctcacccagcggaggagaacacgccccttcggaagatagcgggaaagatcgggactccgacgaggctgtttttctgaccgcatag

SEQ ID NO: 231783 - DNA, 756 bp, synthetic construct
  misc_feature 1..756: note = Description of Artificial Sequence: Synthetic coding sequence
  source 1..756: mol_type = other DNA
atggagcaattcccttgtgcttttgaattcaacgagagattcctgatccatatccagcaccatatctattcttgtcagttcggtaacttcctttgtaactcccagaaggaacggagagaacttaaaattcaggagcggacctattcactttgggcccatctttggaagaaccgggctgattacttgaacccactgtttcgcgcagaccattctcagactcaaggcaccctccatctgccaaccacgccttgtaacttcatgtacaagttctggtccggcatgtataatcgctttgaaaagggcatgcagcccagacaatcagtcaccgactatctgatggcggtgaaagaagaaactcagcagcttgaggaggagctcgaggccctcgaagagaggctggaaaagattcagaaggtccagctgaactgcaccaaggtaaagtccaagcaaagtgagcccagcaagcattcagggtttagcacaagcgataatagcattgctaataccccgcaggattactcaggcaatatgaagtcctttccctctagatcgccatcgcaaggagacgaagatagcgccctgattctgactcaggataacctgaaatctagcgacccggatctctcagctaattcagaccaggagtccggcgtggaagatctgtcctgccgctctcccagcggtggggagcacgcccctagcgaggactctggtaaggaccgcgactcagacgaggcagttttcttaaccgcctag

SEQ ID NO: 231784 - DNA, 1668 bp, synthetic construct
  misc_feature 1..1668: note = Description of Artificial Sequence: Synthetic coding sequence
  source 1..1668: mol_type = other DNA
atggaacacatcagaactcctaaagtagagaatgtcagactggtggaccgggtgtcaccgaagaaagcagctctcggtaccctgtacctgactgcaacacacgtaatattcgtcgaaaactcaccggacccacggaaggagacgtggatcctgcacagccagatttcgacgatcgagaaacaggccaccacggccactggatgccccttgctgatcagatgtaagaacttccaaattattcagctgattattccgcaggaacgtgactgccacgacgtgtatattagtctgataagactcgccaggccagtgaaatacgaggagctctattgtttctcgttcaatcctatgctcgataaagaggagagagagcagggttgggtcctgatagatctgagtgaagagtacacaaggatgggactgccgaaccattactggcaattaagtgacgtaaacagagactatcgcgtttgtgactcataccccaccgagctctacgtccccaagagtgccactgctcacataattgtggggagttcaaaatttcgctctcggagaagattccctgtgctgtcctactattataaagataaccacgcctcgatttgtcgttcttctcagcctctgtccggtttctccgccagatgcctggaggatgaacaaatgttacaagccattcgtaaggcgaaccctggaagcgattttgtttatgtcgtggacactcgcccaaaactgaatgccatggcaaaccgcgcagccggtaagggctatgagaacgaggacaactacagtaacatcaagttccagttcattggaattgaaaacatacacgtgatgaggaacagtttgcagaagatgctcgaagtttgcgagttgaaatcaccgtccatgtctgacttcctctgggggctcgaaaatagcggctggttgagacacataaaagctatcatggatgccggaatctttatcgcaaaagcagtaagcgaggaaggagcctctgtcctagttcattgctctgacgggtgggaccggacggctcaggtttgcagtgtggcatcactgctgctggacccccactacaggaccttgaaaggttttatggtgttgatagaaaaggattggatcagcttcggccataagttcaaccataggtacggcaatttagacggggatccaaaagaaatttcccccgtcattgatcaatttatcgagtgcgtgtggcagcttatggagcagtttccgtgtgccttcgagttcaatgagaggttcctcattcatatccagcatcacatttactcttgccaattcggaaacttcctgtgcaactcccagaaagagcgccgagagctgaagatacaggaaagaacttattccttgtgggcgcacctgtggaaaaatagagccgactaccttaatcctctgtttagagccgaccactctcagacgcagggtacactgcacctacctactacgccatgcaatttcatgtataaattctggtctggcatgtacaaccggtttgaaaaagggatgcaaccacgtcaaagcgtcaccgactatctgatggcagttaaggaagaaacccaacagcttgaagaagagctcgaggcccttgaagaggtgcgccatacatgcttcgtgaacctgttttctgtgctgatctcctag

SEQ ID NO: 231785 - DNA, 1773 bp, synthetic construct
  misc_feature 1..1773: note = Description of Artificial Sequence: Synthetic coding sequence
  source 1..1773: mol_type = other DNA
ctggatcttctggtgccaaaggttgagaacgttaagctagtggatagatacgtgtctaaaaagccagccaacggtattctctatctgaccgctacgcatctcatttatgtcgaagccagcggcgcagccaggaaagaaacctggattgccctgcatcatattgcaacagtcgaaaaactcccgatcactagcctgggctgccctcttacactcaggtgtaaaaattttagagtggctcactttgttcttgactccgatttggtgtgtcacgaagtctatatctcactccttaaactgagccaacctgcactgcctgaagacctgtacgcattcagctataatccaaaaagctcgaaggaaatgagggagagcgggtggaagctaatcgatccaatcagtgatttcggaaggatgggtatccccaatagaaactggactataacagacgccaatataaggtttcgttttatgggcatagagaacatacacgtcatgagaagttccctccagaagttgttggaagtgtgcgagctaaagacccctactatgagtgagtttcttagcgggttagagagctccgggtggctgcgccacatcaaagccatcatggatgcaggaatcttcataaccaaagctgtaaaagtcgagaaggcgagcgtgttggtgcactgttctgatggctgggataggacggcacaagtgtgttccgtagcctcaattcttcttgatcctttttaccgtacctttaagggattgatgatattgatagagaaagaatggatttcgatgggacacaagttcagtcaacggtgcggccacctcgatggcgattcaaaggaagtctcacctatcttcactcagtttttggactgtatctggcagttaatggaacaattcccatgtgctttcgagttcaatgagaacttcctgttagagatccatgaccacgtgttttcatgccagttcgggaattttctcgggaactgtcaaaaggacagggaggatcttcgcgtatacgagaaaacgcactccgtgtggccattcctcgtccaaaggaaacccgattttcgtaaccccctgtacaaaggattcaccatgtacggtgtgctcaatccgtccactgttccctacaacatccagttctggtgtggcatgtacaatcggtttgacaagggcctccaacccaaacagagcatgctggagtccctgctcgaaattaagaagcagcgagctatgttggagacagacgttcatgaacttgaaaagaagctgaaggttagggatgaaccacctgaagaaatatgcacgtgttcccagctgggcaacatcctgagccagcatcttggctctccattgactaatcccctgggatttatggggattaatggtgacctaaacacccttatggagaatggcacgctcagtagagagggtgggctgagagcccagatggatcaggttaagtcccagggggctgacctccatcacaattgctgtgaaattgtgggaagtttgagggccattaatatcagcggtgacgtgggcatctcagaagcaatgggaatcagtggcgacatgtgtacttttgaggcaaccggattctctaaggacctggggatctgtggggctatggatatatctgaagctacgggcatcagcggcaatctgggcatcagcgaggctcgcggtttctctggggatatgggtattctgggcgatacaggaatatccaaagccagtaccaaggaggccgactattccaaacaccagtag

SEQ ID NO: 231786 - DNA, 2115 bp, synthetic construct
  misc_feature 1..2115: note = Description of Artificial Sequence: Synthetic coding sequence
  source 1..2115: mol_type = other DNA
atggaccatattaccgtacctaaagttgaaaatgttaagctggtggatcgctacgtgagcaagaagcctgcgaacggaatactgtacctgaccgctacacatctgatttatgtggaagcttcgggagctgcgagaaaggagacctggatagcattgcaccatatcgcaactgtggagaagcttcctattacgtccttgggatgcccactgacgctcagatgcaaaaactttcgcgttgcgcattttgtactcgatagcgatctagtgtgtcatgaggtctatatctcactgctgaaactcagccagcccgctctgcctgaggatctgtatgcattttcatataaccctaagagttccaaggaaatgcgggaatctggctggaaactgatcgatcccattagcgactttggcagaatgggcatccctaatagaaactggactataactgatgctaatagaaactacgaaatctgttccacgtatccacccgaaattgtagttccgaagagtgtgaccctgggtactgtggttggttcgagtaaattcaggtctaaggaaagagtccctgtcttatcatacctttataaagaaaacaatgcagccatttgcaggtgctcccagcccctgtcgggtttctatacccgatgtgtagacgatgaactcctgctggaagctatcagccagacaaacccgggaagccaatttatgtatgtagtggacacaaggcctaagttgaacgccatggccaacagggcagccggaaagggttacgagaatgaagataactacgccaacatcagattccgattcatgggaatagagaacattcacgtcatgcggtcatcactgcagaagcttttggaggtgtgcgagctgaaaacccctaccatgtctgaatttttatccggtttggagagttcgggctggctgcggcacattaaggcaatcatggacgccggaatatttatcaccaaagctgtgaaggtggaaaaggcctctgtgctggtgcattgttctgacggctgggacagaaccgcccaggtgtgctctgtcgcatctatcctgctggatcctttctacaggaccttcaaaggtctgatgatcctcattgaaaaagagtggatctccatggggcacaagtttagccagcgatgcgggcacttggacggcgacagcaaggaggtgagcccgattttcactcagtttctggactgcatatggcagctgatggaacaattcccgtgcgcattcgaatttaatgagaacttcctgctggaaatccatgatcatgtgttctcttgtcagtttggcaactttttgggaaactgccagaaggacagggaagatctaagggtttacgaaaagacccatagtgtctggccttttctggtgcaacgcaaacctgatttccgcaatcctctgtataagggcttcacaatgtacggggtgttgaatccatctaccgtgccatataacatccagttttggtgcggcatgtataaccgcttcgacaagggcctgcaaccgaagcaatccatgctcgaaagtctactagaaattaagaaacaacgtgccatgctggaaaccgatgtgcacgaactcgagaagaaactgaaagtgcgtgatgagcctcccgaagaaatctgtacctgttctcagttgggaaatattctgtcgcagcatctgggatccccactgaccaatcccctcggctttatgggcatcaatggcgacctaaatacactcatggagaacggcaccctctcacgggagggcggactgcgcgctcagatggaccaagtgaagagtcagggggcagacctccaccataactgttgcgagatagtggggagcctaagagcaatcaacataagtggcgacgtcggaatctccgaggctatgggtatttccggggacatgtgcacgtttgaggccacaggtttctccaaagacttaggcatctgcggcgctatggacatcagcgaggccacaggaatatctgggaacctgggcatttccgaagctcgcggtttcagtggcgatatgggcatattgggcgacaccggcatttcaaaggcctcgacaaaagaagcagattacagcaagcatcagtag

SEQ ID NO: 231787 - DNA, 1527 bp, synthetic construct
  misc_feature 1..1527: note = Description of Artificial Sequence: Synthetic coding sequence
  source 1..1527: mol_type = other DNA
tgagattccgatctggtttgccacgaggtttatataagccttcttaaactgtctcagcccgctttacccgaggatctttatgccttctcatacaatcctaaatcatctaaagaaatgcgggagagcggttggaaactcatcgacccaatctcggatttcggcagaatgggcataccgaacagaaattggaccattacagatgctaatataagattccggttcatgggcattgaaaatattcacgtgatgaggtcaagcctgcagaagctgctcgaggtgtgcgagctgaaaactccaactatgagcgagttcctaagcggtctggagagctcaggctggctcagacacatcaaggctattatggatgcaggcatatttattactaaggccgttaaagtagagaaggcctctgttctcgtgcattgctctgatggctgggatcggaccgcccaagtttgctcagtggcaagtattcttcttgaccccttttaccgcaccttcaaagggctgatgatccttatcgagaaagagtggatttctatgggacataagttcagtcagcggtgcggtcacttggatggcgacagcaaggaagtgtccccaatctttacacagtttctggactgtatttggcaactaatggagcaatttccctgtgcctttgaatttaacgaaaattttcttctggagatacatgaccacgtgtttagctgtcagttcggtaatttccttggtaactgccaaaaggaccgggaggacctgcgcgtctacgaaaagacacactcggtgtggccctttctggtccagagaaaaccagactttcgtaatcctctgtacaaaggctttacaatgtacggcgtgttaaatcctagcacagtcccctacaacatccaattttggtgcggcatgtacaaccggttcgacaagggcctgcagcccaaacagtctatgctggagtcacttctcgagatcaaaaaacagcgggcaatgcttgagacagacgtgcatgaactggaaaaaaaactgaaagttagagacgagccccctgaggaaatctgtacatgctcccaacttgggaatatactttcacagcatctcggtagccccctcacgaaccccctcggtttcatgggtatcaacggtgatctgaatactctcatggagaacggaaccctgtcccgagaggggggtctgcgagctcagatggatcaggttaagagccagggcgctgatctgcaccacaattgctgcgagatcgtcggttccctgcgggcaatcaatatcagtggggacgtgggtatcagcgaagctatggggatcagtggggacatgtgtacctttgaagctacaggcttttctaaggatcttggcatctgcggcgcaatggacattagtgaagcaacagggattagcgggaacctagggatttcagaggctagaggattcagcggggatatgggcattctgggcgacaccggaatctctaaggccagcacaaaagaagccgactattcaaaacaccagtag

SEQ ID NO: 231788 - DNA, 2082 bp, synthetic construct
  misc_feature 1..2082: note = Description of Artificial Sequence: Synthetic coding sequence
  source 1..2082: mol_type = other DNA
atggatcatattaccgtaccgaaagtagagaacgttaagttagtggatcgttatgtctcaaaaaaacccgcaaacgggattctgtacttgactgccacccatctcatatatgtcgaggcttctggcgctgcaaggaaagagacttggattgctctgcatcatatcgcaacagtggagaagctgccaattacttccctgggatgccctttgacacttcgatgcaagaacttccgggtagcccatttcgtgctcgacagtgatctggtttgtcacgaagtatacatcagcctacttaaattgtcccagcccgctcttcccgaggacctttacgcttttagttacaacccaaagagcagcaaggaaatgagagagtccggttggaaattaattgaccctatcagcgattttgggcgtatgggcattcctaaccggaactggaccatcacggatgccaatcgtaattacgaaatatgtagtacctaccccccagagatcgttgtgccaaaaagcgtcactctgggtaccgtcgtcggctctagcaaattccgctcgaaggagagagtgccagtgttatcctatctgtacaaggagaataacgccgcaatctgccgatgtagtcagcccctgtctggtttttatacccgctgtgtggatgatgagctgctcctggaggcaatctcccagacaaaccctggttcgcaattcatgtacgtcgtagacacacggcctaaattgaatgctatggcaaatcgcgcagccggtaaagggtatgaaaacgaggataactacgctaatattaggttcaggttcatgggcatagagaacattcacgtgatgcgttcctcactacagaagcttctggaggtctgtgagctgaaaacacctactatgagcgaatttctcagcggcctagagtcaagcggctggctccggcacatcaaagcgataatggatgctggtatttttatcaccaaagctgttaaggtcgaaaaagcatctgtgctcgtccattgcagcgatggctgggatcggacagcccaggtgtgttcggtcgccagtattctcttagacccattctacaggacttttaagggcctgatgatctggcacttcctggtcttgatcatgagaattgtgctgcagttagctaagatgaatctgatggatatcactaagatcttcagcctgctgcaaccagacaaggaggaggaggataccgacacagaagaaaagcaggccctcaatcaggcggtgtacgataatgatagctacacccttgatcagctgctcagacaggaaaggtataagcggttcatcaacagcagaagcgggtggggggtgcccggaactccccttcggctggctgcctcctatgggcatttgtcttgcttgcaggtgttgctagcccacggcgcagatgtggattccctcgacgtcaaggctcagactcctctgttcaccgccgtttcacacggacaccttgactgcgtgcgtgtactgctggaagccggagcctcacctgggggaagtatctataataattgcagcccggtccttaccgccgctcgcgatggagcagtggcaattttgcaggagttgctcgatcatggggctgaagctaatgtcaaggccaagctgcctgtgtgggcctccaatatagcgtcctgctcagggcctttgtacttggctgctgtgtatggacatcttgactgtttccgactactcctcctgcacggcgctgatcctgattataactgcacagatcagggccttctcgcacgggtcccacgccctcgcaccctgctcgaaatttgccttcatcataactgtgagcccgagtacatccagctgctgattgacttcggcgcaaatatctacctgccttccttgtccttggacttgacttctcaagatgataagggaattgccctcctgctgcaagctagggccacaccaagatctctactctctcaggtgcgtttagttgttcgtcgagccctgtgccaagccggacagccccaggcaatcaatcagctggacatcccacctatgctaatttcatacctcaaacaccaactctag

SEQ ID NO: 231789 - DNA, 861 bp, synthetic construct
  misc_feature 1..861: note = Description of Artificial Sequence: Synthetic coding sequence
  source 1..861: mol_type = other DNA
atgggaggagagcgttctggcgtcaggggaaacaaaatggcagcagctgagccctcacccaggcgggtcggcttcgttggagctgggaggatggcaggagcgattgcccaaggcctgattcgcgctgggaaggttgaggcccagcatatccttgcttccgctcctaccgataggaacctgtgccatttccaggcactcggatgccgcactacacactctaaccaggaggtgctgcagtcctgtttgctcgtgatctttgccactaagccgcatgtgctgcccgctgtccttgccgaggtggcccctgtggttactaccgagcacatcctcgtaagtgtcgccgcaggggttagtctttccacattggaagaactattgccaccaaacacccgtgtgctccgcgtgctgcctaacctcccctgcgtggtgcaagagggggcaattgtcatggcacgaggtaggcatgttgggtcttccgaaactaaacttctacagcacctcctggaggcatgtggcaggtgtgaggaggttccagaggcctatgtagacatccacacaggattgtctggcagtggagtcgcatttgtgtgtgcttttagcgaggcgcttgcagagggcgcagtgaagatgggaatgccatcttctcttgcacatcgtatcgcagcccagactctcttaggaactgccaaaatgctactgcatgagggtcagcatcctgctcagctgcgctcagatgtttgcactcctggagggactaccatctatggtctccacgcgctcgaacaggggggactaagggccgcaaccatgagtgctgtggaggccgcaacttgtcgggcaaaagagctgagcaggaaatag

SEQ ID NO: 231790 - DNA, 900 bp, synthetic construct
  misc_feature 1..900: note = Description of Artificial Sequence: Synthetic coding sequence
  source 1..900: mol_type = other DNA
atgccactatctggaactcccgctccaaataagaaaagaaagtcatccaagcttatcatggagctgactggagggggtcaagaaagcagtggattgaacctgggcaagaaaatctctgttcctcgagatgtgatgttagaggagctgagcctgctgacgaatcggggatccaagatgtttaagttgcggcagatgagggtggaaaagttcatatacgaaaatcaccctgacgtcttttctgacagtagcatggatcactttcagaagttcctcccaaccgtcggcggtcagcttggaacagctggccaggggttctcgtactctaaatccaacggcaggggtggctcccaggctggaggatcggggtccgctggtcagtatggctccgatcagcaacatcacttaggcagcggctccggagccggtgggaccggcggacccgcaggacaggctggtcgaggcggtgccgcagggacagcaggtgtaggtgaaaccggctcaggcgatcaggctggaggggaaggcaaacacataaccgtcttcaaaacgtacatctctccttgggaacgtgccatgggcgtggaccctcagcaaaagatggaattgggcatcgatctactggcctacggcgctaaagcggaactgcccaaatacaaaagtttcaacagaaccgcgatgccttacgggggttacgagaaagcctcaaaacgaatgactttccagatgcccaagtttgacttgggccctttgctttccgagcctttggtgctttataaccagaatctctccaatcgtccctcctttaatcgcaccccaattccatggctttcatcaggtgagcccgtagactacaatgtagatatcggcataccgctggatggggagactgaagagctttag

SEQ ID NO: 231791 - DNA, 795 bp, synthetic construct
  misc_feature 1..795: note = Description of Artificial Sequence: Synthetic coding sequence
  source 1..795: mol_type = other DNA
atgttgagtcacaacaccatgatgaaacagcgcaagcagcaggccaccgccatcatgaaggaagtacacgggaacgacgtcgacggcatggacctgggaaagaaagtgtcgattccccgtgacatcatgttagaggagctgtcccatctctccaatcgcggagccagattatttaaaatgcgccaaagacgatctgacaagtacacctttgagaactttcagtaccagagcagagcccagattaatcactccatcgccatgcagaatggtaaggtcgacggctcaaatctggagggagggtcccaacaggcccctttgacgccgcctaatacgcctgatcccagatccccacctaatcctgacaatatcgcccctggctatagcggaccactgaaggaaataccccctgagaagttcaatacaaccgccgtgcctaagtactaccaatccccctgggagcaagctatctccaacgatcctgaactgttggaagccctctaccctaaactattcaagcctgagggaaaggctgaattgccagattataggtcttttaaccgcgttgccactccatttggtgggtttgagaaggcgtcacgcatggttaaatttaaggtgcctgatttcgagctgctcctccttacagatccacgctttatgtctttcgttaacccgctttcaggccgtaggagtttcaatcgcacacctaagggatggatcagcgaaaacatccccatcgttatcactaccgagcctaccgatgataccaccgtgcccgaatctgaggatctgtag

SEQ ID NO: 231792 - DNA, 756 bp, synthetic construct
  misc_feature 1..756: note = Description of Artificial Sequence: Synthetic coding sequence
  source 1..756: mol_type = other DNA
atgatccccaaggagcagaagggccctgtgatggccgcaatgggagatctaaccgagcccgtgccaaccctggacctcgggaagaaactcagtgtcccccaggaccttatgatggaggagctcagtctgcgtaataaccgcggatcgctcttgtttcagaaaaggcagcgcagggtccaaaaattcaccttcgaacttgccgctagtcagagggccatgctggcagggagtgcaaggcggaaagttaccggaactgctgagagcggcactgtcgcaaacgcaaacggcccagagggaccaaattataggagtgaactccacattttcccagcctcccctggcgctagtttgggtggcccagaaggcgcacaccccgctgctgcaccagccggatgtgtcccatccccttctgcactcgcacccggatacgcagaaccgctgaagggggtcccaccggagaaatttaaccacactgccatatctaagggctataggtgcccatggcaggagttcgtttcatatagagactatcagagcgatgggagatctcacaccccttcacccaatgattaccgaaactttaacaaaactcccgtccccttcggcggtccgctggtgggcggtacattcccacgaccaggcaccccctttataccggagcccctgagcggattagaacttcttagactcagaccgagctttaatagagtggcccagggatgggtgcggaatctacctgaaagcgaggagctgtag

SEQ ID NO: 231793 - DNA, 756 bp, synthetic construct
  misc_feature 1..756: note = Description of Artificial Sequence: Synthetic coding sequence
  source 1..756: mol_type = other DNA
atgatcccaaaagaacagaaaggccctgtgatggccgctatgggtgatctgacagagcccgtgcccactctcgatctcggaaagaagctcagtgtcccacaggacctgatgatggaggaactctcactgagaaacaacaggggatccctcctttttcaaaagaggcaaaggcgcgtccaaaagtttacctttgaacttgctgctagtcagagagcgatgttggccggttctgctaggagaaaggtgaccggcactgccgagtccggtactgtggccaatgcaaacggccctgagggcccaaactacagaagtgaactacatatctttcctgcctctccaggcgcatcacttgggggtcctgagggagctcaccctgccgcagctcctgcaggatgcgtgccgagtccttccgcccttgctcctggctacgcagagccactgaaaggcgtgcccccagagaaatttaatcacacagccatctccaaaggttaccgctgcccctggcaggaatttgtgagttaccgtgactaccagtctgatggacggagtcacacaccaagccctaacgattatcggaactttaacaagactcctgtcccttttggagggccactagtgggaggcactttcccgagaccaggtacaccctttatacccgaaccactatccggactagagctattacgactgaggccctcctttaaccgcgtggcgcaggggtgggtgcgaaacctccccgagtccgaagaactgtag

SEQ ID NO: 231794 - DNA, 1989 bp, synthetic construct
  misc_feature 1..1989: note = Description of Artificial Sequence: Synthetic coding sequence
  source 1..1989: mol_type = other DNA
atggtggtgtccgaagtggacatcgctaaagccgatccagctgcagcatcacacccattactgctcaatggcgacgctaccgttgcacaaaagaatccaggctcagtggcagagaacaacttatgctcccagtacgaggagaaagtgcggccttgcattgaccttatcgacagtctgcgggcactgggtgtcgagcaagatctcgccctgcctgccatagcagttattggcgatcagtcgtccggaaaatctagcgttctagaagccctcagtggtgtcgcactgcctcggggatccgggatcgtgacacgctgcccactagtactgaagttaaaaaagctggtaaatgaagataagtggcgtggaaaggtgtcttaccaggactacgaaattgagatttccgacgcttcagaagtcgagaaggagatcaacaaggcccaaaacgccattgcaggtgaaggtatgggtatttctcatgaactaatcaccctggaaatttcttccagggatgtgccggaccttaccttaatcgatctcccagggatcaccagggtggctgttggaaatcagcctgccgacatcggctacaaaattaaaacactgatcaagaaatatatacagcggcaggaaacaatctcactggtggtggtgcccagcaacgtcgacatcgccacaacagaggcgctgtccatggcgcaggaggttgacccagagggcgaccggacaatcggcatcctgacgaaacccgacctggtggacaaggggacagaggataaggtggtggatgtggttcgcaatttggtgttccatctgaagaagggctacatgattgttaaatgtcgtggccagcaggagatccaggaccagctctctctatcagaggccctgcagagggagaaaatcttcttcgagaaccacccttacttccgcgacctcctggaggagggcaaggctaccgtcccctgcctggctgagaagctcacgtccgagcttatcactcatatttgtaaatctctccccctcctggaaaatcaaattaaagaaactcaccagcgtattacagaagaactccagaagtacggcgtggacatcccagaagatgaaaacgaaaagatgttctttttgattgacaaggtaaatgcgttcaatcaggatatcaccgcactgatgcagggcgaagaaacagtgggagaggaggacattcgattatttacccggcttaggcatgaatttcacaagtggagtaccattattgagaacaattttcaagaaggccacaagattctgtctcggaaaatccaaaaatttgaaaatcagtatcggggtcgagagttgcccggtttcgttaattaccggacatttgagacaatcgtcaaacagcaaattaaagcgctcgaagagcctgcggttgatatgctgcacaccgttaccgatatggtgaggttggccttcactgatgtatccatcaagaacttcgaggagttttttaatctacaccggacggccaaaagtaagatcgaagacatacgagccgagcaagagcgggagggagagaagctcatcaggctgcatttccagatggaacagattgtttactgccaggatcaggtgtataggggagcgctgcagaaagtgagggagaaggagcttgaggaggaaaagaagaagaaatcttgggattttggtgctttccagtcttcttccgccactgattcatcgatggaggagattttccagcatctgatggcataccatcaggaggcgagtaagcggatctcctcccatatacctctgatcatacagttcttcatgcttcagacgtatggacagcagctacagaaggccatgctccagctgctccaggataaagacacttattcctggctgctcaaggagcgttccgatacatctgacaaacggaagtttctcaaggagcgcctcgcgcgactcactcaggcaaggaggaggctggcccagttccctggctag

SEQ ID NO: 231795 - DNA, 1989 bp, synthetic construct
  misc_feature 1..1989: note = Description of Artificial Sequence: Synthetic coding sequence
  source 1..1989: mol_type = other DNA
atggtggtgagtgaggtcgatattgccaaagccgatccagcagcagcaagccatcccctgttattgaatggcgatgccactgtggctcagaaaaacccagggtctgtggccgaaaacaacctctgcagtcaatatgaggaaaaggtgcggccatgcatcgacctgatcgactccctccgggctctgggcgtcgagcaagatttggcattgccggctattgccgtgataggggatcagagctcaggtaagagcagtgtcctggaggcgttatcgggagtggctcttccaagaggatccggaatcgtgaccaggtgtccactggtgctcaagcttaaaaagctggtgaacgaagacaagtggagaggcaaggtgtcctatcaggactacgagattgagatttcagacgcgagcgaggtggaaaaagaaatcaacaaagcccagaatgccattgccggtgaagggatgggcatttcccatgagctgatcacacttgagatctctagtcgggatgttcctgacttaactctgattgatctgccaggtatcacaagggtcgccgttggtaaccagcccgcagacatcggctacaaaattaagactttaatcaagaaatatatccagcgccaagagaccatcagcctggtcgtggtcccttccaatgtcgacatagcaacaactgaagccctgtctatggcccaagaggtggaccccgaaggagaccgcactatcggcattctaactaagcccgatctggtcgataagggaacagaggacaaagtggtggacgtggttcgcaacttggtcttccacttgaaaaagggctatatgattgttaagtgccgtggccagcaggaaatccaggatcaattatcgctgagtgaagctctccaaagggagaagatcttttttgagaaccacccatacttcagggatctgctggaggagggtaaagccaccgtgccctgcctagcggaaaaactgacctctgagctgattactcacatttgtaagtcactaccacttctggaaaatcagattaaagagacacaccagcgaattaccgaggagctgcagaagtacggagtcgacatccctgaagatgagaatgagaagatgttctttttaattgacaaagtgaacgcgtttaaccaggatattactgccctgatgcagggcgaagagaccgtcggggaagaggatattaggctatttaccaggttacgtcatgaattccataaatggtctaccattatcgagaacaatttccaggaaggccataaaatcctgtctcgcaagatccagaagtttgagaatcagtatcgcggaagagagttgcctggctttgtgaactatcgcacatttgagacaatcgttaaacaacagatcaaggcattggaagagcccgctgtggatatgctccacaccgtaaccgatatggtgagactggcatttaccgacgtaagcatcaagaactttgaagagttcttcaacctacacaggaccgccaaatctaagatcgaagacatacgggctgaacaagaaagggaaggagaaaaactgattcgtctgcattttcagatggaacagatcgtttattgccaggatcaggtctaccgcggagccctccagaaagtgcgtgagaaagaactagaggaggaaaaaaaaaagaagagctgggatttcggagcctttcagagctctagtgccaccgactctagtatggaagagatttttcaacatctgatggcctaccatcaggaggcatccaagcgtatctcttctcacatccctctgatcatccagttttttatgctgcagacctatgggcagcagcttcagaaagccatgctccaacttcttcaagataaagacacttatagctggttactcaaggaacggtcagacacaagcgataagcgtaagtttctcaaggaaaggttggccagattgacacaggctcggcgtcgattagctcagttcccagggtag

SEQ ID NO: 231796 - DNA, 207 bp, synthetic construct
  misc_feature 1..207: note = Description of Artificial Sequence: Synthetic coding sequence
  source 1..207: mol_type = other DNA
atggtcgtgtccgaggtggatattgccaaggccgacccagccgcagcttcacacccactgctgctgaatggagatgctacggtcgcccagaaaaatcctggatcggtggcggagaacaatctatgtagccagtacgaggagaaggtccgcccatgcatagacctaatcgacagcttaagggctctcggggtggaacaggatctttag

SEQ ID NO: 231797 - DNA, 606 bp, synthetic construct
  misc_feature 1..606: note = Description of Artificial Sequence: Synthetic coding sequence
  source 1..606: mol_type = other DNA
atggtcgttagcgaggtcgacatagccaaagcagatccagcggctgcgtcgcaccccctcttacttaacggggatgccacagtcgcccaaaagaatccagggagcgtggcagagaacaacctgtgttcgcagtacgaggagaaagttagaccttgtatcgatctcattgacagccttagggccctgggcgtcgagcaggacctggccctcccagctatagcagtgattggcgatcagagttcgggaaagtcttccgttctcgaggcattgtcaggagttgccctacctagagggtctgggatcgtaacacggtgcccgctggtgttaaagctcaaaaagctggtaaatgaagacaaatggagaggaaaggtgtcctaccaggactacgagatcgaaatctccgacgcttcagaggtcgagaaggagatcaacaaagcacagaacgccattgctggagaagggatggggataagccacgagctcattaccttagagatttcttctagagatgtgcctgacttaacacttattgatcttccaggaattacacgtgtcgctgtcggcaatcagcctgcagatattggttacaaaatcaaaacgctatag

SEQ ID NO: 231798 - DNA, 81 bp, synthetic construct
  misc_feature 1..81: note = Description of Artificial Sequence: Synthetic coding sequence
  source 1..81: mol_type = other DNA
atggtggtatccgaagtcgatattgctaaagccgaccctgccgcagcctctcatccattgctgttgaacggtgacgcttag

SEQ ID NO: 231799 - DNA, 594 bp, synthetic construct
  misc_feature 1..594: note = Description of Artificial Sequence: Synthetic coding sequence
  source 1..594: mol_type = other DNA
atggttgtaagcgaggtcgacatagctaaggccgatcctgccgcagcttcacaccctctattactgaacggggacgccacagttgctcaaaaaaacccgggaagtgtcgccgaaaacaacctgtgctcccagtacgaggagaaggtccgaccctgcattgatttaatcgatagtctgcgcgctttgggagtggagcaagatctggcacttcctgctatcgcggtcattggagaccagagtagtggaaaatcatctgtcctcgaggccttgtcaggggtcgcgctcccacggggaagcgggatcgtcacaaggtgtcccttggtgctgaaacttaagaaacttgtgaatgaagataagtggcggggtaaggtgtcatatcaggattacgaaatcgagatatccgatgcatcggaggttgagaaagagatcaacaaggcacagaatgctatagccggtgaaggaatgggtatcagccatgaactcattacactcgagatcagctctcgggatgtcccagatctcacgttaattgacctgccaggcattacacgagtggccgtcggcaaccaacccgctgacatcggttataaatag

SEQ ID NO: 231800 - DNA, 108 bp, synthetic construct
  misc_feature 1..108: note = Description of Artificial Sequence: Synthetic coding sequence
  source 1..108: mol_type = other DNA
atggttgtttccgaagtggatattgccaaagccgaccccgctgccgcaagccatccgctgctattgaatggtgacgcaaccgtagctcagaagaaccccggttcctag

SEQ ID NO: 231801 - DNA, 234 bp, synthetic construct
  misc_feature 1..234: note = Description of Artificial Sequence: Synthetic coding sequence
  source 1..234: mol_type = other DNA
atggtcgtgagtgaagttgatatcgctaaagctgacccagccgcagcttctcacccattgctcttaaatggcgacgctactgtcgcacagaagaatccaggctcagtggctgagaacaatctgtgctcacagtacgaggagaaggtcagaccctgtatcgacctgatcgacagcctacgggcactgggagtggaacaggaccttgctcttccggcaattgccgttatcggttag

SEQ ID NO: 231802 - DNA, 1989 bp, synthetic construct
  misc_feature 1..1989: note = Description of Artificial Sequence: Synthetic coding sequence
  source 1..1989: mol_type = other DNA
atggtggtgtccgaggtggatatcgctaaggcagacccggcagctgcctctcatccgttactcctgaacggtgacgccaccgtcgcccagaaaaaccccggatcagtggcagaaaacaacctgtgctcacagtacgaagaaaaagtccgtccatgcattgacctgatcgacagcctcagagccctgggagtcgagcaggacctcgccctcccagccatcgccgtcattggagatcaatcttccggcaaatcctcagtcttggaagcactatcaggtgtggctttgccacgcggaagcggaatcgtgactagatgcccgctggtactcaaactgaaaaaactggtaaacgaggataagtggagagggaaagtcagttatcaggactatgaaatcgagatttcggacgcctccgaggtggagaaagaaataaataaggcccaaaatgcaattgccggagaagggatggggatcagccacgagctgatcactctggagatttcaagtcgagacgtacctgaccttactctgattgatctgcctggcatcacaagggtcgccgtcggaaatcagccagcagacataggatataaaattaagacccttatcaagaagtacatccagcggcaggagaccatttctctggtcgtggtgccatctaatgtagatatcgcaacgacggaggcattgagcatggcccaagaggttgatccggaaggcgaccggacgatcggtatccttaccaaacctgatctggtcgacaagggcaccgaggacaaggttgtcgacgttgtgagaaacttagtgttccatttgaagaaaggatacatgatcgtgaagtgccggggtcagcaggagatacaagaccagctaagcctcagcgaggcgcttcagagagagaaaatcttttttgaaaaccacccttactttagggatctgctggaagagggcaaagctaccgttccatgcctcgcagagaagctgacctccgagctaatcacacatatctgtaagagcctcccccttttggagaaccagataaaagagacccaccagcgcattacggaggagctgcaaaaatacggtgtggatatccccgaggatgaaaacgagaagatgttcttcctaattgacaaagtgaacgcttttaaccaagatatcaccgccctgatgcagggagaggagactgttggcgaggaggacattaggctgtttactcgtctccgccacgaatttcacaagtggtccactataattgagaataatttccaggagggacacaaaattctatcacgaaaaatccagaagtttgagaaccagtatcgcggtcgggagctgcccggtttcgttaactatagaacttttgaaacgatcgtcaagcagcagattaaagccctagaggagccagctgttgatatgttgcatactgtcacggacatggttaggctcgccttcactgacgtcagcattaagaacttcgaggagtttttcaacttgcatcgcacagccaaatcaaagattgaggatatacgagccgagcaagagcgcgaaggggaaaagctgattcgcctccactttcagatggagcagatcgtatactgccaagaccaagtgtacagaggtgcccttcaaaaggtgcgggagaaagaacttgaagaggagaagaaaaagaaatcatgggacttcggcgctttccagagcagtagcgctacagattcatcaatggaagaaatctttcagcatttgatggcctatcaccaggaagcctccaaaagaattagctcccacatcccactgattatacagtttttcatgctgcagacctacggccagcaactccaaaaggctatgctccagctcctgcaggacaaagatacgtattcctggctcctgaaagagcggtctgacacgagtgataagagaaagttcttgaaggagaggctagctagactgactcaggctaggcgtagacttgcccagtttcctgggtag

SEQ ID NO: 231803 - DNA, 2148 bp, synthetic construct
  misc_feature 1..2148: note = Description of Artificial Sequence: Synthetic coding sequence
  source 1..2148: mol_type = other DNA
atgagcaaggcccataagccatggccataccgcagacgatcacaattttcatcgcgtaaatatctgaaaaaggaaatgaactcatttcagcagcagcctcctccgttcggaacagtgccacctcaaatgatgttcccacccaattggcagggggcagagaaggacgctgctttcctggcaaaagatttcaactttctgactctgaacaaccagcctccccctgggaataggagccagcccagggctatgggacctgagaataacttgtactcgcagtatgagcagaaagtgcggccttgcatagatctgatcgactcccttagagccctgggggtggagcaagacctcgccctccccgctattgccgtaattggggatcaaagcagcggcaagtcgagtgtgctcgaagctttgtctggcgtggctctgcctagaggcagcggaatcgttaccagatgtccattggtcctgaagctgaaaaagcaaccatgtgaggcctgggcaggaaggatttcatataggaataccgaactggagctccaggaccccggacaggttgagaaggagattcataaagcccagaacgtgatggctggcaatgggaggggaatcagtcatgaactaatctccctcgaaattacatcccccgaggtaccagaccttactataatcgacctcccaggcatcacaagggtcgccgtcgataatcagccgagagacatcggcctacagattaaagcactcataaagaaatacattcagaggcaacagactataaacctggtagttgttccctgcaatgtagacatagccacaacagaggctctctctatggcacacgaagttgaccccgaaggagatcggacaatcgggatcctcacaaaacctgacctcatggacaggggaactgagaaatcagtcatgaatgtcgtgcgaaatctaacctaccctcttaaaaaggggtatatgatagtgaaatgccgaggacaacaggagataacaaataggcttagcttggcagaggccacaaagaaagaaatcaccttctttcagacgcacccttacttcagagtcctcttagaagaaggctccgctacagtgcctcggctcgccgaacggctcaccacagagctgatcatgcacattcagaagtctctgccactgctcgagggtcagatacgcgagtcccatcagaaggctaccgaagagctgcggaggtgcggggcagacattccgagccaggaagctgataaaatgttttttctcatcgagaaaataaagatgttcaaccaggacattgagaaactggttgagggggaggaggtggtaagggagaatgagacaagactctataataagatcagagaggacttcaaaaactgggtcggcatcttagccacgaatactcagaaggtgaagaacatcatccacgaggaggtcgagaagtatgagaaacagtaccgtggcaaggagctgctcgggtttgtcaattacaagacgtttgaaattattgtgcatcagtacatccagcagttggtcgagcccgctctgagcatgctgcaaaaggctatggagatcatccagcaggcatttattaacgtcgccaagaagcattttggagaatttttcaacctgaaccagaccgttcagagtactatagaggacataaaggttaagcatacagctaaggccgaaaacatgattcagctgcagttcagaatggagcagatggtcttctgtcaggaccaaatctattctgtggttttaaagaaagtgagagaggaaattttcaatccccttgggacgccgtcacaaaacatgaagttgaacagccactttccatctaacgaaagttcggtcagcagtttcacggaaataggtatccacctaaatgcatactttttggagaccagcaagcgcctggctaaccagattcctttcatcatccagtattttatgttgcgcgagaacggcgattctctgcagaaagctatgatgcagatactgcaagaaaaaaacaggtattcttggttactgcaggagcagtccgagacggccacaaagcgacgaatcttaaaggagagaatataccgtctcactcaagcacgccacgctctgtgtcagttctcctctaaagagattcattag

SEQ ID NO: 231804 - DNA, 45 bp, synthetic construct
  misc_feature 1..45: note = Description of Artificial Sequence: Synthetic coding sequence
  source 1..45: mol_type = other DNA
atgtcaaaagctcacaaaccgtggccatacagacgccgtagttag

SEQ ID NO: 231805 - DNA, 405 bp, synthetic construct
  misc_feature 1..405: note = Description of Artificial Sequence: Synthetic coding sequence
  source 1..405: mol_type = other DNA
atgagtaaagcccataaaccgtggccctacagaagacggagccagttttcttcccgaaaatatctgaaaaaggagatgaatagctttcagcagcaaccacctccatttgggaccgtgcctccacagatgatgtttccgcctaattggcagggtgctgagaaggatgccgcttttctagctaaagattttaactttttaaccctgaacaaccagccaccccctggtaatcggagtcagccaagagctatgggacccgaaaacaatctttactctcaatatgaacagaaggtgcgaccttgtatagatcttatagactccctgcgggctctcggggtggagcaggatctggctctgccggcaattgctgtcattggcgatcagtcttcaggcaagagtagtgtctag

SEQ ID NO: 231806 - DNA, 378 bp, synthetic construct
  misc_feature 1..378: note = Description of Artificial Sequence: Synthetic coding sequence
  source 1..378: mol_type = other DNA
atgtcaaaggcgcacaagccttggccttatcgaaggcggagccagttcagtagtagaaagtatctgaaaaaggagatgaattcttttcagcagcagcctcccccattcggaacggttcctccacagatgatgtttccacctaattggcagggagccgagaaggacgcagcttttctagcaaaggacttcaatttcctaaccctgaacaaccagcccccaccaggaaatcgatcccagcccagggccatgggacctgaaaacaatttgtactctcagtatgaacagaaggtgagaccgtgtattgatctgattgacagcttgagggctttaggggtggaacaggacctggctttaccggctattgccgtcattggatag

SEQ ID NO: 231807 - DNA, 390 bp, synthetic construct
  misc_feature 1..390: note = Description of Artificial Sequence: Synthetic coding sequence
  source 1..390: mol_type = other DNA
atgtcaaaagcacacaagccatggccttaccggaggcggagtcagttctcttccaggaagtatttgaagaaggagatgaactcatttcagcagcaacctcctccgttcgggacagtgccccctcagatgatgtttccacctaactggcagggggctgaaaaagatgcggctttcttggcaaaggattttaattttctgactttaaacaaccaacctcctcccggtaacaggtctcaacccagagctatgggaccggaaaacaacctgtattcacagtatgaacagaaagtccggccttgtattgacttgatagatagcctgagggccttgggagttgagcaggatcttgctttacccgcaatcgctgtgatcggtgaccagtctagttag

SEQ ID NO: 231808 - DNA, 606 bp, synthetic construct
  misc_feature 1..606: note = Description of Artificial Sequence: Synthetic coding sequence
  source 1..606: mol_type = other DNA
atgagtaaagcccataagccatggccctatcgtcggcgttcacagttctcctccaggaaatacctgaagaaagagatgaactcatttcagcagcaaccacctccattcggcaccgtgccccctcaaatgatgtttccaccaaactggcaaggtgcggaaaaggacgctgcctttttggctaaggacttcaatttcctgactctcaacaatcaaccgccacccggaaaccggtcccagcctagggccatgggccctgagaataacctgtatagtcaatatgaacagaaagtcaggccatgtatcgatttaattgactcactccgtgccttaggcgtggagcaggatctggcactgcccgctattgcggtgatcggtgaccaatcctctggcaaaagttcggttctcgaagcgctgagtggcgtggccctgcctcggggttctgcccagaacgtgatggcaggcaacgggaggggtatctcacatgaactgatctctctcgagattacttcacccgaagtccctgatttgaccatcatcgacctgcctgggatcactagagtggccgttgataatcagcctagggacatcggtttacaggtgagttag

SEQ ID NO: 231809 - DNA, 663 bp, synthetic construct
  misc_feature 1..663: note = Description of Artificial Sequence: Synthetic coding sequence
  source 1..663: mol_type = other DNA
atgaacatccggaacgcacgacccgaggatttaatgaacatgcagcactgtaacctgctgtgtcttcccgaaaattaccagatgaaatactatttctaccacggtttgtcctggccccaattgtcttatatcgcagaagacgagaatggaaagatcgtgggatatgtgcttgcaaaaatggaagaggaccctgacgacgtgccacatggacacataacgagtctggccgtgaagaggagtcacagacggctgggcttggcacaaaagcttatggaccaagcgtctcgagcaatgatagagaatttcaatgctaaatatgtgtccctgcatgtccgaaagagaattagtgaggtggagcccaaatattacgccgacggtgaagatgcatatgctatgaaacgagatttgacgcaaatggccgacgagctgagacggcacctcgagctcaaggagaagggcaggcatgtggtgctgggcgctatcgagaacaaggtggagtctaaagggaacagcccaccatcaagcggggaggcatgccgggaggagaagggcctagccgctgaggactctggaggcgactctaaggacctatccgaggtcagcgagacaaccgaaagcactgatgtgaaagactctagcgaagcaagcgattcagcatcctag

SEQ ID NO: 231810 - DNA, 708 bp, synthetic construct
  misc_feature 1..708: note = Description of Artificial Sequence: Synthetic coding sequence
  source 1..708: mol_type = other DNA
atgaacatccgcaacgctcgccctgaagacctgatgaatatgcaacattgtaatctgctgtgtctccctgaaaactatcagatgaagtattatttttaccacggcctgagttggccccagcttagttatattgccgaagacgagaacggcaaaatagttggttacgtgctggcgaagatggaggaagaccccgacgacgtgccacatggacacataaccagcctagctgtgaagaggagccaccggcgattggggctggcacagaagctgatggatcaggcctcacgggctatgatagaaaatttcaacgccaagtatgtgtccctacacgtgaggaagagtaaccgagcagctctgcatctttacagtaacacactcaacttccagatctctgaagtagaacctaaatactatgccgacggcgaggatgcgtatgcaatgaagagggatctcacccagatggcagatgagctgagacgacacctggaattgaaggaaaagggtagacacgtcgtcctaggcgcaatagagaacaaggtcgagtcgaaaggaaatagtcctccctctagcggggaggcctgcagagaggagaaaggtttagccgcagaggattcaggcggtgactccaaagacctatcagaggtttcggaaactactgaaagtacagacgtcaaagattcaagcgaggcttcagattccgcaagttag

SEQ ID NO: 231811 - DNA, 396 bp, synthetic construct
  misc_feature 1..396: note = Description of Artificial Sequence: Synthetic coding sequence
  source 1..396: mol_type = other DNA
atgaatattaggaatgccagacctgaggacctgatgaatatgcagcattgtaacctgctttgccttcccgaaaactatcagatgaagtactatttctaccacgggctgtcctggcctcagttgagctacatcgcagaggatgaaaacggcaagatcgttgggtacgtgctcgcaaagatggaggaagatccggatgacgttccccacggtcacataaccagtctggctgtgaagaggtctcaccgcaggctcggcctagctcaaaagttgatggaccaggccagtagggctatgatcgagaattttaatgccaaatatgtctccctgcacgttaggaaaaggagtgtgaaatggtcacccaatactatgcagatgggcagaactcccatgccgtag

SEQ ID NO: 231812 - DNA, 534 bp, synthetic construct
  misc_feature 1..534: note = Description of Artificial Sequence: Synthetic coding sequence
  source 1..534: mol_type = other DNA
atgatcgtggctgaaattaagaaccgaaccaaaattcacaaggaggacggcgacattctcgcatcgaacttctcagtcgatactcaggtagcatacattctttcgcttggcgtggtgaaagaattcaggaagcatgggatcggcagcctcctcttagagtctctcaaagatcacatctcgacaacggcccaggaccattgtaaggcgatttatctgcacgttctgaccacaaacaatactgctatcaatttttacgagaaccgcgatttcaaacagcaccactatcttccatactactatagcatccggggagtgctgaaggacggattcacctacgtcctgtatatcaacggtggtcatcccccatggaccatccttgattatatccaacatctgggaagcgctcttgcaagcctgtccccttgctcaattccccatagggtgtacaggcaggcgcatagtctgctatgttcgttcctgccttggtcaggcatctcaagcaaaagcggtatagagtattcgcggaccatgtag

SEQ ID NO: 231813 - DNA, 729 bp, synthetic construct
  misc_feature 1..729: note = Description of Artificial Sequence: Synthetic coding sequence
  source 1..729: mol_type = other DNA
atgacggaggttgtccccagctccgctttgtctgaagtcagcttacgcttgctgtgccacgatgacattgacactgttaaacatctgtgtggagactggtttcccatcgagtatcccgacagctggtatcgtgacataacatccaataaaaagttcttcagcctggccgctacatatcgcggtgcgatcgtgggaatgatcgtggctgaaataaagaatcgcactaaaatacataaggaggacggcgacatactggccagcaacttctcagtcgacactcaggtcgcatacattttaagtctgggggtcgtgaaggaatttaggaagcacggtataggcagcctgttgctggagagcctgaaggatcatatttctaccacagcccaggaccattgcaaagcaatctacctccatgtacttaccacgaataatactgccatcaacttctatgagaacagggactttaaacagcatcactatctcccttactactactctattcggggtgtactgaaagacggtttcacatacgtgctgtacattaacgggggtcaccctccctggacgattttggattacatacaacacttaggcagtgccctcgcctcgctgtcaccgtgttctatcccgcacagagtgtaccggcaggctcattcactactgtgctcttttctcccctggtctgggatcagttcgaagtccgggatagagtatagtcgcaccatgtag

SEQ ID NO: 231814 - DNA, 729 bp, synthetic construct
  misc_feature 1..729: note = Description of Artificial Sequence: Synthetic coding sequence
  source 1..729: mol_type = other DNA
atgaccgaagtcgtgccctcaagcgccctgtccgaagtaagtttaaggctcctgtgccacgatgatatcgatacagttaaacatctgtgcggcgattggttcccgatagagtatccagacagttggtaccgtgacattacatcaaataagaagtttttttctctggccgcaacatacagaggtgccatcgtggggatgattgtggctgaaattaaaaacagaacaaagattcacaaggaggacggagacattcttgcgtcaaacttttctgttgacactcaggtggcatatatcctctccctcggagttgttaaagaattccgcaagcacggcattggatctctcttgctggagtctctcaaagatcacattagcaccaccgcacaagatcactgcaaggccatttacttgcatgtgctgaccactaataacactgcaatcaacttctatgagaacagggacttcaaacaacatcactaccttccgtattattattctattaggggcgtgttgaaagacgggttcacctatgtgctgtacatcaatgggggacatcctccgtggaccatcctggattacatccagcacctggggtcagctctggcctcattatctccttgtagtatcccccaccgcgtatacaggcaagctcattcgctactgtgcagctttctgccctggtctggcatctcctcaaagtcagggattgagtacagtaggacaatgtag

SEQ ID NO: 231815 - DNA, 573 bp, synthetic construct
  misc_feature 1..573: note = Description of Artificial Sequence: Synthetic coding sequence
  source 1..573: mol_type = other DNA
atgactgaagtggtgccatcatcagccctctcagaagtttccttgagattactttgtcacgacgacatcgacactgtaaagcacctctgcggagattggttcccaatcgagtaccctgattcttggtacagagacataacatccaataaaaagttttttagcttggccgctacatacaggggcgctatcgtgggtatgatcgtggcagagatcaagaataggacaaaaatccacaaggaagacggcgatatcctagcctctaatttcagtgttgacacacaagtggcatatattctctctcttggagttgtcaaggaattcagaaagcacggcattgagcctcatggcctccaccccgcaccaggcctctgtacttcccagcccgaacccctccttcattccgcccagtctctgcccccaggccctcaacctgcccttcagctacccgcaatggtgggacacctttttcaagaatggcacagagttcaacctgaccacgttatgagcgcgggtcagccgccaccaggccctacactcaggcccccagcggagcctgccttcctgagtatatag

SEQ ID NO: 231816 - DNA, 750 bp, synthetic construct
  misc_feature 1..750: note = Description of Artificial Sequence: Synthetic coding sequence
  source 1..750: mol_type = other DNA
atgttccctcgcaggaggactgagcgtaggctgggcgatactggcacaaggaagaagatcgcctacaggaaggccgtgccaggcggtcgaaaatgtggcgcttctctgagctgggaaaaatctagtcgggaatatcccgactcatggtaccgggatataacctccaacaaaaagttcttctccctcgctgctacctataggggagccatcgtgggcatgatcgtagctgagattaagaacaggacaaagattcacaaagaggatggggatatactggccagtaatttcagcgttgacacacaggtcgcctatattctctccctgggggttgtcaaggaattccgcaaacacggcattggcagtcttctcctcgaaagtctcaaagaccacatctcgaccacagcgcaagatcactgcaaggctatctacctccatgtactcactactaacaacacggcgattaatttctacgagaaccgcgattttaaacagcaccattacctgccctactactatagtataagaggcgtcctgaaggacgggttcacatatgtactttacatcaatggaggacaccccccttggacaatcttggattacattcagcacctggggagcgccctggcctctctttccccctgcagtataccacatcgtgtttataggcaggcccactctctcctctgttcttttctgccttggtcagggatttcttccaagagcgggatagaatactccagaaccatgtag

SEQ ID NO: 231817 - DNA, 492 bp, synthetic construct
  misc_feature 1..492: note = Description of Artificial Sequence: Synthetic coding sequence
  source 1..492: mol_type = other DNA
atggccgtcattctgggtatatttggcacagtacagtatcggagcagatatcttattctatacgccgcttggcttgtgctgtgggtgggctggaacgcatttatcatttgcttctacctagaagtcgggcagctcagccaggaccgcgattttatcatgacgtttaacacttctttacaccgctcatggtggatggaaaatggtcctggctgtctagtgactcctgttctgaactccagattagccctggaggatcatcatgtcatcagcgtgaccggttgcctgctggattacccctacatcgaggctctgtcctcagcgcttcaaatcttccttgcactgttcggatttgtcttcgcttgctacgtaagcaaggtgtttctggaagaggaggatagtttcgacttcattggaggtttcgatagctatggttatcaggcccctcagaagacatcacacctgcagctgcagcccctgtatacatcaggttag

SEQ ID NO: 231818 - DNA, 624 bp, synthetic construct
  misc_feature 1..624: note = Description of Artificial Sequence: Synthetic coding sequence
  source 1..624: mol_type = other DNA
atgggtaaatgttctggtcggtgtacactggtggccttctgctgtctgcagctggtggctgccctcgaaagacagatatttgacttccttgggtaccagtgggcaccgattttggccaatttcctgcacataatggcagtgatattggggatttttggcactgtccagtatcgctccaggtaccttatactgtatgccgcatggttggtactctgggtgggttggaacgcctttattatatgtttttacctggaagtggggcagctgagccaggaccgcgatttcatcatgacttttaacacttctcttcaccgttcgtggtggatggaaaacggacccggatgcctggttaccccagtgctgaatagcagacttgctctggaggaccatcacgtgatcagcgtaacaggttgcctcttggattacccttatatcgaagccttgagctccgccctgcaaatttttctggccctgttcggtttcgtcttcgcctgttacgttagcaaagtgttcctggaagaggaggatagcttcgactttatcggaggctttgatagctatggatatcaggctccacagaagacctcccacctccagctgcagccgctgtacacaagcggctag

SEQ ID NO: 231819 - DNA, 411 bp, synthetic construct
  misc_feature 1..411: note = Description of Artificial Sequence: Synthetic coding sequence
  source 1..411: mol_type = other DNA
atggcggttatcctgggaattttcgggactgtgcagtaccggagcaggtacctgatccttgaccgggacttcattatgaccttcaacacctctctgcaccgcagttggtggatggagaacggacccggatgcctggtgactcccgtgctcaacagccgtcttgccttggaggaccaccacgttatcagcgtcaccggctgcctacttgattacccatatattgaagccttgtctagcgctttgcaaatattcttagctctgtttggcttcgtctttgcatgctacgtctccaaggtgttcctggaggaggaggattctttcgatttcatcgggggttttgacagctacgggtaccaggccccacagaaaacaagccatctgcagctgcagcctttgtacacttcggggtag

SEQ ID NO: 231820 - DNA, 567 bp, synthetic construct
  misc_feature 1..567: note = Description of Artificial Sequence: Synthetic coding sequence
  source 1..567: mol_type = other DNA
atgggttactgctctggacgttgtacgttaatcttcatttgcggcatgcagctagtatgtgttttggaaaggcaaatctttgatttcttgggctatcaatgggcccctatccttgccaactttgtgcacattatcatagtgattctaggactctttggaaccatccaataccgtccgagatacatcacagggtatgcagtgtggctggtactttgggtgacctggaatgtgttcgtgatatgtttctacctggaagccggtgacctgtccaaagagacagatctaatcctgacgtttaacatctccatgcatcgttcatggtggatggagaacggacctggctgtactgttacgtcggtcaccccggctcccgactgggcacccgaagatcatcgatacattactgtctctggatgtttactggagtaccagtatatcgaggtcgcacatagcagccttcaaattgttctggctgtaagcgtaggcagtcagccattgctgctcgtaccactgggccttttttacttttgtgctaactcggttcacacaaacggtatatgtggctag

SEQ ID NO: 231821 - DNA, 627 bp, synthetic construct
  misc_feature 1..627: note = Description of Artificial Sequence: Synthetic coding sequence
  source 1..627: mol_type = other DNA
atgggctattgctctggacgctgcacccttatctttatctgtggcatgcagttggtgtgcgtgctggagcggcagatctttgacttcctgggataccaatgggccccaattctcgccaatttcgtccatattatcatcgtgatcttagggctgtttggaaccatacagtaccggccaagatacattaccggctacgccgtttggttggttttgtgggtcacttggaatgttttcgtcatttgcttctacctggaagcgggagaccttagtaaagaaacagacctcattttgacattcaacatatctatgcatagaagctggtggatggaaaatggtcccggatgtacagtcaccagtgttacccctgctccagactgggccccagaagaccatcggtatattacagtgtcagggtgtttgctggaataccaatacatcgaggtggctcactctagtctccagatcgtgctcgctcttgctgggtttatctacgcgtgttatgtcgtcaagtgcatcactgaggaggaggatagctttgacttcatcggcggattcgactcctatggataccaaggtccacagaagacctcccacctgcagttacaacccatgtacatgtccaagtag

SEQ ID NO: 231822 - DNA, 624 bp, synthetic construct
  misc_feature 1..624: note = Description of Artificial Sequence: Synthetic coding sequence
  source 1..624: mol_type = other DNA
atgggtattataagattcttgctgctgtactgccccacaaatatacttaccgtctgtgtcctggagaggcagatcttcgattttttgggctatcagtgggcccctatcctggccaacttcgttcatatcatcatagtcatactggggctgtttggtaccatccagtacagaccaagatacatcactggctacgctgtgtggctggtcctgtgggtgacatggaatgtgtttgtcatttgtttctacttggaagctggggacttatctaaagagaccgacctcattcttactttcaacatttcaatgcacaggtcctggtggatggagaacggtccaggatgcaccgtcacgagcgttacaccagctccagactgggctcccgaggatcaccgctacattaccgtgagcggttgcttgcttgagtatcagtatatcgaggtagcacatagttcgctccaaatcgttttagctctcgccggttttatttacgcatgttacgtggtgaagtgtatcacagaggaggaggactcctttgactttattggcggattcgatagttacggctatcagggccctcaaaagacatctcacctgcagttacagcctatgtacatgagcaagtag

SEQ ID NO: 231823 - DNA, 576 bp, synthetic construct
  misc_feature 1..576: note = Description of Artificial Sequence: Synthetic coding sequence
  source 1..576: mol_type = other DNA
atgaaaattgtgtgtgtgctcgaacgccagatctttgacttccttggatatcagtgggcgccaatcttggcgaacttcgttcatattatcatcgtcatacttgggctgttcggaaccatccagtacagaccccgatacatcacagggtatgccgtatggttagttttgtgggtgacatggaatgtgtttgtaatctgcttctatctggaagccggtgatttgagtaaagagacggacctgattttaacattcaacatcagtatgcacagatcttggtggatggagaatggccctgggtgcactgtcacatctgtcacccccgcacctgactgggcgccagaagatcacagatacataaccgttagtggctgtctcctggaatatcagtatattgaggtggcccactctagtctgcaaattgtgttagcacttgcaggatttatctatgcctgctatgtggtgaagtgtatcactgaggaggaggactcattcgatttcatcgggggatttgacagctacgggtatcaggggccacagaaaacaagccatctgcagctgcagccaatgtatatgtag

SEQ ID NO: 231824 - DNA, 420 bp, synthetic construct
  misc_feature 1..420: note = Description of Artificial Sequence: Synthetic coding sequence
  source 1..420: mol_type = other DNA
atgggctactgctcgggccgatgtacccttatattcatctgtgggatgcagctggtctgcgtgctggagcgccagattttcgacttcctgggttaccagtgggctcccatcctggcaaacttcgtccatataattatagtgatcctaggcttgttcggaactatccaatacaggccacgatacatcacagggtacgcggtgtggctggtgctgtgggttacgtggaatgtgtttgtgatctgtttttacctggaggccggagacctgtcaaaactcgctggatttatctacgcgtgttatgtcgtgaagtgtataaccgaagaggaggattccttcgacttcatcggcggttttgattcctacggataccagggtccccaaaagacaagtcatttgcagctccagcccatgtacatgtag

SEQ ID NO: 231825 - DNA, 594 bp, synthetic construct
  misc_feature 1..594: note = Description of Artificial Sequence: Synthetic coding sequence
  source 1..594: mol_type = other DNA
atgggatgttgcacagggagatgttcacttatatgcctctgcgcgctccagcttgtgagtgcactggaacgtcagattttcgattttctcggcttccagtgggctcctatcctgggcaattttctgcacattatcgtggtgattttgggccttttcggaaccatccaatataggcccagatatatcatggtgtacactgtgtggacagccctttgggtgacgtggaatgtgtttatcatctgcttttacttagaggtgggtggactgtctaaagatacagacttgatgacattcaatatctcggtgcatagatcttggtggagggagcacggaccaggatgcgtgagacgtgtcctgccccctagcgcccacggcatgatggacgactatacgtacgtatctgtaactggatgtatcgtggactttcaatatctggaagttatccactctgctgtacaaattctgctcagcctggtggggttcgtctatgcctgttatgtcatctcaattagtatggaggaagaggatacttacagctgcgatttgcaggtgtgtaaacacctattcattcaaatgctccagatcatagagtag

SEQ ID NO: 231826 - DNA, 594 bp, synthetic construct
  misc_feature 1..594: note = Description of Artificial Sequence: Synthetic coding sequence
  source 1..594: mol_type = other DNA
atgggctgctgcacaggacgctgtagcttgatctgcctatgcgcactacagctggtatccgccctggagcgacaaatcttcgacttcctcggctttcagtgggcacctatactggggaacttcctgcatataattgtggtgatactcggcttgtttggcaccatccagtacagaccgcgatatattatggtctacaccgtctggacagcattgtgggtgacctggaatgtctttatcatctgcttttatttggaggtgggaggactgtcaaaagatacagaccttatgacctttaacatcagcgtccatcggtcctggtggcgtgaacatggccctgggtgcgttagacgagtgctccctccaagcgcccacgggatgatggacgactatacatacgtgtctgttacaggctgcatcgtggattttcaataccttgaagtcatccattcagctgtccaaatcttactgtccttagttggctttgtgtatgcttgttacgttatctccatctcaatggaagaagaggacacgtactcatgtgacctgcaagtgtgcaaacatctgtttatccagatgctccagatcatcgagtag

SEQ ID NO: 231827 - DNA, 486 bp, synthetic construct
  misc_feature 1..486: note = Description of Artificial Sequence: Synthetic coding sequence
  source 1..486: mol_type = other DNA
atgggttgctgtaccggacgctgttctttgatatgtctgtgtgctttacagctggtaagctgggtgtttgaccgtcagatcttcctgctctcattccagtgggctccaatcctcggcaacttccttcacataatcgtggtgattctcggcctcttcgggacaattcagtaccgtccccgatacataatggtttatacagtttggaccgccctgtgggtgacctggaacgtttttattatttgtttctatctggaggtgggaggcttaagtaaggacactgacctgatgacatttaacataagtgtgcatcgatcatggtggagagaacacggacctggttgcgttcgccgtgtcttgccccctagcgcgcatggcatgatggatgactatacatacgtgtcagtcactggctgcattgttgacttccaatacctggaggtaattcacagcgccgtgcagattctcctgtccatattcttcctgtag

SEQ ID NO: 231828 - DNA, 627 bp, synthetic construct
  misc_feature 1..627: note = Description of Artificial Sequence: Synthetic coding sequence
  source 1..627: mol_type = other DNA
atgggtagttgctcaggtcgatgcgctttggtagtgctctgcgcctttcagcttgtcgcggctctggagcgacaggtgttcgacttcctcggctatcagtgggcccctattttggccaatttcgttcatatcattatcgtcatcttgggactgttcgggaccatccagtatagacttcggtatgtcatggtgtataccttatgggccgctgtgtgggtgacatggaatgtatttataatttgcttctatctggaggtgggtggcttgttaaaagactctgagcttcttacatttagcctgtcgaggcaccgctcttggtggcgggaaaggtggcctggatgtcttcacgaggaggtccccgctgtgggcctaggcgcaccccacggccaagcccttgtatcaggagccggatgtgccctggagccctcatacgtggaggcgctacattcctgtcttcaaatattgatcgctctgctgggctttgtttgcggttgccaggtggtttccgtgtttaccgaagaggaggactcattcgatttcatagggggtttcgaccctttccccctgtatcatgtcaatgagaagccctccagtctgctgagtaaacaggtataccttccagcctag

SEQ ID NO: 231829 - DNA, 267 bp, synthetic construct
  misc_feature 1..267: note = Description of Artificial Sequence: Synthetic coding sequence
  source 1..267: mol_type = other DNA
atggccgagtccagaggtcgattatatctgtggatgtgcctcgcagcagccctagcaagtttcctgatgggatttatggtgggttggttcataaaacctctgaaggagactactaccagtgtccgctaccatcagagcatacgctggaagctggtctcagagatgaaagctgagaacattaaatcttttctcagatcattcactaaactcccacacctggcagggactgagcagaattttctattagcaaaaaagatccagacttag

SEQ ID NO: 231830 - DNA, 2223 bp, synthetic construct
  misc_feature 1..2223: note = Description of Artificial Sequence: Synthetic coding sequence
  source 1..2223: mol_type = other DNA
atggccgagtcacggggacgactgtatctttggatgtgtctggctgccgctctggcgagcttcctcatgggttttatggtaggatggttcattaaaccactaaaagagacaacaacttctgtgcgctaccatcagtccatccggtggaagcttgttagcgaaatgaaagccgagaatataaagagttttttgaggagttttaccaagctgcctcacctggctggaactgagcagaactttctgttagccaaaaagattcagacccagtggaaaaaatttggactagactcagcaaagctggttcattatgacgtgttactttcatatcccaacgagaccaacgccaattacatttctatcgtcgatgaacacgagactgagatcttcaagacctcatacctggaaccaccgcctgatgggtatgagaacgtgactaacatcgtgccaccttataacgcctttagtgcccagggaatgccggagggagaccttgtgtatgttaactatgcaaggactgaggatttctttaaactggaacgcgagatgggcatcaattgtacaggcaaaatcgtgatcgcaaggtacgggaaaatcttccgtggtaacaaggtcaagaatgcaatgctggccggagcaatcggaataatcctttactccgaccctgccgattatttcgcacctgaggttcagccctatcccaagggatggaatctgcccggaaccgccgctcagcgcggaaatgtcttgaatctgaatggagcaggggaccctctgacaccgggatatcccgcaaaagaatatacctttagactggacgtcgaggaaggcgttggcatcccccgtatccccgtccacccgatcgggtacaatgatgccgagattctcctacggtaccttggtgggattgcccctcctgataaatcctggaaaggagctctgaatgtaagctatagcatcggcccaggattcacaggctctgactcctttcgcaaagtgaggatgcacgtttacaatatcaacaaaataacgcgcatttataacgtcgtgggcaccattcggggttccgtcgagccagatcgctacgtgattctgggcggacacagggatagctgggttttcggggcaattgatcctactagcggggttgccgtcttgcaagagattgcgagatcttttggcaaactcatgtctaagggctggcgacctcgcagaacaatcatcttcgcttcctgggacgccgaggaattcggactgctgggatctacagaatgggcagaggagaatgtgaaaatcctgcaggagaggtcaatcgcctatattaattctgattcctccatagaaggtaactatacactgcgcgtggactgtacccccttactgtaccagttagtgtataagctaaccaaagagatcccatccccagacgatggattcgaaagcaaatcattatatgaatcttggctggagaaggacccctcaccagaaaacaagaatctgccacgcattaataaactgggcagcggttctgacttcgaggcttactttcagcgtctgggaattgcctctggccgagctaggtacacgaaaaacaagaagacagataaatacagcagttatcccgtgtatcacaccatctacgagacctttgaactagtagaaaaattttacgaccccacctttaaaaagcagctgagcgtagcccaattacgcggtgcactggtctacgagttggtcgactccaagattatcccttttaatatccaagactatgctgaggctttaaagaactacgccgcaagcatttataatctctctaagaagcacgatcagcaactgaccgatcacggtgtttccttcgattccttgttttctgccgtcaaaaacttctcggaagcagctagtgattttcacaaacggctgattcaggtcgacttaaataatccaatcgccgtgcgcatgatgaatgaccaactgatgctactggagcgagcctttatcgatcctctggggctgcccggtaaactgttctaccgacacatcatatttgccccttcgtcccacaacaaatatgccggtgaaagctttcccggaatttacgatgcgatttttgatatcgagaacaaagccaattcccgcctagcctggaaagaagttaaaaagcacatttccatcgcagcctttactattcaggctgccgcaggcactctgaaggaagtgctctag

SEQ ID NO: 231831 - DNA, 1635 bp, synthetic construct
  misc_feature 1..1635: note = Description of Artificial Sequence: Synthetic coding sequence
  source 1..1635: mol_type = other DNA
atgcagtggacgaaagttttaggacttggcttgggagccgctgcccttctggggctgggcattatcctcggacatttcgccattcctaagaaagcaaactccctggcccctcaagatctggacctggagattctggaaaccgtcatgggacagttggacgcccaccggataagggaaaatttgcgagaactgtctcgggagcctcacttagcaagttcgcccagggacgaggatctcgtgcagttattactccagagatggaaagaccctgaatctggactggactcagccgaggcatccacatatgaggttctgctctcttttccgtcgcaggaacaaccaaatgtggtagacatcgtaggtccgaccggaggaatcattcatagttgccaccggaccgaggagaatgttaccggcgagcagggcggacctgatgtggtccaaccctatgccgcttacgcccctagcgggactccgcaggggctgctggtgtacgcaaacaggggagcggaggaggacttcaaggagctccagacccaggggataaagctggagggcaccatcgctctgactaggtatggcggagtcgggaggggcgctaaagccgttaacgcagcaaaacacggggtggccggagtgctcgtgtatacggaccccgctgatatcaatgatggtctgtcttcacccgatgaaacgtttccgaatagctggtatttacctccttctggtgtcgaaagaggatcttattacgagtacttcggcgatccactaacgccataccttcccgctgttccatcaagtttccgagtcgacctagccaacgtctcagggttccctcctatccctacccagcctatcggctttcaagatgctcgagacctgctgtgcaatctgaacggaaccctggccccagccacctggcagggcgctctggggtgccactatcgcctgggcccaggtttccggccagatggtgattttccagctgattcacaggtgaatgtcagtgtgtacaaccgtctggagctgcgcaactccagtaatgtacttggcataattaggggggctgtagagcctgatcgctacgtactatacggcaaccaccgggattcttgggtgcatggcgctgttgatccttcaagcggcaccgcggtgctcctggagctgagtcgggtgttgggaaccctgctgaaaaaaggcacctggcgaccccgaaggtcaatcgtgttcgcttcatggggtgccgaagaattcggattgattgggagcacggagtttactgaagagttttttaacaagctccaggagagaactgtggcatacatcaatgtggatatctcagtgttcgccaatgcaactttgagggtccagggaacaccccctgtgcagtcagtggtcttttccgcaacaaaagagattcggtcccccggaccgggagatctttctatttacgacaactggatcagatattttaataggtcatcgccggtgtatgggctggttccacgggcaagattgcagccgggaagtacccctccaacaacgcagcccctgacccctctaaccatgtggacttctttctggaccagggcctccgctgccattaggttgtggcctggccaaagaggggtgtag

SEQ ID NO: 231832 - DNA, 1569 bp, synthetic construct
  misc_feature 1..1569: note = Description of Artificial Sequence: Synthetic coding sequence
  source 1..1569: mol_type = other DNA
atgcagtggaccaaagttttggggttgggcctgggcgctgctgctctcctgggactgggtatcatcctgggacatttcgccattcctaagaaagctaatagccttgcaccccaagatttggacttagaaatcctagagactgtgatggggcaacttgatgctcataggatacgggagaatctgcgggaattgagccgagaaccccatctggcgagctctcccagagatgaggacctggtgcagcttctcctccagcgctggaaagatccagaaagcggcctggacagcgccgaggcatctacatacgaggtcctgctatcctttcccagtcaggagcagccgaacgttgtcgacatcgtgggacccaccggtggaataatccatagctgtcataggacagaggaaaatgttacaggagaacagggaggccctgacgtcgtccaaccatacgctgcctatgccccttcaggtacccctcaaggcctactggtgtatgcgaaccgaggtgcagaggaggactttaaggagcttcaaacccagggcatcaagctggaaggcactatcgcgcttactaggtacgggggagtaggccgaggagcaaaagctgtgaacgcagccaagcacggagttgccggagttctggtctacaccgatccagcagatattaacgacggtttgtctagccccgacgaaacctttcctaattcatggtatcttcctccgtcgggagtggaaaggggatcatattacgaatatttcggagatccccttaccccatatttgcccgctgttccatcttcatttcgcgtcgatctggctaatgtgagcggcttccctcctattccgactcagccaattggtttccaggatgccagggatttactgtgtaatctgaatgggaccttggcccctgctacctggcagggcgctctcggctgtcactatcggctcggcccagggttcagaccggatggcgatttccctgccgatagccaggttaatgtgagcgtttacaatcggctggagctaaggaattcaagcaacgttttaggcatcatccgaggcgctgttgaaccggatcggtatgttttatatggaaaccatagggatagctgggttcacggggcagttgaccccagctcagggaccgctgtccttcttgagctgtccagagtgctcgggacccttcttaagaaaggcacatggagaccgaggcgttccattgtgttcgcatcatggggagctgaggagtttggcctgatcgggtctaccgagttcacagaggagttttttaacaaactccaagagcgcacggtcgcgtatatcaacgttgacatttctgtttttgcgaacgccacacttcgcgttcaggggactccaccggttcagtccgtggtattcagcgccactaaggagatcaggtcgcctggaccgggtgatctctcaatctatgacaactggatccgctacttcaaccgatctagccctgtctatgggttggtgccccgtctgcagcagccaagcggatgtggacccgactctggcgaatgcgattcccctgcccagtag

SEQ ID NO: 231833 - DNA, 2223 bp, synthetic construct
  misc_feature 1..2223: note = Description of Artificial Sequence: Synthetic coding sequence
  source 1..2223: mol_type = other DNA
atgcagtggacaaaagtgctgggtttaggactgggggcagctgcgttgctgggcttgggtattatcctgggtcatttcgcaattcctaaaaaggccaactcccttgcccctcaggatctggacctcgagattctcgaaacggtcatgggccaactggacgcccataggatccgcgagaatctccgcgaactgagccgggaaccccacctagcttcatctcctcgagacgaagacctggtacagttgctgctacagcgctggaaggaccccgagtcaggcctagactcagctgaagcctcgacctacgaggttttactgtctttcccaagtcaagagcagccaaatgtcgttgacatcgtcggtccgactggtgggatcattcactcatgccaccgtactgaggagaatgtgacaggagagcagggaggtccagatgtagtccaaccgtacgccgcatacgcgccaagcggcaccccccaaggactcctggtttacgcgaacagaggtgctgaagaggattttaaggagttgcagacacaaggcatcaagttggagggcacgatcgccctgacccgctatgggggagttggacgcggtgccaaggccgtgaatgccgcaaaacacggggtagctggcgtactagtctatactgacccagctgacatcaatgacggcctttccagtcccgatgagacctttcccaattcctggtatctgcctccctccggagtagaacgaggctcttattacgagtattttggcgaccccctgacaccatatctgccagccgttccttcatccttccgagttgatttggctaacgtttcgggcttcccgcctatccccacacaacccattgggtttcaggatgcacgagatctgttatgtaatctgaatggaacactagcacccgctacttggcaaggagccctgggctgtcattatcggcttggaccaggattccgaccggatggcgattttccagctgactctcaagtgaacgtgtccgtgtataacaggttagaattgagaaattcatccaacgtgctggggataatcagaggagccgtggaacccgaccgctacgtgttgtatggcaaccaccgggattcatgggttcacggcgctgttgatccgtcgtccggtaccgccgtgctcctggagctctccagagtcctcgggactctcctcaaaaaggggacgtggagacctaggagaagcatagtcttcgcatcatggggcgctgaagagttcggactgatcggtagcacggagttcacagaggaattcttcaataagctgcaggagaggacggtcgcttatattaacgtggacattagcgtttttgctaatgcgacactgagggtgcagggcacacctccggtgcagtccgtggtgttcagtgccaccaaggaaattcgttctccaggacccggagatttgagtatttacgacaactggatcaggtactttaatcgtagcagccccgtatatggccttgtgcccagtctcggatccttaggtgccggatccgactacgctcctttcgtgcacttcctgggaatctccagcatggatatagcgtatacctatgacagaagcaagaccagcgcacggatctatcccacataccacaccgccttcgatacatttgactacgttgacaaattccttgaccccggattctccagccaccaggctgtggccaggaccgcagggagtgtcatcctgcggctgagcgactccttcttcctgccacttaaggtcagcgactatagtgaaacgctgcgcagctttctgcaggctgcacaacaggacctgggcgcactattagagcagcattcgatatctttagggcctttggtcaccgctgtcgagaagttcgaagcagaagctgcagccctcggccagcggatttctaccctccagaagggctcccctgacccccttcaggtgagaatgctgaatgaccagctcatgctgctggagaggacctttctcaaccctcgggcattcccggaagagaggtactactctcacgtgctgtgggcccctaggaccgggtccgttgttacttttccaggcttatccaatgcatgtagcagagctcgggacactgctagcggttctgaggcctgggcagaagtccagaggcagcttagcatcgtggtcacagcactcgagggggctgctgctactctcaggcctgttgcagacttatag

SEQ ID NO: 231834 - DNA, 2220 bp, synthetic construct
  misc_feature 1..2220: note = Description of Artificial Sequence: Synthetic coding sequence
  source 1..2220: mol_type = other DNA
atgcagtggacgaaggtgctgggtctggggcttggcgcagcagcactactgggtctgggaatcatacttgggcatttcgcaattccgaaaaaggccaatagcctagccccacaggacctggacctggagatcctcgaaacggttatggggcaattggatgctcaccggattcgagagaatcttagagaacttagcagggaaccgcacttggccagtagtccacgggacgaagaccttgtgcagctgctgttgcaaaggtggaaggacccggaaagcggacttgattccgccgaagccagtacatacgaggtactgctttcctttccgtctcaggaacaacccaacgtggtggatatagtcgggccaacaggcggaatcattcatagctgtcatcgaaccgaggaaaatgtcacgggggagcaggggggacctgacgtggtccagccgtacgctgcatatgcacctagcggcacacctcagggactgctcgtatacgcgaacagaggtgctgaagaggattttaaggagttgcagactcagggcataaagctagagggcactatcgctctcacgcgttatgggggagtcggaaggggtgctaaggcggtcaacgcagctaagcatggtgtggctggggtgttagtttatacagacccagcggacattaacgacggactcagctctccagatgagacattccccaactcctggtatcttccccctagtggcgtagaacggggaagctattatgagtacttcggggatcccttaactccttacctgcctgctgtccctagcagctttagggtggacttagccaatgtgagcggttttcccccaatccccacgcagccaatcgggtttcaggacgctcgtgatctgctgtgtaaccttaacggtaccctggccccagccacgtggcagggagccttagggtgtcattatagactggggccaggattccggccagacggagactttcctgcagacagccaggttaatgtgtctgtgtacaaccgattagaactgcgcaatagcagcaacgtgctgggtattatcaggggggcagtcgaaccagatagatacgtgctgtatggaaaccatagggattcttgggttcatggagccgtggatccatcatccggaaccgctgtgctgctggaattatcccgtgtcctaggcaccctgctgaaaaagggtacatggaggccacgaagatctattgtgtttgcttcctggggagccgaagagttcggactaatcggcagcaccgagtttactgaagaattcttcaacaagctgcaggagagaaccgtggcgtacataaatgttgacatctctgtctttgctaatgccaccctgcgggtccagggcacaccgcctgtccagagcgtggtgtttagtgctactaaggagatcagatccccaggaccaggagacttgagtatttatgataattggatcaggtattttaaccggagctccccagtgtatggattggtcccctcccttgggtccctgggtgccggttccgactacgcccctttcgtgcactttctcggaatttcttcgatggatattgcttatacgtacgatcggagtaagacaagcgcaagaatctacccaacttaccacactgcgttcgacaccttcgactatgtggacaagtttctcgacccaggtttcagctcccaccaagccgtggcccgaaccgccggttcagttatactacggctgtcagatagtttttttctgccactgaaagtgtcagattatagtgagactctgagatcttttctccaagctgctcagcaagatctcggcgcactcctcgagcagcactccatatcattaggaccactcgtgaccgctgtggagaagttcgaagctgaggctgctgcgctgggacagaggattagcaccctgcaaaaagggtccccagatcccttacaggtccgcatgctaaacgaccagctgatgcttctggagcgaacctttctaaacccaagggcttttccagaagaacggtattatagccacgtgctgtgggccccaagaggcctcagaagccatatacccggattgagcaacgcatgtagtagagccagggacacagcatcagggtctgaggcctgggctgaggtgcaaagacagctgtcgatcgtagtgacggcactggaaggcgctgccgcaacactgaggccggttgctgatttatag

SEQ ID NO: 231835 - DNA, 405 bp, synthetic construct
  misc_feature 1..405: note = Description of Artificial Sequence: Synthetic coding sequence
  source 1..405: mol_type = other DNA
atggagatctctaagaaaatcaaaacacagtggacatccctgggcctggaggatgtacagtttgtgaactactcagtgctgctcgacttgcctgggccaagtcctagcacagtgacactgagctccagtggccagtgtttccatccaaacggacaaccatgtagcgaggaggcccgaaaggatagctcccaggacctgttgtattcttacgctgcctacagcgctaagggcactctgaaggcagaagtcattgacgtctcctacggcatggcagatgatctgaagcgtattcgaaaaattaagaatgtcactaatcagatcgcactactgaaactgggtaaactgcctcttctgtacaagatgaaagtgctcgacaaagctgaccaaaccagtcctctgtattag

SEQ ID NO: 231836 - DNA, 2388 bp, synthetic construct
  misc_feature 1..2388: note = Description of Artificial Sequence: Synthetic coding sequence
  source 1..2388: mol_type = other DNA
atgggggagaacgaggcgtcactacccaatacctctctacagggcaagaaaatggcttaccagaaagtccatgcagaccaacgcgctccgggtcattcgcagtatttggacaatgacgacttgcaggccacagcacttgacttggaatgggatatggagaaggagctggaagagtccggcttcgatcagttccagctggacggggctgagaaccaaaacctgggccattcagagactatcgacctgaacctggacagcattcagccagccacctctcccaaagggaggtttcagaggctgcaagaagagagtgactatatcactcactataccaggtcagcaccaaaatccaaccgatgcaacttctgtcatgtgttaaaaattctatgcactgccacgatcctcttcatcttcggcatcctaatcggctattacgtccatactaactgcccctccgacgccccttcatcaggaactgtcgatccccagttgtaccaggagatcctcaagacaattcaggccgaggatatcaagaagagcttccggaacctggtccaactatacaagaatgaggatgatatggagatcagcaagaagattaaaactcaatggacatccctcggactggaggacgtacagttcgttaactattccgtgttgctggacctgcctggcccatccccctcgacggtgactctgtcttctagtggtcagtgctttcaccctaacggacagccttgctcggaggaggctcgcaaggatagttcacaggacctgctttatagctacgctgcttatagcgccaaggggactttaaaagccgaggtgatagacgtgtcctacggaatggctgatgatcttaaacgtattagaaagattaagaatgtgactaaccagattgctctgttgaagctcggcaaactccccttgctgtataagctgagctcattggagaaggctgggtttggtggggtgctcctgtatattgacccttgcgatctcccaaagaccgtcaacccaagccacgacacattcatggtgtcccttaatcccggaggcgacccttctactcccggatatccctccgtggacgaaagcttccgccagagtcgatccaatctgacatcactcctcgtgcaacctatatccgccccactcgtggcaaagctcatttcaagcccgaaggctcggactaagaatgaggcttgctcaagtcttgaattgcctaacaacgagatccgagtagtctccatgcaggttcagactgtcactaagctgaagaccgtgacgaatgttgtgggtttcgtaatgggtctgactagccccgatcggtatataatcgtgggaagtcatcatcacactgcccactcatataatggacaggagtgggcatcgagtaccgcaattattactgcatttatccgagccttgatgtccaaagtgaagaggggctggcgcccagaccgcactatcgtgttttgcagctgggggggaactgcgttcggtaatatcggctcctacgaatggggcgaagacttcaaaaaagtccttcaaaagaacgtggtggcatatatctctctgcacagccctattcgtgggaatagtagtctgtacccagtggcttcgccttcgttgcagcagctggttgtggagaaaaacaacttcaattgtactcggagggcccaatgcccagagaccaatattagctccatacaaatccagggggatgcggactatttcatcaaccacctaggtgtgcctatagtgcaatttgcgtacgaagatattaaaaccctggaagggccatctttcctgtccgaggccaggttctccacacgtgctacaaagatagaggaaatggatcccagctttaacctgcatgaaaccattaccaagctctctggggaggtgatacttcagattgcgaacgagcccgtactcccattcaacgcccttgatatcgccctggaggtacagaataatctgaagggagaccaacctaacacccatcagctgctggcaatggccctccgactgagagaaagtgccgaactgttccaatcagacgagatgcgtcctgccaatgatcctaaggagagagctcctatcagaatccgtatgttgaatgatatcttgcaagatatggaaaaaagctttttagttaagcaggcaccccctggattttatcggaacatactgtaccacctggacgaaaaaacgtcaagattttctatcctcatcgaggcttgggagcattgtaagccgctggcgagtaacgagacgctgcaggaagccctgagcgaagtgctgaattctatcaatagcgctcaggtgtatttcaaagctgggctcgacgtgttcaagagcgtgctagatggcaagaattag

SEQ ID NO: 231837 - DNA, 1236 bp, synthetic construct
  misc_feature 1..1236: note = Description of Artificial Sequence: Synthetic coding sequence
  source 1..1236: mol_type = other DNA
atgctcctcaagacagtccttctgctcggccatgttgcacaggtgttgatgcttgacaatgggctgctgcagactccgccaatgggatggctggcttgggagcgatttcggtgtaacatcaactgtgacgaagacccgaaaaattgcataagcgaacagttatttatggaaatggccgatagaatggctcaagatggctggagagatatgggatacacctacctgaatatcgatgactgttggataggcggaagggacgcatctggcagactcatgcctgatcctaagcggtttccgcacggcatccctttcctggctgactacgtccattcgctagggttaaaacttggtatttatgccgatatgggcaattttacttgcatgggctatccagggaccacgctggacaaagtcgttcaggacgcgcagaccttcgcagagtggaaggttgacatgctgaaattggacggctgcttctctactcccgaggaaagagctcaggggtatcccaaaatggccgctgcactcaacgcgacagggcgtccaatcgcgttttcatgctcctggcctgcatacgagggcggtttgcctcctcgggtgaattactctctccttgctgatatctgcaacctctggcgaaattatgacgatattcaggacagttggtggagcgtgcttagcatcttaaattggttcgtggagcaccaggacatcctgcaaccggtggcgggacctggccattggaacgaccctgatatgctgcttatcggaaatttcggcctttccctggaacaaagtcgggcacagatggcactgtggacagtgctggctgcaccactgctcatgtccaccgatctcagaacgatttctgcacagaacatggacattctgcagaacccactcatgatcaagattaatcaggatcccctaggaatccagggccgtaggatacacaaagaaaaaagcttaattgaagtttacatgagacccttatccaacaaggcctctgcacttgtgttcttctcctgcaggacagatatgccataccgataccactcttctctcggacagctgaattttactggtagcgtgatctacgaagcccaggatgtgtacagtggagatattatctccggactccgagacgagaccaacttcaccgtaatcatcaacccttccggagtggtgatgtggtatctgtaccccataaaaaaccttgagatgtctcagcagtag

SEQ ID NO: 231838 - DNA, 1236 bp, synthetic construct
  misc_feature 1..1236: note = Description of Artificial Sequence: Synthetic coding sequence
  source 1..1236: mol_type = other DNA
atgctgcttaagacagtcctcttgttgggccacgtagcacaggtgctgatgctggataacggcctcttacagaccccccctatgggatggctcgcttgggagagattcagatgcaatatcaactgcgatgaagaccctaagaattgcatttcagagcagttattcatggagatggccgaccggatggctcaagatggctggagagacatgggctatacgtatctgaatatagatgactgctggatcgggggtagagacgcatcaggtcgcttgatgccggacccgaagcggttccctcatggaatcccgtttctggcagattatgttcactcactgggcttgaagctcggtatctatgctgacatggggaattttacttgcatgggctatcccggtaccactttggataaggtggtgcaggatgcgcagacctttgctgagtggaaagtcgacatgttgaaacttgatggatgcttctcgactccagaagagcgggcacagggctacccaaagatggctgccgcactaaacgcaacaggtcgaccgattgccttctcttgtagttggccagcatacgaaggagggctgcctccacgggtcaactacagcctgctggctgacatttgcaatctttggcgaaactacgacgatatccaagatagctggtggtcagtactgtcaatcctcaactggttcgtcgagcatcaggacatcctccagcctgtggcaggtcccggtcactggaacgacccggacatgctactgatcgggaattttggccttagcctcgagcaaagccgggcacaaatggccctgtggaccgtgctggctgctcctctcctgatgtctactgatctacgcacaatcagcgctcagaacatggacattctgcagaacccactgatgattaaaattaaccaggatccactgggcattcagggaaggcgtatccataaggagaagtcattgattgaggtgtacatgaggccattgagcaacaaagccagcgcacttgttttcttttcctgtagaaccgacatgccttatcgctatcacagttcactcggtcagctgaattttactggaagcgtgatttacgaagctcaagacgtgtactccggggacataatttccggccttagagatgagaccaatttcactgttattatcaacccctctggcgtggtgatgtggtatctttaccccataaagaatctggagatgtcccaacagtag

SEQ ID NO: 231839 - DNA, 1236 bp, synthetic construct
  misc_feature 1..1236: note = Description of Artificial Sequence: Synthetic coding sequence
  source 1..1236: mol_type = other DNA
atgttgctgaaaaccgtgctactgctcggacacgttgctcaagtactgatgctcgataacggcctcctacagacacctcctatggggtggctagcctgggagcgtttcaggtgcaacattaattgtgacgaagatccaaagaattgcatctccgaacagctgttcatggaaatggccgacaggatggctcaagatggttggcgcgatatgggttacacttatcttaacatagatgactgctggattggcggacgtgacgcttctggtcgtctcatgccagatccaaagaggttcccgcatgggatcccctttctcgcagactatgtgcacagtctgggtcttaagctggggatctatgcagacatgggaaatttcacatgcatgggatacccgggaactaccctcgataaagtggtgcaagacgcgcagaccttcgctgaatggaaagtggatatgctgaaactggacgggtgtttctccacccctgaagagagggcccaagggtacccaaaaatggccgctgcactgaacgcaactggacggccaatcgcatttagctgcagttggccggcttatgagggtggacttccacctcgcgtgaattactcactgcttgcagacatctgcaatctgtggagaaactacgatgacattcaggacagctggtggagtgtgctgagcattttgaattggttcgtggaacaccaggatatactgcagccagtggcgggtcccggtcattggaacgacccagacatgctgctaataggaaatttcgggctgagtctcgagcaaagtcgcgctcagatggctttgtggacagtgctagccgctcctctgttgatgtctaccgacctccggacgatctctgctcagaacatggatatacttcaaaaccccttgatgatcaagatcaaccaagaccccttggggattcagggaagaagaatccacaaggaaaaaagtttgatcgaagtgtacatgcgaccactttcgaataaggcttctgccttggtgtttttttcttgtcggaccgatatgccataccgctatcactcttctctggggcagctgaactttaccggttctgtaatctacgaagcccaggacgtgtactccggcgacattatttctggccttcgggacgagactaatttcactgtgataatcaatccttctggagtggttatgtggtacctgtatccgatcaagaatcttgaaatgtcacagcagtag

SEQ ID NO: 231840 - DNA, 1035 bp, synthetic construct
  misc_feature 1..1035: note = Description of Artificial Sequence: Synthetic coding sequence
  source 1..1035: mol_type = other DNA
atggctgcaatctacggaggggtagaaggcggtggcacaaggagtgaggtcttacttgtttctgaagacgggaagatactcgccgaagccgacggcctgtccacaaaccattggctaataggtaccgacaagtgcgtggagcgaatcaatgagatggtgaatagggcgaagaggaaggctggcgtcgatcccctcgttcccctgagaagcttgggactctcactatcgggtggagatcaagaggatgccggaaggatcctgatcgaggaactgcgagaccggttcccttatcttagcgaaagctatctgatcactacagacgctgctggttcaattgcaactgctacaccggacggcggagtcgtcttgatttcaggcacagggtccaactgtaggctgatcaacccagatggctcagaatctggctgcgggggatggggccacatgatgggagatgaagggagtgcctactggattgcccaccaagctgtgaagattgtgtttgacagcatagataatctggaagcagcccctcatgatattggatatgtgaagcaggcaatgttccactactttcaggtgcccgataggcttgggatcttgacacatctgtaccgggactttgacaaatgccgtttcgccggtttttgccgcaagatcgctgagggcgcacagcagggggaccctctttcccggtatattttccgcaaggctggagagatgctgggcagacacatcgtggctgtgctgccagagatcgatcccgttctgttccagggaaagatcggattgccaatcctgtgtgttggaagtgtttggaaatcctgggaactgctgaaagaggggttcctcctcgctctgacacagggtagggagatccaagcccagaatttctttagcagtttcactttgatgaaactgcgccattcatctgctcttggaggcgcttccctcggggcacggcacatcggccacctgttacctatggattatagcgcaaacgccatagccttctactcttacacatttagctag

SEQ ID NO: 231841 - DNA, 1173 bp, synthetic construct
  misc_feature 1..1173: note = Description of Artificial Sequence: Synthetic coding sequence
  source 1..1173: mol_type = other DNA
atgcggaccagaaccggctcacagctcgctgcacgcgaggtgaccggatccggggcagtgcctagacagctggaaggtcgccgttgtcaggctggcagagacgctaacggagggacaagctccgacgggagctcctccatggcagcgatttatggaggcgttgagggtgggggtactaggtctgaagtgcttctggtatcggaggatggcaaaatcttggccgaagccgatggcttgagcacaaatcactggctgatcggcactgataaatgcgtcgaaaggatcaatgagatggtgaacagggctaaacgcaaggccggtgtggatcctcttgtgcccttgcgttccctgggcctgtccctgtctggtggtgatcaggaggacgcagggaggatcttgattgaggagctgagagatcgttttccctatctgtccgagtcatacttgattacaaccgatgcggctgggtcaatcgccacggccactccggacggaggcgtcgtcctgataagcggcaccggatccaattgccgactgatcaacccggatgggtccgaatccggttgtggaggatggggacacatgatgggggatgagggctcagcatattggatagcccatcaggcagttaagatcgtgttcgattccatcgataacttggaagcggctccacatgatataggatatgtgaagcaggccatgtttcattattttcaagtgccagatcgtctcggcatcctcacccatctctatcgggactttgataaatgcagatttgctggcttttgtaggaaaatcgcagagggtgcccaacagggggacccactgtcgcggtatatttttcgcaaggccggagagatgttaggcaggcacattgtcgcagtgttacctgaaattgaccccgtgctttttcagggaaaaattggcctgcctatcctctgcgtcggcagcgtatggaagtcatgggagctgcttaaggaagggttcctgctcgcgttgacacagggtcgcgagatccaggctcagaattttttttccagctttacgcttatgaaactgcgacacagctctgctctgggtggcgcatccctgggggcaagacacattggtcacctgctgcctatggactatagcgctaacgccattgctttctactcctacacattctcttag

SEQ ID NO: 231842 - DNA, 1548 bp, synthetic construct
  misc_feature 1..1548: note = Description of Artificial Sequence: Synthetic coding sequence
  source 1..1548: mol_type = other DNA
atggccactagcacaggcagatggctgctacttcggctcgccttattcgggttcctgtgggaggccagtggcggtctcgacagtggagcatcccgcgacgacgatctgctactgccatacccaagggcgagagcacgtttgcctcgtgattgtacacgggtccgtgcaggcaaccgagaacatgaatcatggccccctccacccgctacccctggcgctggtggattggctgtcagaacatttgtaagtcacttcagggaccgggcagtggccggacacctaaccagagccgtggagcctctgagaacatttagcgttctggaaccaggtgggccaggcggatgcgctgctcgcagacgggctaccgtagaagagacagctagagccgcagactgccgagtagctcagaacggaggcttctttcgtatgaactcgggagaatgtctggggaatgtcgtctccgacgagcgtcgggtttcctcaagtggcggtctccagaatgcacagttcgggattcgaagggacggcactctggtgaccgggtacctgtccgaagaagaggtgctggataccgaaaatccctttgtgcagctgttgagtggtgtcgtgtggctcatccgcaacggtagtatttatatcaatgaaagtcaagccacggagtgcgacgaaacacaagaaaccgggtctttcagtaaatttgtgaacgttatttcagccagaaccgctataggccatgaccggaagggacagcttgttctcttccacgctgatgggcagaccgaacagcgaggaatcaacctctgggagatggccgaattcctgctcaaacaggacgttgtgaatgcgataaacctggatggaggaggctcagctaccttcgttctgaatggcaccctggcctcctatccctccgatcactgccaagataacatgtggaggtgccccagacaggtgtctactgtggtgtgcgttcacgagcccagatgccagcccccagactgtcatggtcacggaacctgcgtcgacgggcactgtcagtgtactgggcacttctggagaggtcctggctgcgatgagctggattgtggtcccagcaattgcagtcagcatggcctttgcactgaaactggatgtcgatgcgacgcgggttggactggctcaaattgttccgaagagtgtcccctagggtggcacggtcccggttgccagcggccttgcaagtgtgaacatcactgcccgtgtgaccctaaaactggcaactgttcagtctcccgggtcaagcagtgcctgcagccccctgaagcaaccctgcgggcaggcgaacttagcttctttacccgaaccgcttggttagcgcttacccttgcgctcgcctttttactgcttataagcaccgcagctaatctgtctctgcttttaagtcgcgcagagcggaaccggaggctgcatggtgactacgcctaccatcctctacaggaaatgaatggtgagcccctcgccgctgagaaagagcagcctggaggggctcataaccctttcaaagactag

SEQ ID NO: 231843 - DNA, 1446 bp, synthetic construct
  misc_feature 1..1446: note = Description of Artificial Sequence: Synthetic coding sequence
  source 1..1446: mol_type = other DNA
atggcaacttctactggtcgatggctcctgctccggttggccctgtttggttttctctgggaggctagcgggggactcgattcaggtgctagccgcgatgacgatctgctgttaccataccccagagcccgagctcgcctgcccagggattgcacccgggtaagggcgggtaatagggagcatgaatcctggccacccccaccagccacacccggagccggaggcctggccgttaggacgtttgtatcacactttcgggaccgagctgtagcaggacacctgacacgggctgtagaaccactacgtacttttagcgtgttggaaccgggagggccaggaggatgtgcagctagaaggagggctacggtggaggagacagcgcgagccgctgattgtcgcgtggcccagaacggaggcttttttcggatgaacagcggtgagtgcctgggcaacgtggtgtctgacgagagaagggtgtcctcatccgggggtctgcaaaatgcccagttcggaattaggcgtgatggaacattggttaccggctatttatccgaggaggaggtattagatactgagaacccgtttgtgcagctgctcagcggcgtagtctggttgatccgcaacggcagtatttacattaacgaatctcaggccaccgagtgtgatgaaacgcaggaaactggaagcttctctaagttcgtaaatgtgatatccgcaaggactgctattggccacgaccggaagggtcagctggtacttttccacgcagatggacaaaccgagcagagagggatcaacctttgggagatggctgagtttcttctcaagcaggatgtggtaaatgccattaacttggacggcggaggctctgccactttcgtcttgaacggtacactggcttcctatcccagcgaccactgccaagacaatatgtggaggtgcccgcgacaggtgtcaactgtcgtgtgcgtccacgaaccaagatgtcagcctcccgactgtcacgggcacggtacctgtgtagacggtcattgtcagtgtactgggcatttctggcggggtccaggctgtgacgaactcgattgcggtccttccaattgctcccaacacggactatgcactgagaccggatgcaggtgcgacgccggatggacaggaagtaattgttccgaggtgaagcagtgcctccaacctcccgaagcgaccctgcgtgcgggtgagctatccttcttcactcggactgcgtggctagcccttactttggctctcgcttttttgctgctgatatctactgctgctaatctgagtctcctgctgtctcgagccgaaagaaaccgccgattgcatggggattacgcataccacccactccaggagatgaacggagagcctctggccgcagagaaagagcagcccggaggcgctcataacccctttaaagactag

SEQ ID NO: 231844 - DNA, 2514 bp, synthetic construct
  misc_feature 1..2514: note = Description of Artificial Sequence: Synthetic coding sequence
  source 1..2514: mol_type = other DNA
atggctgagcctagtcaggctcccacccccgctcccgctgctcagccacgtcctctacagagccctgcgccagcgcctactcccacgccggcaccctctcccgcatcagctccaattcccacaccaacacctgctccagccccagcacctgccgctgcccctgcaggatccacaggcacaggcggacccggagtcgggtccggcggagcaggatccgggggagaccccgctaggcccggattgagccagcagcagagagcctcacagcggaaggcacaggtccgaggcctccctcgagctaaaaaattggagaaactgggcgtgttttcagcttgcaaggctaatgaaacctgtaaatgtaacggctggaaaaaccctaagcccccaaccgccccacgaatggatctgcagcagccagccgcaaacctctcggagctctgccgatcctgcgaacatcctctggccgatcacgtgagtcacctagagaacgtgagtgaagacgaaatcaatagattgctggggatggtggtcgatgtcgaaaacctttttatgtccgtgcacaaagaggaagacacggatactaagcaggtctacttttaccttttcaagctgcttcggaagtgtatcctgcagatgacccgcccagttgtggagggatctctagggagcccacctttcgagaaacccaacatcgagcagggggtgcttaacttcgtccagtacaagttttctcacctggcgcctcgggaacgccagaccatgtttgagctcagcaaaatgttcttgttatgcctcaattactggaaattagaaacacccgctcagtttagacagaggtctcaggctgaggacgtggctacatataaggtaaactataccagatggttgtgttactgccacgtgcctcagagctgcgatagtctccctcgctatgaaaccactcatgtattcggcagatcccttctccgctccatcttcacggtgaccaggcgccagttactggagaagttcagagtggagaaagacaagttggtacctgaaaagcggaccctgatcctgacgcatttcccaaagttcctgtctatgctagaagaggagatctatggggcaaacagcccaatttgggaatccggctttactatgcccccatccgaagggacccaactggtgcccagacctgcctcggtctcagcagccgtggttcctagcacccctatcttcagtcccagcatgggtggcggatccaactcctccctaagtttagattctgcaggcgctgaaccaatgcctggggaaaaaaggactctgcccgaaaacttgactctggaggacgctaaaaggctccgggtgatgggcgatattcccatggagttagtaaacgaggtcatgctgaccatcacggaccccgcagccatgcttgggccagaaacctccttattgtctgctaacgcggctcgagacgagaccgctcgcctggaggagaggcgtggcatcatcgagttccatgtaatcggcaattccctcactcccaaggctaaccgacgcgtcctgctctggttggtcgggttgcagaatgtattctcgcaccagttacctcggatgcccaaagagtacattgctaggctcgtgttcgatcctaaacacaaaacactggcgctcatcaaagatggtagggtcatcggcggaatctgcttcaggatgtttccgactcagggcttcaccgagatcgtgttttgcgcagtcacttccaatgagcaagtgaagggatacggcacccacctgatgaatcatttgaaggaatatcatatcaagcacaacatcttgtacttcctcacgtatgccgatgagtacgccattgggtattttaaaaagcaggggttctctaaggatataaaggtgcccaagagtagatacctaggttatattaaggattacgagggggctaccctcatggaatgtgaacttaatcccaggatcccctacaccgagctgagtcatattatcaaaaagcagaaggagattataaaaaagctaatcgagcgcaagcaagcacagatccggaaggtgtaccccggactgagctgtttcaaggagggggtcaggcagatacccgtcgagagcgtaccagggataagagaaacagggtggaagccgttgggtaaggagaagggtaaagaactgaaggatcccgatcaactatatactaccctcaagaatctcctcgcgcagatcaaatcccatcccagtgcctggcctttcatggaaccagttaaaaagagtgaagccccagactattatgaagttatacgttttcccattgacctgaaaaccatgacggagaggctgagaagtagatactatgtgactcggaaactttttgtagccgatctgcagcgcgtgatcgcgaactgtcgggagtacaatcccccagacagcgaatactgtcggtgcgccagtgcacttgaaaagtttttttattttaaactgaaggaggggggtctgatcgataagtag

SEQ ID NO: 231845 - DNA, 1260 bp, synthetic construct
  misc_feature 1..1260: note = Description of Artificial Sequence: Synthetic coding sequence
  source 1..1260: mol_type = other DNA
ccacagtgctgcttgcacagtagaggtatgttccctaggctgtccccggtagatacggaggccgtctggttgctccagggttggctgttccagcaccagccccaattttggggaccggcacagattagagctgtcctgggcgctgtgccacgaggtcgactcctggtactggacctctttgccgagagccagccggtttacacccgcaccgcttcttttcaaggccagccttttatatggtgtatgctccacaactttggaggcaatcatggactatttggagccttagaagccgttaacggcggacctgaggcagcacgactgtttcccaactcgaccatggtggggaccggtatggccccagaaggaatcagccaaaacgaagtcgtgtatagtctgatggccgagcttgggtggcgcaaagatccggtgcctgatctcgctgcttgggttacttccttcgccgcacgaaggtatggtgtgagccaccccgacgccggtgccgcttggcgactgctgctgcgtagcgtttacaactgttcaggggaagcctgccggggacataataggagtccccttgtgagacgtccttccctgcagatgaacaccagcatttggtataatagaagtgatgtatttgaagcctggcgactgctcctgacgagcgcacctagcttggccacctccccggcttttaggtatgatctcctggatttgaccagacaggccgtgcaagagcttgtttccctttattacgaggaggccagatcagcatacctcagcaaggaactcgcctcactcttgagggccggtggagtgctggcttatgagttgctgccagccttggatgaagtcctggccagtgatagtcgttttttgctgggctcctggctggaacaggcgagggctgctgctgtgtccgaagccgaggctgacttctacgaacagaactctaggtatcagctaacgctgtgggggccagagggtaatatcctcgactacgcaaacaagcagcttgcaggactggtggcaaactattacacccctcgctggcgcttatttctggaggcattggtcgattccgtggctcagggaatcccttttcagcagcatcagttcgacaagaatgtattccagctcgaacaagctttcgtgctctcgaaacagagatacccttctcagccaaggggagacaccgtcgacctcgccaaaaaaatctttcttaaatattacccccgttgggtggcaggctcatggtag

SEQ ID NO: 231846 - DNA, 963 bp, synthetic construct
  misc_feature 1..963: note = Description of Artificial Sequence: Synthetic coding sequence
  source 1..963: mol_type = other DNA
atggcttttccaaagaagaagttacagggcctggtggccgctacaattaccccaatgaccgaaaacggcgagatcaatttctcagtgatcggtcagtatgtggattacctcgttaaagagcagggcgtgaagaatattttcgttaatgggactaccggagagggcctgtctctttccgtgagtgagagacgtcaagttgccgaggaatgggtgacgaagggtaaggacaaactcgatcaagttatcattcacgtcggggcactttccttgaaagaaagccaggaactagcccaacatgcggcagaaatcggagccgacggaattgctgtcattgcgcctttctttctaaagccctggaccaaagacattttgattaacttcctaaaagaggtcgcggctgccgctcccgcattgcctttctattattatcacatacctgcgctgacgggggtgaagattcgggcagaagaactgctcgatgggatattggacaaaattcctaccttccagggcctaaagttttcggacaccgatctgctagactttggtcagtgcgtcgatcagaaccggcagcagcagttcgcctttctgtttggcgtggatgagcagctgttgagtgccctggttatgggagcaactggcgctgtcggtagtacctacaattacctcggaaagaagacaaaccagatgctggaagcatttgagcagaaggatttttccttggcgttaaattatcagttctgcatacagaggttcataaatttcgtcgttaagctcggcttcggggtttcacagaccaaagctattatgacgttggtgtctggcatcccgatggggccacccaggctgcctctgcaaaaagccagccgtgagttcactgactctgcagaggccaaactgaagagccttgattttctgagcttcactgatctaaaggatggaaaccttgaggcaggttcatag

SEQ ID NO: 231847 - DNA, 330 bp, synthetic construct
  misc_feature 1..330: note = Description of Artificial Sequence: Synthetic coding sequence
  source 1..330: mol_type = other DNA
atggccttcccaaaaaagaagctccaggggttagttgccgcaactataaccccaatgactgagaacggcgaaataaacttcagtgtaattggccaatatgtggactacttggtcaaggagcagggtgttaaaaacatatttgtgaacggaactaccggcgaaggactctccttgagtgtgagcgaacgcaggcaggtggccgaggagtgggtcactaaagggaaggacaagagcaaccaccacaagctcggaacaattcgcactacacagtctcggagatcctcttttagacgccaattgaaggcgtggcatagcggatcccacctgtag

SEQ ID NO: 231848 - DNA, 558 bp, synthetic construct
  misc_feature 1..558: note = Description of Artificial Sequence: Synthetic coding sequence
  source 1..558: mol_type = other DNA
atgagccgggcaccgggtatcctggcaagttggcggcgagcgccttctctgtcagtgcaaaagggatctcagaccgccaggcacacatgtcacccagaggtgcccttgggtaattgcttcctccctgtctacaaggcgagccccctgactgtgacgaggttatgggcagagcgactggaccaagtaattattcacgttggagccctctctcttaaagaaagccaggagctggcccagcatgccgcagagattggcgcagacggcattgcagtgatcgctccgttcttcttaaagccctggacaaaggacatcctcatcaatttcctcaaggaggtggctgcagccgctccagcactacctttctattactaccatatccctgcactgacaggcgtgaaaatcagagcggaggagttgttggatggtatactcgacaaaatccccacttttcagggactcaaattttcagatacagatctgttggactttggacagtgtgtggatcagaaccgccagcagcagtttgcgttcctgtttggtgtagacgagcacctttag

SEQ ID NO: 231849 - DNA, 723 bp, synthetic construct
  misc_feature 1..723: note = Description of Artificial Sequence: Synthetic coding sequence
  source 1..723: mol_type = other DNA
atggcatttcccaagaagaagcttcaaggactggtcgccgcaaccattactcccatgacggaaaatggggagatcaattttagcgtcataggccagtatgtagactatctcgtcaaagaacagggagtaaaaaatattttcgtgaacggaaccactggagaaggactgagtctatcggtgagcgagcggaggcaggtcgctgaggagtgggtaaccaaggggaaggataaactcgaccaggttataatacacgtcggagccctgagcctgaaggagtcccaggaacttgctcagcacgcagctgagatcggagctgatggcatcgccgtaatcgccccatttttcctcaaaccctggacaaaggacatactgattaattttctcaaagaggtagctgcagctgccccagccttgcccttttactattatcatatccctgccttgacaggggtgaagatcagagcagaagagctgttggacgggatcctcgacaaaattcccacctttcaggggctgaagttctccgatactgacctcctcgacttcggccagtgtgtggatcagaacaggcaacagcagttcgcgttcctcttcggggtggatgaattctgtatccagaggtttattaattttgtggtgaaattggaaaattccaagctgaaagtgagcaaaaaccagagaacactgccattaggaacgactaatttcccgtttttgcattag

SEQ ID NO: 231850 - DNA, 963 bp, synthetic construct
  misc_feature 1..963: note = Description of Artificial Sequence: Synthetic coding sequence
  source 1..963: mol_type = other DNA
atggcattccccaagaagaagctacagggcttggtggcggctacgataactcccatgaccgaaaatggcgagatcaatttcagcgtcatcggtcagtatgttgactacttggtgaaagagcaaggtgtcaagaacatcttcgtcaacggtacaaccggcgaggggcttagtctttctgtcagcgagagacgccaggtggccgaagagtgggtgaccaaggggaaagacaaattagaccaagtgatcatccatgtgggagccctgagtctcaaggaaagtcaagaattggctcagcatgccgctgagatcggagcggacggcatagctgtaattgccccattttttctgaagccctggacaaaggatattctcattaacttcctcaaagaggttgcagccgctgccccagcgctcccattctactactatcatatccctgccctgacaggcgtgaaaatccgcgctgaggagctcctggatggaatcttggacaagatacctactttccaggggctcaagttttctgatacggatctgttggacttcggacagtgcgtcgaccagaaccgccagcagcagttcgcgtttctgtttggggtggatgaacagctcctgagcgcgcttgttatgggtgctacgggagccgttggttccacttacaattacctgggcaaaaagacaaaccagatgctcgaggccttcgagcaaaaagatttctcattagcgctgaattatcaattttgcatccagagatttatcaactttgttgtcaagctgggatttggcgtctcccagacaaaagccatcatgaccctcgttagtggaatacctatggggcctcctcgtctcccgctgcaaaaagcgtcgagggaatttaccgacagcgctgaggcgaagctgaaatctctggactttctgtcttttaccgatctgaaggatggcaatctcgaggccggatcatag

SEQ ID NO: 231851 - DNA, 906 bp, synthetic construct
  misc_feature 1..906: note = Description of Artificial Sequence: Synthetic coding sequence
  source 1..906: mol_type = other DNA
atgagtcgcgcaccaggaatcctggcgtcctggcgccgagccccaagcctcagtgtccagaagggctctcagactgcacgacacacttgtcatccagaagtgcccttagggaactgtttcctacctgtgtacaaagcctcaccgctcacagtgactcggctgtgggccgagaggctggaccaagttattatccatgtaggggctctctcattgaaagagagtcaggaactcgcccagcacgcagccgaaatcggtgcagatggcatcgctgtgatagcccctttcttcctgaagccttggacaaaagacatcttgattaactttttgaaagaagttgctgccgcagctcccgctctccctttttactactatcacatccctgccttgactggtgtgaaaatacgggctgaggaactgttagacgggatcttggacaagatccctactttccagggcttaaaattttctgacacagaccttttggattttggacaatgtgtagatcagaatcggcagcaacaattcgcattccttttcggggtcgatgagcagttgctgagtgccctagttatgggcgctactggggctgtgggcagcacctacaattacctgggcaagaaaacaaatcagatgctggaagcgttcgaacaaaaggatttcagcctggccttgaactaccagttctgcatccaaaggttcatcaacttcgtagtaaaactcgggttcggtgtgagccagaccaaggcgattatgactctggtgagtgggatacctatgggacctcctcggttgcccctgcagaaagcgtcccgggagttcaccgatagcgcggaggccaaactcaaatcactggacttcttgagtttcacagacttgaaagacggaaatcttgaggccggaagctag

SEQ ID NO: 231852 - DNA, 723 bp, synthetic construct
  misc_feature 1..723: note = Description of Artificial Sequence: Synthetic coding sequence
  source 1..723: mol_type = other DNA
atggcttttccaaagaaaaaattgcaagggctggtagcagccacgatcactccgatgaccgagaatggggagattaatttctctgtcatcgggcagtatgtggactatttagttaaagagcagggggtgaagaacatcttcgttaacgggacaaccggagaggggctaagcctttctgtgtccgaaagacgccaagtagctgaagaatgggtgaccaagggtaaagacaagctagatcaggtgattatccatgtgggagcactttccttgaaagaaagccaggagcttgcccagcacgccgctgagatcggtgccgacggcatagccgtaattgcccctttcttcctcaagccctggacaaaggatatcctgatcaacttcctgaaggaagtagccgcagcagcacccgctctgccattctattactatcacattcctgccctgactggtgtaaagattcgcgctgaagaactgttagatggcatcctggataaaattcctactttccagggcctcaagtttagcgataccgatctgctagactttggccagtgcgtcgatcagaacagacagcagcagtttgcttttcttttcggggtagatgaattttgcatccagagatttataaactttgttgtcaaattggagaattcaaaactcaaggtgtccaaaaaccaacgaacacttccactgggaactacaaatttccccttcctccactag

SEQ ID NO: 231853 - DNA, 624 bp, synthetic construct
  misc_feature 1..624: note = Description of Artificial Sequence: Synthetic coding sequence
  source 1..624: mol_type = other DNA
agagaaggtcaaaaaggcagccagacagccagacacacgtgccacccggaggtgcctctcggtaactgttttctacctgtgtacaaggcctcacctcttaccgttactaggctgtgggccgagcgattggaccaggttataatccacgttggtgccttgtcattgaaggaatctcaggagctggcacaacacgccgcagagataggtgccgacggcattgcggtcatagcccctttctttctcaagccctggacaaaggatatattgattaacttcctcaaggaggttgccgctgcggcacccgcattaccattttattattatcacatccctgccctcaccggagtgaaaactaccgtagaatgctccggagatggctcaaattggagttcaggccagttctgcatacagcgattcatcaattttgtggtgaaactgggctttggcgtctcacagactaaggccattatgacgcttgtgagtggcattccgatgggtccacccaggttgcctctgcagaaagcctcgagggagtttacggactctgcagaagctaagctcaaatctcttgatttcctttcattcacagacctcaaggacggcaatctggaggctggaagttag

SEQ ID NO: 231854 - DNA, 747 bp, synthetic construct
  misc_feature 1..747: note = Description of Artificial Sequence: Synthetic coding sequence
  source 1..747: mol_type = other DNA
atgggactgagtagagttcgggcagtttttttcgacttggataatacactcattgacaccgctggagcctctcgacgtggtatgttagaagtgattaaactgttgcagtcgaagtaccactacaaggaggaggctgagataatttgtgataaggtccaagtcaaattgtccaaggagtgctttcacccctacaatacttgcattacagacctgagaacttcgcattgggaggaggcaatccaggagaccaagggaggggctgccaatcggaagttagccgaggagtgttacttcctctggaagtcaacgaggctccaacacatgactctcgccgaggatgttaaagctatgctaacggagctgcggaaggaggtgagattacttttgttgacgaacggggaccggcagacccagcgggagaagattgaggcttgcgcttgccagtcgtatttcgacgctgtagtggtcggaggagaacagcgcgaggagaagcctgccccatcaatcttctattattgttgtaacctcctgggagtccagccgggagactgcgtgatggtcggcgacactctcgagaccgatatccaggggggtctgaatgctggactgaaggcaacagtgtggattaataaaaatggaatcgtccctctgaagtccagcccagttccccattatatggtcagctcagtgcttgaactccctgctcttctgcagagcatcgactgcaaagtgagcatgagcacctag

SEQ ID NO: 231855 - DNA, 1515 bp, synthetic construct
  misc_feature 1..1515: note = Description of Artificial Sequence: Synthetic coding sequence
  source 1..1515: mol_type = other DNA
atggctgcccaagcactggccctgcttcgggaggttgcacggctggaggctcccctcgaggaactgcgggctctacactcagttctgcaggccgttcctctcaatgagttgaggcagcaagccgcagagctcaggcttggaccactcttttccctgctgaacgagaaccaccgagagaaaactaccttatgtgtctctatcctggagagactgctgcaggccatggaaccagtccacgtcgcacgcaaccttcgagttgatttacagagaggtttgatccatcccgacgactcagttaaaatcctcaccttaagccagatcgggcgaattgttgagaacagcgatgcagtcactgagatactgaacaacgctgagctgctgaagcagatcgtctactgcattgggggagaaaacctgtctgttgctaaggccgcaatcaaaagtctctctaggatttccctcacacaggccggtctcgaggcccttttcgaaagtaacctgcttgacgatctcaaaagtgttatgaagacgaacgacattgttcggtaccgagtctacgagttgatcatcgagatatcctcagtgtctccagagtcactgaattattgtacaacatctggtttagtgactcagcttctgagagagcttaccggcgaagatgtgctggttagagcaacatgtattgagatggtgacctctctggcttacacacaccatggacgccaatacttagcccaggagggggtgatcgaccaaatttccaacattattgtgggtgctgacagcgatcccttctcgagcttttacctaccgggattcgtgaaattcttcgggaacttggctgtgatggatagcccgcagcagatttgtgagcgctacccaatcttcgtcgagaaagtatttgagatgattgaaagccaagacccaacaatgataggggtggccgttgatactgtgggaatactcgggtccaatgtggaggggaagcaggtgttgcagaaaaccgggactcgattcgagcgactgctgatgcgaatcggccaccaaagcaagaacgctcccgtggagctaaaaattagatgtctggacgcaatttcctctcttttgtatctgccacccgagcagcagacagatgacctcctccggatgacagagtcttggttcagttctttgtccagagaccccctggagctctttcgcggaatttccagtcagccctttcccgagctgcactgcgcagccttgaaagtctttaccgctatagctaatcagccctgggcccagaaactgatgttcaacagcccaggatttgtcgagtacgtcgtggacagatccgtggagcatgacaaagcatctaaagatgctaaatatgaacttgtaaaggcacttgccaactccaaaacaattgccgaaatcttcggcaacccaaattacctgcgcctgaggacctacctgagcgaaggtccttattacgtgaagcccgtgtccacgactgcggtcgagggtgcagaatag

SEQ ID NO: 231856 - DNA, 423 bp, synthetic construct
  misc_feature 1..423: note = Description of Artificial Sequence: Synthetic coding sequence
  source 1..423: mol_type = other DNA
atggttcttgtgctagattattctgggagacccatggtgatcagtagcggaatgcaaagcatggacactatgaagcaagtgtatcagatcgtgaaaccactgaatcctaacttttgtttcctgcagtgcacctctgcataccctcttcagcccgaggacgtgaacctccgtgtcattagcgaatatcagaagctctttccagatattcccatcgggtactctggccatgaaaccggtatcgccatttccgttgcagcagttgcccttggcgctaaggtgttggagcggcacatcacactggacaagacctggaagggttccgaccatagcgcctcccttgagccgggagagctggctgagctcgtgaggtccgtcagactggttgagcgcgctttgggtagccctactaaacaactcttgtag

SEQ ID NO: 231857 - DNA, 348 bp, synthetic construct
  misc_feature 1..348: note = Description of Artificial Sequence: Synthetic coding sequence
  source 1..348: mol_type = other DNA
gaagacgtgaacctgcgtgttatatcagagtaccaaaagctcttcccagacataccgataggctatagcggccatgagactggcattgccatttctgttgcagcggtggccctgggagcgaaggtgctagaacgccatattaccctggacaagacttggaagggatctgaccatagtgccagccttgagcctggcgagctcgcggaactagtgagaagtgtcagactcgttgaaagagccctgggaagccccacgaagcaactgctgccatgtgagatggcttgtaatgaaaaagtgtgcccggctggtttgtacagtgtactcctgccctgtgttgagaagggatag

SEQ ID NO: 231858 - DNA, 873 bp, synthetic construct
  misc_feature 1..873: note = Description of Artificial Sequence: Synthetic coding sequence
  source 1..873: mol_type = other DNA
atggatattgaagcatatctggaacgaattggctacaagaagtcgagaaacaagctagatctggaaactctgaccgacatcttacagcatcagattagggcagtgcctttcgagaatctgaacatccactgcggggatgcaatggacttagggttggaggccatctttgatcaggtcgttcgacgaaataggggcggatggtgtctgcaagttaatcatctgctttattgggctttgacgaccattggctttgaaaccaccatgctcggtggttacgtttacagtacccccgctaagaaatactccacgggcatgatccacctacttttgcaggttactatagatgggcgtaactatatagttgatgcaggtttcggcaggtcctatcagatgtggcaacctttagagttgatcagcggcaaagaccagccgcaagttccttgcgtcttccggcttactgaggagaatggattttggtaccttgaccagatcaggagggagcaatatattcccaatgaagagttcctgcatagcgaccttctggaggactctaaatacaggaaaatctactcttttactctaaagccacgtactattgaggatttcgaatccatgaatacctacctgcagacatccccctcctcggtgttcacatcgaagtcattctgctccctgcagactcccgacggagtacattgcttggttggcttcactctgacacatcggagattcaattataaggataacaccgaccttatagagtttaagacacttagcgaggaggagatcgagaaagtcctcaaaaacatcttcaacatctccttgcaaagaaaactcgttccaaagcacggggataggttcttcacaatctag

SEQ ID NO: 231859 - DNA, 873 bp, synthetic construct
  misc_feature 1..873: note = Description of Artificial Sequence: Synthetic coding sequence
  source 1..873: mol_type = other DNA
atggatatcgaggcctatctggagcgtatcgggtataagaagagtaggaataagctcgacctcgaaaccctgactgacatcttgcagcatcagattcgggctgttccttttgaaaacttaaacatccattgtggggatgccatggacctgggcctggaagcaatcttcgaccaagtcgtacggcgaaaccgaggcggttggtgtctgcaggtgaatcatctgctctactgggctcttactacaattggcttcgagaccactatgctggggggatacgtttatagtacaccagcgaagaagtactctactggaatgatccacctgcttctacaagtgaccattgacggtagaaactacatagtggatgctggatttggcaggtcctatcagatgtggcagcccttggagcttatttctggcaaagatcagccccaggtcccatgcgtttttcggctcacggaagagaatggcttctggtacctggaccagattagaagggagcagtacatccccaacgaggagtttttgcattccgacctgctggaagacagtaaatatcgcaaaatctactcctttacactgaaacctcggactatcgaggacttcgagtctatgaatacttacctccaaacctctccttctagcgtatttacaagtaaaagtttctgttccctacaaacgcctgacggcgtgcactgtctcgtgggattcacactgacacaccggaggttcaactacaaagacaataccgatttgatagagtttaagacgctgtcagaagaagaaatcgaaaaggtcctcaaaaatatcttcaacatctctctgcagcgcaaacttgttcctaagcatggagatcgcttctttacgatttag

SEQ ID NO: 231860 - DNA, 873 bp, synthetic construct
  misc_feature 1..873: note = Description of Artificial Sequence: Synthetic coding sequence
  source 1..873: mol_type = other DNA
atggacattgaagcgtacctcgaacgtattggctataaaaagagccgtaataagttggacctggaaacccttacagacatcctgcagcaccagatacgtgccgtgcccttcgaaaatctcaatattcactgcggggacgcgatggatctaggactggaagctatattcgatcaggtggttcgacggaacagaggcggttggtgtcttcaagtcaatcacctcttatactgggcactcaccaccattggttttgaaaccacgatgctagggggttacgtttattcgacgcctgcaaaaaagtactctaccggcatgatacacctcttattacaggtgactattgacggcaggaattacatagtggacgccggattcggcagatcttatcaaatgtggcaacccctggagcttatttctggcaaggatcagccccaggtgccttgtgtctttcggctcaccgaagagaacggcttctggtacctggaccagattagacgggaacagtatataccaaacgaagaattcctccatagcgacttgctggaggacagtaagtataggaagatctacagtttcaccctgaaaccgaggacaattgaagatttcgagagcatgaatacctacttgcagacttccccctcaagcgtcttcacatctaagagtttttgttcattgcagacacctgacggggtgcattgtttggtagggttcaccttgacacaccgacgcttcaattacaaagataatactgacttgattgagtttaaaactttgagtgaggaggagatcgaaaaggtgctaaaaaacatctttaacattagcctccagcggaaactcgtgcctaagcatggtgaccgtttttttacaatctag

SEQ ID NO: 231861 - DNA, 873 bp, synthetic construct
  misc_feature 1..873: note = Description of Artificial Sequence: Synthetic coding sequence
  source 1..873: mol_type = other DNA
atggacatcgaggcttatctggagcggattgggtacaagaaatccagaaataagctggatttggaaacattgactgacatccttcaacaccagatcagggctgtcccttttgagaatctcaatatacactgtggcgacgctatggatctcggactcgaagctatctttgaccaggttgtgcgcaggaaccggggaggatggtgtctccaggtcaaccacctgctgtattgggcattaaccaccattggcttcgagaccaccatgcttggcggatacgtgtacagcacgcccgcaaaaaaatatagtaccggcatgatacatttgttactacaagttaccatcgatggcaggaactatattgtcgacgcaggcttcggaagatcatatcagatgtggcaacctctggaattgatctccggcaaagatcagccacaggttccctgtgtgtttcgccttactgaagaaaacggattctggtacctcgaccagatcagacgggaacagtatatccccaatgaagagtttctgcattccgatttattggaagactccaaataccggaagatttactcttttacgctaaaacctcggactattgaggactttgaaagtatgaatacatacctgcagacctcaccgtccagtgtatttacctctaagtcgttctgctctctccaaacacccgacggcgtgcattgcctggtggggtttacactgacccacaggagatttaattacaaggataatactgatctaattgagttcaaaacactgagcgaagaagagattgaaaaagtgcttaaaaacatctttaatatttctctccagcggaaattggtgccgaaacacggtgatagatttttcaccatctag

SEQ ID NO: 231862 - DNA, 873 bp, synthetic construct
  misc_feature 1..873: note = Description of Artificial Sequence: Synthetic coding sequence
  source 1..873: mol_type = other DNA
atggacattgaggcgtatctggaacgaatcggctacaaaaaatctcgcaacaagctcgacctggaaacgctgaccgacatccttcagcatcagattcgcgcagtgccgtttgaaaatttgaacattcattgtggtgacgccatggacctcggtctggaggcaatctttgaccaagtggtacggagaaatcgcggaggatggtgtctccaggtgaaccacctcctatactgggccctgacaaccattggattcgagacaaccatgctgggcggttatgtctattctactccagcgaaaaaatacagtaccggaatgatccacctgctcctacaggtaacgatcgatggcaggaattatatcgtggatgccggatttggcaggagctaccaaatgtggcaaccgctggaattgatttccgggaaggatcaaccccaagtgccatgtgtgttccgccttacagaggaaaatggtttctggtacctcgatcaaatccggagggagcaatacattccaaatgaggagtttttacattccgatctgttggaagactccaagtaccgtaaaatctatagctttaccctaaagccacgcactatcgaggattttgagtctatgaacacttatctgcagacctctccttccagcgtgttcacttctaaatccttctgctctttacagaccccagatggcgtgcattgcttagtggggtttactcttacccacaggagattcaattacaaggacaatacagacctcattgaattcaagacactgtccgaggaagagattgagaaggtcctgaagaatatcttcaacataagtctccagaggaagctcgtgccaaagcatggcgaccgtttctttaccatatag

SEQ ID NO: 231863 - DNA, 873 bp, synthetic construct
  misc_feature 1..873: note = Description of Artificial Sequence: Synthetic coding sequence
  source 1..873: mol_type = other DNA
atggatatcgaggcctacctggagcgtattggctacaaaaagagcaggaacaagttggacctggaaactctcactgacatcctccagcaccagatcagagcagttcctttcgagaatttaaatatacattgcggtgacgctatggacctgggacttgaagccatttttgatcaggtggtgcgtcgaaaccgaggtggatggtgcctgcaggtaaatcacttgctgtactgggccctgactacaatcggattcgaaaccactatgttggggggatatgtctacagcacccccgctaaaaagtacagcacgggaatgattcacttgctattgcaggtcacgattgatggcaggaattatatagtcgacgctggcttcggaaggtcttaccagatgtggcagcccctggagctcatctctggcaaagaccaaccacaagtcccttgcgtttttcggctgacagaggaaaacgggttctggtacctggaccaaatccggcgtgagcaatacatccccaacgaagagtttttgcactcagacctcctcgaggactccaaatatcggaagatctattccttcaccctgaagcctcgcactatcgaagattttgagagcatgaacacttacttgcagacatctccctcatccgtctttacttctaaaagtttttgctcgttgcagaccccagacggcgtgcactgcttagtggggtttactctgacgcacaggcgatttaactacaaggacaacactgatcttatcgaattcaagacactaagcgaggaggagattgaaaaggtcttgaagaacatctttaacatctcactgcagaggaaactggtccctaagcacggtgaccgatttttcacgatttag

SEQ ID NO: 231864 - DNA, 873 bp, synthetic construct
  misc_feature 1..873: note = Description of Artificial Sequence: Synthetic coding sequence
  source 1..873: mol_type = other DNA
atggacatagaggcataccttgagaggatcggatataagaaatcccggaacaagctggatttggaaacgctcaccgacatccttcagcaccagatccgggcagttccgttcgaaaatcttaacatccattgcggagacgccatggacctggggcttgaggccattttcgatcaggtcgtgcgacgcaataggggcggatggtgtttacaagtgaatcatctattgtactgggctctgaccacaataggctttgagacaacaatgttggggggatacgtatattccacaccagccaagaaatactctacgggcatgatccacctgctgcttcaggtgaccattgacggacgaaattacatcgtcgatgccggatttggacggtcttaccaaatgtggcagcctctggaactgatctctggtaaggaccagccccaggtaccatgtgtgtttcgccttactgaggagaacggcttttggtaccttgaccagatccgccgagagcagtatattccgaatgaggagttcctgcacagcgatctcctcgaggacagtaagtacaggaagatttacagctttacactgaaacccaggaccatcgaagattttgagtccatgaatacttatcttcaaacctccccatcatccgtttttaccagtaagagcttctgtagcctgcagacgccagacggggttcattgcttggtgggtttcactctgacccaccgaagattcaactataaagacaatactgatttgatcgaatttaagacactgagcgaggaggagatcgagaaagtgctcaagaacatcttcaacatcagcctccagaggaaactcgttccaaagcatggggatcgattcttcaccatatag

SEQ ID NO: 231865 - DNA, 1059 bp, synthetic construct
  misc_feature 1..1059: note = Description of Artificial Sequence: Synthetic coding sequence
  source 1..1059: mol_type = other DNA
atgctccttctgctcctgcacaaggaggcagctctggagccacagggaccagctgtcgggtacaactcccttcccgtgagcgatgatcaccacgtgagcggcattcaggccagaaaaaaacagcagagtgtcttctggatcaagacggaagatcagcctaccttcaacctcttaagaaagggaattatggacatcgaagcttacctggagaggattggatacaaaaaatcgcgaaacaagctggacctcgagaccctcaccgacatccttcagcaccagattagagctgttccctttgaaaatcttaatatccattgtggcgacgccatggatctgggactcgaggcaattttcgaccaggtcgtgcgtcggaatagaggtggatggtgcctccaggttaatcatctgctttactgggctctgaccaccatcggctttgagaccactatgctcggaggatacgtctacagcactccagcaaaaaaatacagcaccggcatgattcacttactgcttcaggtaacaatcgacgggaggaattatatcgtagatgctggcttcggcaggtcttaccaaatgtggcagcctttagagctgatctcaggcaaggatcagccgcaggtaccatgcgtgttccgtctcaccgaagaaaacgggttctggtatctggaccagatacggagggaacagtatatccccaatgaagagttcctccattccgacctcttggaggactccaagtaccggaaaatttacagcttcactttaaagcccagaacaatcgaagacttcgaatcaatgaacacatatctacagacctctccaagcagcgtgtttacaagcaaaagtttctgctccctgcagactcctgacggggttcactgtctggtgggctttacattaacacacagacggtttaactataaggacaatactgacctgatagagtttaaaacactctccgaggaggaaatcgagaaggttcttaaaaatattttcaacatttccctgcagcggaagctagtcccgaagcatggtgatcgtttcttcactatctag

SEQ ID NO: 231866 - DNA, 873 bp, synthetic construct
  misc_feature 1..873: note = Description of Artificial Sequence: Synthetic coding sequence
  source 1..873: mol_type = other DNA
atggacattgaggcttactttgagcgcattgggtataaaaattctagaaataagctcgacctcgagacgcttaccgacatccttgaacaccagatcagagccgtcccattcgaaaatctaaacatgcattgtggtcaggctatggagctcggcctagaagctatcttcgatcatatcgtgaggagaaatagggggggatggtgcctgcaggtgaatcagctgttgtactgggccttgacaactattggctttcagaccactatgctcggaggttacttttacatacctccagtaaacaaatatagtacgggaatggtgcatctcctactccaggtaaccatagacggaagaaattatatcgtggacgccggatctggatcgtccagtcaaatgtggcagcctcttgaactcataagtggcaaggaccagccccaggtgccatgtatcttctgccttactgaggaacgtggcatctggtacctcgatcaaattagacgtgagcaatacattaccaataaagaatttctgaattctcatttgctgccgaaaaaaaaacaccagaagatatacctgtttactctggaaccccgtaccatcgaggactttgagtcaatgaatacatatctgcagaccagccccactagtagctttataaccacgtcattttgctcattgcaaacccctgagggagtgtattgcttggtaggcttcatcctgacgtatcgtaaattcaactataaagacaataccgacctggttgagtttaaaacccttaccgaagaagaggtggaggaagttctgagaaacatttttaaaatatcccttgggcgtaatctcgtcccaaaacctggcgatggctcgctgaccatctag

SEQ ID NO: 231867 - DNA, 684 bp, synthetic construct
  misc_feature 1..684: note = Description of Artificial Sequence: Synthetic coding sequence
  source 1..684: mol_type = other DNA
atggccccatgtcacataagaaagtatcaggagtccgatcgtcagtgggttgtcggcctgctctctcggggtatggccgagcatgcgccagctacattcaggcaactgctgaaactgccacgaacacttatcctgctcctcggtgggcctctggctctccttctcgtaagcgggtcctggctactcgccttggtgttctccattagcctgttccccgctctgtggttcctggctaagaagccctggactgagtacgtggacatgactttgtgtacagatatgtcagacattaccaaatcctacctgagcgaacggggatcctgtttttgggtcgccgagagcgaggagaaggttgtgggtatggtcggcgcacttccagtggacgatcctactctgcgcgagaagaggctgcaactgttccatttgttcgtggactcggaacatcgcaggcagggaattgcaaaggcgttagtgaggacagtgttacagttcgcacgagaccagggttactccgaagtgatccttgataccggcacaattcagctttccgcaatggccctgtaccaatccatgggattcaagaagacaggccaatccttcttctgcgtctgggcgcgattggtcgccctacacaccgtgcatttcatctatcacctacctagttctaaagttggatctctctag

SEQ ID NO: 231868 - DNA, 405 bp, synthetic construct
  misc_feature 1..405: note = Description of Artificial Sequence: Synthetic coding sequence
  source 1..405: mol_type = other DNA
atggctgacattgagcagtattatatgaagccgccaggctcatgcttttgggtggccgttcttgacggcaatgttgtgggcatagtggccgcaagagcccatgaggaagacaacaccgtggagttgctcagaatgtctgtggattcccggtttcgagggaagggaatcgccaaagcactagggcgtaaagtgctcgagttcgctgtggtacataattattctgccgtcgttttgggaaccactgctgttaaggtggctgctcacaagctgtacgaaagcctgggtttccgccatatgggcgcaagtgatcattacgtcctccctggcatgacgctctctcttgccgagagactcttttttcaggtacgataccaccggtacaggctccagttgcgagaggaatag

SEQ ID NO: 231869 - DNA, 909 bp, synthetic construct
  misc_feature 1..909: note = Description of Artificial Sequence: Synthetic coding sequence
  source 1..909: mol_type = other DNA
atgcattgcggccctcctgacatggtttgtgagacaaagattgtagcggcagaagatcacgaggccctgccaggagctaaaaaagacgctctgctagcagcggctggcgcaatgtggcctcccttgcccgcagcaccaggccctgcggctgcgccacccgcaccgcctccagcaccagtggcccagcctcatggcggtgctggcggtgccggtccccctggcggaagaggggtgtgcatccgtgagtttcgagctgctgagcaggaggccgctagaagaatcttttacgatgggatcatggaaagaatccccaatacggctttccgtggactgcgacaacatccacgggctcaactcttgtacgccttgcttgctgcactgtgttttgcagtgagtagatcgctcctccttacatgtttggttccagccgctttgttgggactgagatattattactcacgaaaggtgatccgcgcttatcttgaatgcgctttgcacactgacatggccgacatcgagcagtactacatgaaaccgccaggaagttgcttttgggtggccgtgctggatggaaatgtggttggtatcgtcgcagcacgcgctcatgaggaagacaacaccgtcgagctactccggatgagtgttgattctaggtttcggggaaagggcatcgcgaaagcactcggaaggaaggtgctcgagtttgcagtcgtacacaactactcggcagtggtgctagggacaacagcagtcaaagtggcagcccacaaactttatgaatccctgggttttcgtcacatgggagcttcagatcactatgtgctccccggtatgaccctgtcccttgccgaacgcctgttttttcaggtaaggtatcatagatatcgattgcaattaagggaagagtag

SEQ ID NO: 231870 - DNA, 1182 bp, synthetic construct
  misc_feature 1..1182: note = Description of Artificial Sequence: Synthetic coding sequence
  source 1..1182: mol_type = other DNA
atggacgaaaacgaatccaaccaaagcctgatgactagcagccagtaccccaaagaagctgtgcgtaaacgccagaatagtgctcgaaactccggtgcatcggattcttcaagattcagtcggaaaagcttcaaattagactatagactggaagaagacgtcacaaaaagcaaaaaggggaaggatggcagattcgtgaatccctggccaacatggaaaaacccttcaattcctaacgttctgaggtggctgattatggaaaaggatcactccagtgttccttccagcaaggaagagctggacaaagagcttccagtgctcaagccctactttatcaccaacccagaggaggcgggtgttagagaggccggtctgcgcgtgacttggcttggacacgcgactgtgatggtggaaatggatgaactcatatttctgactgacccaatctttagctcccgcgcttcacctagtcagtacatgggcccaaagagattcaggaggagcccgtgcaccatctctgagttaccccctatcgacgcagtgcttatttcccataatcattatgatcacctggattataattctgttatcgccctgaatgaacggttcggtaatgagcttcggtggttcgtaccactgggcctcctcgactggatgcagaagtgtggatgcgaaaacgtcatcgaactcgactggtgggaagagaattgcgtgccagggcatgacaaagtaaccttcgtgttcacaccttcccaacattggtgtaagaggaccctcatggatgataacaaagtcttgtggggcagttggagcgtactgggtccatggaaccggtttttttttgccggtgacactggctattgtccagcatttgaagagattggaaaacggttcgggccattcgatctggctgccatccccatcggtgcctatgagccaagatggttcatgaaataccagcatgtggaccccgaggaggccgtgcggatacacactgacgttcagaccaaaaagtctatggccattcactgggggactttcgcactggctaatgagcactaccttgaaccgcctgtcaagcttaacgaggcattggagcgatatgggctgaatgccgaggatttctttgttctgaagcacggagaaagccgatacttgaacaacgacgatgaaaatttctag

SEQ ID NO: 231871 - DNA, 375 bp, synthetic construct
  misc_feature 1..375: note = Description of Artificial Sequence: Synthetic coding sequence
  source 1..375: mol_type = other DNA
atggacgaaaacgagagcaatcagtctctcatgacgtcctcccaatatccaaaggaggcagtaaggaagaggcagaacagcgcccgtaacagtggagccagcgatagtagcagattctctcgcaagtcatttaagctagactacaggttggaggaagacgtcaccaagagcaagaaaggcaaagatggacgattcgtaaatccatggcctacatggaagaacccctccattcccaatgtgctacgctggctgattatggaaaaggaccattcgtctgtcccttccagcaaggaagaacttgacaaagagctccctgtcctcaagccatactttattactaatccagaggaggctggcgtgagagaagcaggatag

SEQ ID NO: 231872 - DNA, 1182 bp, synthetic construct
  misc_feature 1..1182: note = Description of Artificial Sequence: Synthetic coding sequence
  source 1..1182: mol_type = other DNA
atggacgagaatgagtcaaatcagtctctcatgacgtcaagtcaataccccaaggaggccgtgcgcaagaggcaaaactctgcacggaactccggggcaagtgacagttctagattttcccgtaaatcttttaagctcgattaccgcttagaagaagatgtcacaaagagcaagaaaggcaaggacgggagattcgttaatccatggccaacatggaaaaatcccagcatcccaaacgtgttgcggtggctcatcatggagaaagaccacagctcagtcccatcaagtaaagaagagctggataaggaactgccagttctgaagccgtattttatcaccaaccccgaggaggccggagtaagagaggcgggtctgagagtcacctggcttggtcatgctaccgtgatggtcgagatggatgagttgatcttcctcacagatcctatcttttcgtcccgcgcttctccttcccagtacatgggacctaaacgtttccgtcggagtccatgtacaatatcagaacttcctcccattgatgccgtgctgattagtcataaccactatgatcatctggactataatagtgtcattgccctcaacgaaagattcggaaacgagttgaggtggttcgtccccctcggcctgcttgactggatgcagaagtgtggctgtgaaaatgtgatcgaactggactggtgggaagagaattgcgtgccgggtcatgacaaagtcacattcgtctttacgcctagtcagcactggtgtaagagaaccctcatggatgataacaaggtattgtggggatcctggtctgttctcgggccttggaatcggttttttttcgccggtgacaccgggtactgtcccgctttcgaggaaatcgggaaacgattcggtcccttcgatctggccgcaatccccataggcgcttacgaaccacggtggttcatgaaatatcagcatgtggaccccgaggaagccgtgcgtatccacacagatgtccagacaaagaaatctatggccatacattggggtacctttgcattggctaacgagcactatctagaacccccagtgaagcttaacgaagcccttgagagatacggcctgaatgctgaggactttttcgttctaaaacacggcgaatcaaggtacctaaataacgacgatgagaatttttag

SEQ ID NO: 231873 - DNA, 18 bp, synthetic construct
  misc_feature 1..18: note = Description of Artificial Sequence: Synthetic coding sequence
  source 1..18: mol_type = other DNA
atggacgagaacgagtag

SEQ ID NO: 231874 - DNA, 1182 bp, synthetic construct
  misc_feature 1..1182: note = Description of Artificial Sequence: Synthetic coding sequence
  source 1..1182: mol_type = other DNA
atggacgagaatgagagcaaccaatcccttatgacgagtagccaatacccgaaggaggccgtccgcaagaggcaaaactccgccaggaactccggagcgtctgattcatcacgattctccaggaagtccttcaagctagattaccgactggaagaagatgtaactaagtcaaaaaagggcaaggatggtaggttcgtcaatccatggccaacctggaaaaacccaagtatcccaaacgttttgaggtggctgatcatggagaaagaccattcttccgtgccttctagcaaggaggagctagataaggagctcccggtgctcaaaccctacttcatcacaaacccagaggaggctggagtgcgggaggccggtctgagggtcacctggcttgggcatgccacggtaatggtagaaatggacgaactcattttcctgacagaccctattttttcatcccgagcctcaccctcacagtacatggggccaaaacggtttagaagatcaccctgcaccatctctgagctgcctcccatcgacgccgtactgatatcacacaatcattacgatcatctcgattacaatagcgtgatcgcacttaatgagagattcggcaatgagctccggtggtttgttcctctggggctgctcgattggatgcagaaatgtggctgcgaaaacgtgattgaactcgattggtgggaggagaactgcgtgcccggacacgataaagtgactttcgtgttcactccttctcagcactggtgcaaacgtacgcttatggatgataataaagtactttggggctcttggagtgtgcttggaccatggaatagattcttctttgccggagataccggttactgtcccgcatttgaggagatcggaaagagattcgggccttttgacctcgctgcaatcccaataggcgcatacgaacccaggtggttcatgaagtaccaacacgttgacccagaagaagcagtgcgaattcatacggatgttcagactaagaaaagcatggccatccattggggtacgttcgctctcgctaatgaacattatcttgagccccctgttaagctcaacgaggcactcgagcgctacggcctgaacgccgaggacttcttcgttctaaagcacggagagagccgttatcttaacaatgacgacgagaacttctag

SEQ ID NO: 231875 - DNA, 1401 bp, synthetic construct
  misc_feature 1..1401: note = Description of Artificial Sequence: Synthetic coding sequence
  source 1..1401: mol_type = other DNA
atggcacgtcggagggagctgaagcggtgtttgcagctgctggccagttctgctgagccggctcgcagggccagagtgcgaaagaaccctagtgcgtgtagaggaaggccctcacggtatgcggctgcgctatgcgcaggcacgctgtggcccgaggccgctgagctgcgaaggcgagccctgccagcaacacctagcgcctcgtcctctccaaaagacatggacgagaacgaaagtaaccaatcgctcatgacaagctctcagtaccctaaagaagcagttcggaagcgacagaacagtgcccgaaatagcggggcaagcgatagctcgcgttttagtaggaagtccttcaagcttgattatagactcgaagaggatgtgacaaagagcaaaaaaggaaaggatggacgctttgtgaacccttggcctacttggaaaaaccctagtattcctaatgtcttgaggtggctgatcatggagaaggatcattcaagcgtgccatcgagcaaagaagagctggataaagaactgccagtccttaagccatacttcattaccaaccccgaggaagcaggcgttagggaggcaggtctacgcgtgacgtggctggggcacgccactgtgatggtcgagatggatgaactgatatttctgacagatcctatcttctcatcgcgggcaagtcccagtcagtacatgggacccaagcggtttaggcgcagcccctgcacaatttcagaactcccccctatagacgccgtgctgatttcacataaccactatgatcaccttgactataacagcgtgattgcactgaatgaaaggttcggaaatgaactccgttggttcgtccctctgggcctcctggactggatgcaaaagtgcggctgtgaaaacgtcatcgaactagactggtgggaggagaattgtgtcccaggacatgacaaggtcacatttgtgtttaccccctcacaacactggtgcaaaaggactctgatggacgataacaaggtcctgtggggcagctggtctgtcctaggtccatggaatcggtttttcttcgcaggtgacacgggttattgtcccgcttttgaagagattggcaagcgatttgggcctttcgacctggctgccattcccatcggtgcttatgaaccaagatggtttatgaaataccagcatgtggaccccgaagaggcagtccgtatccatacggacgttcagactaagaagtcaatggctatccattgggggacatttgccctggcaaacgaacattacctggaacctcctgtgaaattgaatgaggcactcgagaggtatgggctgaacgcagaggacttctttgtgctgaaacacggagaatctcgctatctgaataacgacgatgagaacttctag

SEQ ID NO: 231876 - DNA, 1182 bp, synthetic construct
  misc_feature 1..1182: note = Description of Artificial Sequence: Synthetic coding sequence
  source 1..1182: mol_type = other DNA
atggacgagaacgagtccaatcaaagcctgatgacttcgagtcagtatcctaaggaagctgtgaggaagagacagaactccgcacgaaactcaggcgctagcgacagcagcaggttttcacgcaagtcctttaagttagactacaggctggaggaagacgtcacaaagtctaaaaaaggcaaggacggcaggttcgtaaacccctggcctacctggaagaatccctccataccaaatgtgctgcggtggctgatcatggagaaggaccacagctctgttccgtcttctaaggaggagctggacaaagagctgcccgtgctcaaaccctacttcattaccaatcccgaagaagctggcgtccgcgaagcaggattaagagtcacctggttggggcacgctaccgtgatggtggaaatggacgaattgatcttcctcacagatcctatcttctcaagtcgtgcatccccttcccagtacatgggcccaaaaagatttagacggtcaccgtgtacaatcagcgaacttccgcctatcgacgcggtgctgatcagccacaaccattacgaccatctggactataattccgttatcgcacttaatgagcgtttcggtaacgagctacgatggtttgtgccattaggcctgctggactggatgcagaagtgtggctgcgagaacgtgattgagctggactggtgggaagagaactgcgttcctggacatgataaagtgacgttcgtatttaccccctcccagcactggtgcaaacgcacacttatggacgataacaaagttttgtgggggtcttggtccgtgctgggcccatggaacagattcttcttcgctggtgacacaggatactgcccagccttcgaagagattggtaagaggttcggacccttcgatttggccgctataccgataggcgcatatgagccacgctggttcatgaaatatcagcacgttgacccagaggaggccgtgaggatacacaccgatgtgcagaccaaaaagagcatggcaatccactggggtacatttgccctggcaaatgagcactaccttgagccgcctgtaaaactgaacgaagccctcgagcgctacgggctcaatgctgaggattttttcgtcctgaagcacggagaaagtagatatcttaataacgacgacgaaaacttttag

SEQ ID NO: 231877 - DNA, 2199 bp, synthetic construct
  misc_feature 1..2199: note = Description of Artificial Sequence: Synthetic coding sequence
  source 1..2199: mol_type = other DNA
atggagcgccaggtgctcttatccgagcccgaggaggctgctgctctgtaccgcggtctctctaggcagccagctctgtcagccgcttgcctgggacccgaagtaaccacacaatacggcggacagtaccgtaccgtccatactgagtggacacagagagatttggaacgtatggagaacataaggttttgtcgacagtatttggtgttccatgacggagacagtgtggtattcgccggtcccgcaggcaattccgtcgaaacgcggggtgaacttctgagcagagagtcccctagcggaaccatgaaggctgtgctgagaaaagctggtgggacagggcctggtgaagagaagcagtttctggaagtttgggagaagaatcgcaaactcaaaagtttcaatctgtctgcgctggaaaaacatggacccgtctacgaggatgactgctttgggtgtcttagttggagccacagcgagactcatctgttgtatgtagccgagaaaaaacgcccaaaagccgagtcgtttttccagaccaaagcgttggatgttagtgcaagcgacgacgaaattgctcgccttaaaaaacctgaccaggcaattaagggcgaccagttcgtcttctacgaagattggggcgagaacatggtttctaaatctatccctgtgttgtgcgtcctcgacgtggagagcggcaacatttccgtgttggaaggtgtcccagaaaacgttagtcctggccaagccttttgggcacctggtgacgccggagtggtgtttgtcggctggtggcatgagccctttagacttggtataaggttctgtacaaatcggcgtagtgccctatactacgtggaccttatagggggtaaatgcgaactactgtctgacgactccctggcagtatccagccctcggctctctcctgaccaatgtagaatcgtttatctccagtacccttctctgatcccccaccatcagtgctctcagctctgtctctatgattggtacactaaggtgacctccgtcgtggtggacgtggtgcccaggcagcttggggaaaatttttccggaatttactgtagcctcctgccactaggatgctggtccgccgattcacaaagggtcgtattcgattccgcgcagagatctcgccaggatctgttcgccgtggatacacaagtcggaaccgtgacctctctgaccgctggcggtagtggtggaagctggaagctgctgacaatcgaccaagatctgatggtcgcccagttttccacccctagccttcctccaactctcaaggttggctttttgccttccgctggcaaggaacagagcgtgttatgggtttctttggaggaagctgagccaattcctgatattcactggggaatccgcgtgctgcagccccctccggagcaggagaacgtgcagtatgcaggccttgacttcgaagccattttgcttcaacctggctctcctccggataaaacacaggtgcctatggtggtgatgccccacggcggtccgcactcgagctttgtcaccgcatggatgctgttcccggcaatgctgtgtaagatgggcttcgcggtgctgctcgtcaactatcggggttctaccggcttcggccaggactccatactgagtcttcccggtaatgtcggccaccaggacgttaaagatgtacaatttgcggtggaacaggtgctgcaggaggagcactttgatgcgtcacacgtcgccctgatggggggatcccacggagggttcatatcctgtcatcttattggtcaatatcctgagacctatagggcctgtgtggcaaggaacccagtgatcaatatcgcctccatgctaggctctactgacatccctgactggtgcgtggtggaggccggattccctttttcttctgattgcttacctgatctgtcagtatgggccgaaatgctcgacaaatcaccaattcgatacattcctcaagtgaagacaccgctcttactgatgctgggacaggaggatagaagagtaccattcaaacagggaatggagtattatcgggctctgaaaacccggaatgtcccagtgaggctcctgctgtaccctaagtccacccacgccctgtcagaggtggaggtcgaatccgattcattcatgaacgccgtgctgtggctacgaacacacctcggttcgtag

SEQ ID NO: 231878 - DNA, 1833 bp, synthetic construct
  misc_feature 1..1833: note = Description of Artificial Sequence: Synthetic coding sequence
  source 1..1833: mol_type = other DNA
gtgctgaatcgcttacagagcaagtatggctctctgtacaggagagataacgttatcctctccggaacgcacacccactctggcccagccggttattttcagtatacggtatttgttattgccagcgaagggttcagtaaccaaacgttccagcacatggtgacaggcattctgaagagtatcgatatagcccacactaatatgaaacccggaaaaatcttcataaacaaagggaatgtggatggggtgcagatcaatcgtagcccgtacagctacctgcagaaccctcagtctgagcgcgctagatatagctctaacactgataaggagatgatcgtcctgaagatggtcgacctgaatggcgacgatttgggtttaatttcctggttcgcaatccaccctgtgagcatgaataactctaatcatctggtcaatagtgataacgtgggctacgcctcttacctgcttgaacaggagaagaacaaaggatatctccccggacaaggcccattcgtggcagcctttagctcttcaaacctgggagatgtgtcaccaaacatcctcgggccacggtgtatcaacacaggcgagtcttgtgataatgctaattcaacgtgccccatagggggaccctctatgtgtatcgcaaagggacccggacaagatatgttcgattccacccagatcatcggtcgagctatgtaccagcgagccaaagagttgtacgcttcagccagccaggaagtgacagggccactggcttctgcccaccaatgggtggacatgactgacgtcaccgtgtggctgaattccacacatgcttcgaagacctgcaaaccagcactggggtactcatttgcagctggaacaatcgacggcgtggggggtcttaattttacgcagggcaagaccgaaggtgatccattctgggatacgatcagggaccagatattagggaagccgagcgaggaaatcaaagagtgtcataagccgaagcctatcctcctgcacacgggagagttaagtaagccccatccctggcacccagacatcgttgatgtgcagataatcaccttgggcagtctggctataactgccatcccaggagagtttaccaccatgagtggtagacggctgagggaggccgttcaagccgaatttgctagtcacgggatgcaaaacatgacagtcgttatctccgggctgtgtaatgtgtacacacattatataaccacatacgaggagtaccaggcacaaaggtacgaggcagcatctactatctacgggccacataccttgtccgcctacatacagttgttcagaaatctcgcaaaggcaattgccaccgacacagtggcaaacttgagccgcggacccgaacctcccttttttaagcaactcattgtgcccctgattccttctatcgttgacagggctcccaagggcagaaccttcggcgacgtcctgcagccggcaaaacccgaatacagagtcggtgaagttgccgaagtaatatttgtgggcgctaatcctaaaaacagcgtgcagaaccaaaatcatcagaccttccttactgtggagaagtatgaagcaactagcacatcctggcaaatcgtgtgcaacgatgccagttgggagaccagattctactggcataagggtctcttgggcctcagcaatgccaccgtggagtggcacatcccagatacagcccagccgggtatctatcgaatcaggtacttcggccataatcgaaaacaggacatcttaaaacccgctgtaattctttcattcgaggggaccagtccggctttcgaggtagtcaccatctag

SEQ ID NO: 231879 - DNA, 1869 bp, synthetic construct
  misc_feature 1..1869: note = Description of Artificial Sequence: Synthetic coding sequence
  source 1..1869: mol_type = other DNA
atggatagtgagaagtcatctgaatggcgatctgatgtgctgaaccggctccaatcaaagtatggcagtctgtacagaagggataacgtgatactgtcaggcacccacacccactcgggccctgcgggatatttccagtataccgttttcgttatcgccagcgagggattttcaaatcaaacatttcagcatatggttacaggcatattgaaaagcattgacatcgctcacacaaacatgaagcctggaaagatcttcatcaacaaaggtaacgtcgatggcgtacagattaaccgctcaccctattcttacctccaaaacccacaatccgagagagcaagatatagcagcaatactgacaaggagatgatcgtcctgaagatggtggatttaaatggagatgatttaggtctgatcagttggttcgccatccatcctgtctcaatgaacaacagcaatcatctggtgaactcagataacgtaggttacgccagctatttacttgagcaggaaaagaataaggggtacctacctgggcaaggcccattcgtcgccgctttctcgtcatcaaacctgggtgacgtcagccccaacatcctcggaccccgttgtattaacactggagagtcttgcgacaatgcaaacagcacttgccccataggcggaccgagtatgtgtatcgctaagggtcccggacaagatatgttcgactccacacagataatcggcagggcaatgtaccagcgcgctaaggaactttacgcgtcagcctcacaggaagtgacgggccctctggctagcgcccaccagtgggtggacatgaccgacgtaacagtgtggttgaacagcacccacgcctctaaaacctgtaaaccagccctgggttactcctttgctgcgggtacaatagatggagtgggcggtctcaactttactcaaggaaagacagaaggggatccgttctgggacacaatcagggatcagattcttgggaaacctagtgaagaaatcaaagagtgccataaacccaaacccattctcttgcatacaggcgaattgtcaaaaccacatccttggcaccccgatattgtcgatgtgcagattatcactctgggctcgctcgcaatcactgctatccccggagaatttacaacgatgtccgggagacgcctgcgggaggctgtgcaggccgaattcgcaagccacgggatgcagaacatgaccgtggtcatcagtggcctgtgtaatgtttatacacactacattactacatacgaggagtatcaggcccagcgctacgaggcagcaagcacaatttacggaccgcacaccctgtcagcgtacattcagctcttccggaacctcgccaaggctatcgccacggataccgtggcaaatctgtcccggggacccgagccccctttttttaaacaactgatcgtgcccctgattccctccatagtcgatcgcgcaccaaagggccgaacttttggcgatgtgctgcagcctgccaaacctgaatacagagtgggggaggtggctgaggtaatctttgttggtgccaatccgaagaattccgtacagaatcagaatcaccagacctttctgaccgtcgaaaaatacgaggcaacttcaactagctggcaaatcgtctgtaacgatgccagttgggagactcgattttattggcacaagggcctgctcggactgtcaaatgcgactgtcgagtggcacattcccgacaccgcccagcctgggatataccgaattcggtacttcgggcataacagaaaacaagacattttgaaacctgcagtcattctttctttcgagggtacgtctccagcattcgaagtggtgactatctag

SEQ ID NO: 231880 - DNA, 1341 bp, synthetic construct
  misc_feature 1..1341: note = Description of Artificial Sequence: Synthetic coding sequence
  source 1..1341: mol_type = other DNA
atggagatggagcaagaaaaaatgactatgaacaaagaactttccccagacgcggcagcatattgttgctccgcctgtcatggggatgagacctggagttacaaccatccaattcgtgggagggctaagagcagatccctctccgcaagtcctgccctgggctccaccaaggagttcaggagaacccgctctctgcatggtccgtgcccagtgactacattcgggccaaaggcctgtgttctgcagaatcctcaaacaataatgcacatccaagatccagcctcccaaagactgacctggaataagtccccaaaatctgtgctggtcattaaaaaaatgcgggacgccagcctgctgcaacctttcaaggaactttgtacacatttaatggaagagaatatgatcgtctacgtggagaagaaggtgctggaggatccagccatcgcgagcgatgagtctttcggagccgtcaaaaaaaagttctgcacgtttagggaggattacgacgatatctcaaaccagatcgatttcattatctgccttggcggtgacggaacgctactgtatgcgagtagtctgtttcaaggaagcgtgcctcccgtcatggcatttcacttagggtcactgggcttcctcactcctttctcttttgagaacttccagtctcaggttacccaggtcatagaggggaacgccgctgtggtactgaggtcccgactcaaggtgagagtggtgaaagaactcagaggtaaaaagactgcagttcataatgggttaggcgagaacggaagtcaggccgcaggcttggatatggacgtgggaaaacaggctatgcagtaccaggtcctgaatgaagtagtgattgaccgtggaccatccagttatttgagcaacgtggacgtgtatctcgatggccatctgatcaccacggtgcagggtgacggagtaattgtgtccacaccgacaggctctaccgcttacgccgctgctgctggtgcttcaatgattcatcctaacgtacccgctataatgataacacccatctgtccccatagcctgagctttcggcctatagtggtccctgccggagttgagttgaaaataatgctgtcacctgaggcccgaaataccgcatgggtgagcttcgacggaagaaaacggcaggagatccgacacggagactctatcagtattacaacaagctgctaccccctaccctccatatgcgttagggatcccgtctccgactggttcgaaagcttggcccagtgtctgcattggaacgttagaaagaaacaggcacactttgaggaggaggaagaggaagaggaggaggggtag

SEQ ID NO: 231881 - DNA, 1341 bp, synthetic construct
  misc_feature 1..1341: note = Description of Artificial Sequence: Synthetic coding sequence
  source 1..1341: mol_type = other DNA
atggaaatggagcaagaaaagatgacgatgaacaaggagttatcacctgacgccgctgcctactgttgcagcgcctgtcatggggacgagacttggtcttataatcatccaataagaggtcgagcaaaatcacgatccttgagcgcctcccccgcacttggttctacaaaggaatttcggaggacccggagtctgcacggaccatgtccagtcacaacattcgggccaaaagcctgtgtgctgcagaacccccagacaatcatgcacatccaagatcccgcaagccagaggctcacctggaacaagtctccaaagtctgttctggttataaagaaaatgagggatgctagccttctgcagccttttaaggagctctgcacacatttaatggaagaaaatatgatcgtgtacgtagagaagaaggtgttggaggaccccgcaatcgccagcgatgagagcttcggcgctgtcaaaaagaaattctgcacattccgcgaggactatgatgatattagcaaccaaattgattttatcatttgcctgggtggcgatggaactctcctttatgcttccagcctgttccaagggtcggtgccaccagtgatggcctttcacctgggatccctgggatttctgacccctttctcattcgaaaattttcaatcacaggttacccaggtcatcgaggggaatgccgctgtggtgctgcggtcacgcctcaaggtgagagttgtaaaagaactgaggggtaagaagactgccgtgcataatggcctgggggaaaacggttcccaggcggctggcctggatatggatgtgggcaaacaggccatgcagtatcaagtgcttaatgaagttgtgatcgaccgaggccctagcagctacctgagtaacgtggatgtttacctggacggacacctgatcaccacggtgcagggggacggcgtgatcgtgagtacacccacaggatctacagcatacgctgctgcagcaggagcaagcatgattcaccccaacgtacccgcaattatgatcacgcctatttgtccccacagcctgagctttcgtcccattgtggtcccagccggtgtcgaattgaagataatgttgtcacctgaagccaggaatacggcatgggtgtcctttgacggccgtaaacgccaggagatccggcacggagactccattagcatcaccacgtcgtgctatccattacctagcatatgtgtgagggatccagtgagcgactggttcgaatctctggcccagtgccttcattggaatgtgagaaagaaacaggcacacttcgaggaggaggaggaagaggaggaggaggggtag

SEQ ID NO: 231882 - DNA, 1245 bp, synthetic construct
  misc_feature 1..1245: note = Description of Artificial Sequence: Synthetic coding sequence
  source 1..1245: mol_type = other DNA
atgggaagacccagggtgaggcaggcgtggcccggttgctgtggccatacgggaaggctgccggctgggagaggttacttggcaagccacatgtgtgaccccgcaggcgctgagttaattggcgatggaatgtccgaccccactcctccttccaatgcatgcaccggacacatccaggacccagcttctcagcgccttacttggaacaagagcccaaagtctgtcctcgtcattaaaaaaatgagggacgccagtctactccagcctttcaaagagctctgcactcacctgatggaggaaaatatgatcgtttacgtggagaaaaaagtgctcgaggatccagccatcgcttcagatgaatctttcggcgctgtgaagaagaagttctgcacctttagagaggactacgacgatatctccaaccagatagattttatcatttgcctgggaggggatggtacacttctctacgcatctagcctgtttcagggcagtgttccaccggttatggccttccatttggggtccctcggcttcctcacccctttttcctttgagaacttccagtcgcaggtgacccaggtgatcgagggtaacgccgcagtggtcctcagatcacggttgaaggttcgcgtggtgaaggaacttagaggtaagaaaaccgctgttcataacggattaggggagaacggtagtcaggctgcaggcctcgatatggatgtagggaaacaggcaatgcaatatcaagtgctcaacgaagtggtgatcgaccgtggcccatcttcctatctgagcaatgtcgatgtctacctggacggacatttgattaccactgtccagggcgacggggtgattgtttccacgcccacgggttcaaccgcttatgccgcagctgctggggcatccatgatacatcccaacgtaccagccataatgataaccccaatatgtccccattctctgtcttttaggcccatagtggtccctgctggggttgaactcaagataatgttaagcccagaggcccgaaacaccgcttgggtctcattcgacggccgtaagcggcaggagatcaggcatggagattcaataagcatcaccacatcttgctacccattgccgtcgatttgtgtgcgggatcccgtgagtgactggttcgagtccctggcccagtgcctccattggaacgttcggaagaaacaggcccatttcgaggaggaggaggaggaagaggaggaaggatag

SEQ ID NO: 231883 - DNA, 1776 bp, synthetic construct
  misc_feature 1..1776: note = Description of Artificial Sequence: Synthetic coding sequence
  source 1..1776: mol_type = other DNA
atggagatggaacaggagaagatgaccatgaacaaagaactctcgcccgacgctgcggcttactgttgcagcgcatgccacggagatgagacatggtcctacaatcatcccatacggggacgcgcaaagtcgcgatccctgtctgcctcccctgctttggggtcgaccaaagagtttcgtcgcacccgcagcttgcacgggccatgccctgtcactaccttcgggcctaaggcctgtgtcttgcaaaacccgcagaccattatcgccacccccttgagcctggccagccagctcctgccctcgcctgccgtgtcacacagcggacagggtggcgtaacaggccaggttcacgtgctcccacagccatcagaccagggggttctaagtggcccacgcgctgcccgtggccagacagcacctcaggaggaggctgtgactcaggaggaagtcgaggcactcgtgtgtgggcacacacagcgatgggtgcctggaccagtctatgatgctgctgccggtggctcgggctgggctcagctctcccttcgcgctggaatgggagtcgggcaggctactggccacatccaggatccagcctcgcagcgacttacgtggaataagtcgcccaagagcgttttggtcatcaagaaaatgcgtgacgctagtctgctacaaccattcaaagagctgtgtacacatctgatggaggcgcgaggggctggcggaaagggagcttggggagcccatggcgtcggaggggctagtatccacataactgccccaagagtgggctcagctggaggcatgtctcgtcttgccctgtgcttccaggagaatatgatagtttatgttgagaaaaaggttctggaagaccccgctattgcctccgacgagagtttcggcgcagtgaaaaagaagttctgtacattcagagaggattatgatgatattagtaaccagatagattttatcatatgccttggaggagacgggactctcctgtacgcgtcaagcctgtttcagggcagtgtccccccagtcatggcattccatctcggaagtctcgggttcctgacgccatttagcttcgaaaactttcagtcccaggtgacacaggtgatagaagggaacgcagctgtcgtcctgagatcaagacttaaggttcgcgtggttaaggaactgcggggaaagaagactgctgtccacaacggcctgggagagaatggcagccaggccgctgggctcgacatggacgtggggaagcaggctatgcagtaccaggtactcaatgaggtcgtcatagaccggggaccttcttcctatctctcaaacgtagatgtgtatctcgacggacacctcattaccacagtacagggagatggcgtcatagtgagcacgccaactgggtccaccgcatatgcagcagccgcaggcgcaagtatgattcatccaaacgtccctgctattatgataactcccatttgccctcatagcctgagcttccgccctattgtggtgcctgccggagtcgaactaaagattatgctgagtcctgaagccagaaatacagcgtgggtgagttttgacggcagaaagcgccaggagatccggcatggcgattctatctcaattactactagctgttacccccttccatccatctgtgtccgcgaccctgtgtcagattggtttgagtctctggctcagtgccttcactggaacgttaggaagaagcaagcccattttgaggaggaggaggaggaagaggaagaggggtag

SEQ ID NO: 231884 - DNA, 1776 bp, synthetic construct
  misc_feature 1..1776: note = Description of Artificial Sequence: Synthetic coding sequence
  source 1..1776: mol_type = other DNA
atggaaatggagcaggaaaaaatgaccatgaataaagaacttagccccgacgcggcagcatactgctgcagtgcttgtcatggcgatgaaacatggagttataatcaccccatacgcggacgggctaagagtcgctcactttccgccagcccggcattgggttctactaaggaattcaggagaacccgatctctgcatgggccatgccctgtgacaacttttgggccaaaggcttgtgttctccagaatcctcaaactatcatcgccacgcccctttctctcgcatcccagctgttgccaagcccagccgtgtctcactccggacagggtggcgttactggtcaagtccatgtgttaccccaaccttcagaccaaggtgtcctatctggtcccagagctgctcgtggccaaacagcccctcaggaagaagccgtgacgcaggaggaagtcgaggccctcgtgtgcggccacacccaacggtgggtgccgggaccagtgtatgatgcagccgcagggggtagcggatgggcccagttgagcttacgcgctggaatgggcgtcgggcaggcaactggacacatccaggatcccgcatcccagcgcctgacctggaataaaagtccaaaatcagttttggtgattaagaaaatgcgagacgcctcccttctccagccattcaaagaattgtgtacccatttgatggaggcgagaggtgccggtgggaaaggcgcatggggcgcacacggcgtgggcggtgcctcgatacatattaccgcccctagagtcggttctgcaggcggaatgtccagactggcactttgcttccaagaaaacatgatcgtgtacgtggaaaagaaggtacttgaagaccctgccatcgccagcgacgaatctttcggagctgtgaagaagaagttctgcacgttccgcgaggactacgacgacattagcaaccagattgactttatcatttgcctcgggggagatggaacactgctctatgcctcatcacttttccaagggtctgtgccgccagttatggcgtttcacctcgggagtttgggcttcctgacaccattcagtttcgagaatttccaaagccaagtaactcaggtgatcgaggggaacgcggctgtggtgctccggtccaggctcaaagttagagtggttaaggagctgcgcggaaagaagacagccgtgcacaatggcctcggagagaatggatcccaggcagcagggctggacatggatgtggggaaacaggccatgcaatatcaggtgctgaacgaagtggttattgacagaggtcccagctcttacctctccaacgtcgacgtataccttgacggtcacctcatcactaccgttcaaggggatggcgtaatcgtgtctacaccgaccgggtccactgcgtatgccgcagccgctggtgcatcaatgatccacccgaatgtaccggctatcatgatcacccctatatgcccacacagcctgtctttcagacccattgtggttccagctggagttgagctgaagatcatgttgtctccagaagctaggaatacggcctgggtctctttcgatggaagaaaaaggcaagaaattcgtcacggagattcaatctcgatcacaacaagctgctatcctctgccttctatttgcgttcgtgatccagtgtctgactggttcgaatctctggcccaatgtctgcactggaatgtgcgcaagaagcaggcccatttcgaagaggaggaagaggaagaagaagagggatag

SEQ ID NO: 231885 - DNA, 621 bp, synthetic construct
  misc_feature 1..621: note = Description of Artificial Sequence: Synthetic coding sequence
  source 1..621: mol_type = other DNA
atgggcaggcccagagtgcgtcaggcgtggccaggctgttgcggccataccgggcgacttccagccggacggggatacctagcgagtcacatgtgtgacccggcaggagccgagcttattggagatgggatgagcgaccccacacctcctagtaatgcctgtactggccatattcaagacccagcatctcaacgcctgacttggaataagagccctaagtccgttctggtgatcaaaaaaatgagagacgccagcctactccagcctttcaaagaactgtgtactcacctgatggaggagaacatgattgtgtatgtggagaagaaggtgctggaagaccccgcaattgcttccgacgagagtttcggtgccgtgaaaaagaagttctgcacatttagggaggactatgacgacattagcaaccagatcgatttcatcatttgcctgggaggagacggcactctgttgtacgcctcttctctgtttcagggaagtgtgccccctgtgatggcgttccacctgggcagtctcggattcctgactccattttcttttgaaaatttccagagccaggttacccaggtcattgagggtaacgcagctgtagtgttgcggtcgtag

SEQ ID NO: 231886 - DNA, 2121 bp, synthetic construct
  misc_feature 1..2121: note = Description of Artificial Sequence: Synthetic coding sequence
  source 1..2121: mol_type = other DNA
atgggcagaaaagtcactgtggcaacctgcgctctgaaccagtgggcattggattttgaggggaacttacaacggattctgaaatcaatcgagatcgctaagaacagaggagcccgttatcggttagggccagagcttgaaatctgtggatacgggtgttgggatcactactatgagtcggacaccctgctccatagttttcaggttctcgccgcactcgtggaatcaccggttacccaggacataatctgtgatgtgggaatgccggtgatgcaccgcaatgtgcgctataactgtagggtgatatttctaaatcggaagattctgctgatacgcccaaaaatggcactggcaaatgagggaaactacagagaacttaggtggtttaccccctggtcaaggtcaaggcatactgaggagtatttcctgccaagaatgattcaagatttaaccaagcaggagactgtcccattcggagacgctgtgcttgtgacatgggatacctgtattgggagcgagatctgcgaagagctatggactccccactctccacatatcgacatgggcctcgacggtgtggaaataatcaccaatgccagtggctcacatcaggtgttgcggaaggccaacaccagagttgatttagtaacgatggtcacctctaagaacggtggcatctacctactcgccaatcagaaaggttgtgacggagaccgcttgtattacgacggatgtgctatgatcgcgatgaatggctctgtgttcgcccaggggtcccagttctcactcgatgacgtggaagtgctcaccgccacactggacttagaagacgttaggtcatatcgggcagagatttcctctaggaatctagctgcgagcagggcgtcaccctatcctcgtgttaaagtcgacttcgcgctttcttgtcacgaagatctcttagccccaatctcagaaccaatagaatggaagtaccacagtcccgaggaagaaatttcgttggggcctgcatgctggctgtgggattttttgcggcgatctcaacaagcaggcttcctactccctctttccggaggagtagacagcgccgcaacagcatgtcttatttacagtatgtgctgtcaggtctgtgaggcggtaaggtctggaaacgaagaggttttggccgatgtccgcaccatcgtcaatcagatcagttatacgccacaggatccaagggatctgtgcggcagaattctaaccacatgttatatggcatccaagaattcctctcaggaaacctgtacccgagccagagaactcgctcagcagatcggaagccatcacatttcattaaatattgaccccgctgtgaaggccgtgatgggcatcttctccctggtgactggcaagtctcccttgttcgctgcccatggtggatctagcagagagaacttagccctgcagaatgtccaggctaggattcgaatggtcctggcctacttgtttgcccagctgagcctatggtcacgaggggttcacggaggattgctggtgctgggttctgctaacgtagacgaatctcttttgggatacctgacgaagtacgactgttcaagcgccgatatcaatcctatagggggaataagcaaaaccgatttgagagcattcgtgcagttttgtatccagagattccagttgccagctctgcagtccattctgttggcccctgccacagccgagcttgagcccctcgcagatggccaggtaagccagactgatgaggaagatatgggcatgacttacgccgagctgtccgtgtacggaaagttgaggaaagtggcaaaaatgggtccgtatagtatgttttgtaaactgctgggaatgtggagacacatttgtaccccacgccaggtcgctgacaaggtgaagaggtttttctcaaagtacagcatgaatcgccataaaatgaccaccttaacccccgcataccatgctgagaactatagtcccgaagacaatcggttcgaccttagaccattcctgtataacacctcttggccctggcagttcagatgtattgagaaccaagtgttgcagttggagcgagctgaaccacaaagtctggacggtgtcgactag

SEQ ID NO: 231887 - DNA, 1341 bp, synthetic construct
  misc_feature 1..1341: note = Description of Artificial Sequence: Synthetic coding sequence
  source 1..1341: mol_type = other DNA
atgggcatctccggccaggaggttctgaccgcaactctcgacctagaggacgtgaggagttaccgagccgaaataagctcacgtaacctcgctgctagtagggcgtcaccctaccctcgggtgaaagttgatttcgcactttcatgccatgaggatctcctcgccccaatctctgaacctatcgaatggaaatatcattctcctgaggaagaaatcagtctgggacctgcatgctggctttgggatttcctgcggaggagtcagcaggccggatttttgctgcctctcagcgggggtgtggacagcgccgctactgcttgtcttatctacagtatgtgctgccaggtctgtgaagcagtacgcagtgggaacgaggaggtgctcgccgatgtccgcacgattgtgaaccagatctcctataccccacaggaccctagggacttatgtggcaggattcttacaacgtgttacatggcctcgaagaattcttcccaggaaacctgtactcgcgcaagggagctcgcgcagcagatagggtcacaccatatctctctgaatatcgaccctgcagtgaaggcagttatgggaatatttagcttggtcactggcaaatcccctctctttgctgctcatggcggtagttctcgtgagaacttggccctgcagaacgtgcaggctcgaatccgtatggtcctggcctacttgtttgcgcaactcagcctttggagtcgcggagtccatgggggtcttttggtgctcggctccgccaacgtggacgaatcgttactcggctacctcaccaaatatgactgcagctccgcagatattaatcccattggtggaatctccaagacggacctgcgagctttcgttcaattttgcatccagagattccaactgcctgccctgcagtccattctcctcgctcctgcaacagctgagctcgagcctctcgccgatggccaggtctcacagaccgacgaagaggacatgggaatgacttacgccgaactttccgtgtacggaaaactcaggaaggtcgccaagatgggaccatattcaatgttttgtaaacttctcggtatgtggcggcatatatgcactcctagacaggtggccgacaaagtaaagagattctttagtaaatatagcatgaataggcataagatgacaacactcactcctgcctaccatgccgaaaactattcacccgaagacaaccgtttcgaccttaggcccttcctgtacaatacttcatggccctggcagttccgttgcatagaaaaccaggtgcttcagcttgagcgggctgaaccccagagcttggatggagtggactag

SEQ ID NO: 231888 - DNA, 1122 bp, synthetic construct
  misc_feature 1..1122: note = Description of Artificial Sequence: Synthetic coding sequence
  source 1..1122: mol_type = other DNA
atggaacccgctgtgagcgagcctatgcgcgaccaagttgcaagaacacacctcacagaagatactccaaaggtgaacgcagatatcgaaaaggttaaccaaaaccaggcaaaaaggtgcactgtgatcggcggttccggctttttgggacagcatatggttgagcagctgctggccagagggtacgcagtgaacgtctttgatatacagcagggttttgacaatccccaggttcgatttttcctcggagatctgtgtagcagacaggatctgtatcctgcactgaaaggcgtcaatacagtcttccattgtgccagtcctccccctagttctaataacaaggagcttttttatcgggtgaactacatcggtacaaaaaatgtaatcgaaacttgtaaagaggccggagtacagaaactgatcctgacttcttccgccagcgtgatttttgagggcgtcgatattaagaatggaacggaagacttgccctacgctatgaaaccaatcgactattacaccgaaactaaaatcttacaggagagagccgttctgggcgcaaatgaccccgaaaagaacttcttgaccaccgcaattaggccgcacggcatctttggtcccagggaccctcagctggttcctatcttaattgaggctgccagaaatgggaagatgaaattcgtaataggaaacggaaagaatctggtggattttacttttgtggaaaacgtggtccacggacatatcctggccgcagagcagctctcacgggactctactcttggcggtaaggcattccatattacaaacgacgagcccattccattctggacgttcctgtctaggatccttactgggctaaactatgaggcccctaagtatcatataccatactgggtagcatattatctcgcactgctgctatctctacttgtgatggttattagtcccgtgattcaattgcagcccaccttcacaccaatgcgcgtcgccctggcgggtacatttcattactacagttgtgagcgcgcaaagaaggctatgggatatcaacctttagtgacaatggacgacgccatggagcgaacagtccagtcctttaggcacttgcggagggtcaagtag

SEQ ID NO: 231889 - DNA, 765 bp, synthetic construct
  misc_feature 1..765: note = Description of Artificial Sequence: Synthetic coding sequence
  source 1..765: mol_type = other DNA
atggagcctgccgtgagtgagccaatgagggaccaggtggctcgcacccatcttactgaggatacccccaaagtgaatgccgacattgagaaggtgaaccagaatcaagccaagcgctgcaccgttattggaggctctgggtttttgggccagcatatggtggaacagctgctggccaggggctacgccgtgaacgtcttcgacatacaacagggcttcgacaacccccaggtgcgattcttcctgggggatctttgctcgcggcaggatctgtaccctgccctgaagggcgtcaacacagtgttccattgtgcatcaccccctcccagcagcaataacaaagagttgttctacagagtgaactacatcgggacaaagaacgtgattgagacttgtaaagaagcgggagtgcagaaactcattctgactagcagcgctagtgtcatctttgaaggggtcgacatcaagaacgggactgaagacctgccatatgccatgaagcccatagactactatacggagactaaaattcttcaggagcgcgctgtgctaggggctaacgatcccgaaaagaactttttgaccacagctataagacctcatgggattttcggccctcgggacccacagctggtgcctatcctgatcgaagcagcgagaaatggaaagatgaagttcgttatcggaaacggcaaaaacctggtggacttcactttcgtagagaatgtggtacacgggcacattctggctgccgagcaattgtag

SEQ ID NO: 231890 - DNA, 1122 bp, synthetic construct
  misc_feature 1..1122: note = Description of Artificial Sequence: Synthetic coding sequence
  source 1..1122: mol_type = other DNA
atggagcctgcagtgtctgaaccgatgagagaccaagttgcaagaacccacctgacggaggatacaccaaaagtgaacgcggatatagagaaggtgaatcaaaatcaggccaagaggtgcaccgttattggaggttccggcttccttggacagcacatggttgaacaactcctcgccagggggtatgccgttaatgtgtttgacatccagcagggtttcgataacccacaggtcaggttcttcctcggggacctgtgcagcaggcaggatttataccccgctctgaagggcgttaacacagtgtttcactgcgctagccctcctccaagctcgaacaataaagagctattctacagggtcaactacatcggaacgaagaatgtgattgaaacctgtaaggaagccggagtgcagaagctcattctaacatcttctgcatcggtgatctttgaaggcgtggatattaagaacgggactgaggatctcccttatgccatgaagcccatagactattacaccgagactaaaattctgcaagagcgggctgttctgggtgctaatgatccagaaaagaatttcctaacgacagcaataagaccacatggcatatttggcccacgcgatccacaattggttccaatcctgatcgaagctgcgagaaacggtaagatgaagttcgtgatcggcaatggtaaaaacctcgtggacttcacatttgtagagaatgtcgtgcacggacacattcttgccgctgaacaattatcacgggattctacacttggaggcaaagcatttcatataacaaatgatgaacccatacccttctggaccttcctgtcacggatcttgactggactaaactacgaggctcccaagtatcatatcccttattgggtagcctactatctcgctctgctcctttctctcctggtgatggtcatctctccagtgatccagctccagcccactttcaccccaatgagagtcgccctcgcaggcaccttccactactactcctgtgagcgcgctaaaaaggctatgggctaccagccgctcgttactatggacgatgccatggagagaaccgtgcagtcatttcggcacctgcggcgagtgaaatag

SEQ ID NO: 231891 - DNA, 825 bp, synthetic construct
  misc_feature 1..825: note = Description of Artificial Sequence: Synthetic coding sequence
  source 1..825: mol_type = other DNA
atggtgggtcggagggccctcatcgtgctggcccacagcgaacggacaagtttcaattatgctatgaaggaggctgcagcggcagccctgaagaagaaaggctgggaagttgtagagagtgatctgtacgccatgaattttaatcctatcattagcaggaaagatataacaggcaaactaaaagatcccgctaactttcaatatccagccgaatcagtgcttgcctacaaagagggccatctaagccccgacattgtcgctgagcaaaaaaagcttgaagccgcagacctggtgatcttccagtttcctctgcaatggttcggcgtgccagccattttgaaaggatggttcgagagggtgttcattggcgagttcgcttacacttacgctgcgatgtatgacaagggcccatttagatcaaaaaaagccgtgctgtcaataacgaccgggggaagcgggtctatgtactctctccaaggcatacacggagacatgaacgtcatcctctggcccattcaaagcgggattctgcatttctgtggcttccaggtcctggagcctcagctgacctattcaattggccacacgcccgctgacgccaggatccagatcttggaaggttggaaaaaacggctggaaaacatttgggacgagactccactctattttgctccttcatccctttttgacctcaattttcaggccggatttcttatgaagaaggaagttcaggatgaggagaagaacaagaagttcgggttgagtgtcggccaccacctgggcaaaagtatccctacagataaccaaattaaagcaaggaaatag

SEQ ID NO: 231892 - DNA, 711 bp, synthetic construct
  misc_feature 1..711: note = Description of Artificial Sequence: Synthetic coding sequence
  source 1..711: mol_type = other DNA
atggtgggccgtcgggcactgatcgttcttgcccatagcgaacggactagcttcaattatgccatgaaggaagcagcagccgctgccctgaaaaaaaagggctgggaagtggtggagagcgatctatacgccatgaattttaaccctattataagcagaaaagacatcacagggaaactgaaggacccagcgaactttcagtacccagccgaaagtgtgctggcttataaggaaggtcacctatctccggacattgtggctgagcagaagaagctggaagccgctgacctcgttatctttcagtcgaaaaaagcggtcctatctattacaaccggcggatctggaagtatgtattctctgcaggggatccacggcgacatgaatgtgatactctggcctattcagtccggtatcctccacttctgcggctttcaggtgttggagccccagctgacttattccatcggacatacaccagccgatgctcggatccagatacttgagggatggaagaagaggttggagaatatttgggacgaaactccgctgtattttgctccctcttctttgtttgatctgaatttccaagccggatttctcatgaaaaaagaagtgcaagacgaggagaagaacaaaaagttcggcttgtccgtggggcaccacctgggaaaatctatccctactgacaaccagatcaaagccagaaaatag

SEQ ID NO: 231893 - DNA, 723 bp, synthetic construct
  misc_feature 1..723: note = Description of Artificial Sequence: Synthetic coding sequence
  source 1..723: mol_type = other DNA
atggtcggacgccgtgcattaattgtgcttgcccattcggagcggacttcctttaactatgcaatgaaggaggcagcagccgcagcactgaagaagaagggctgggaagtggtggaatccgatctttatgcaatgaactttaacccgatcattagcaggaaagacatcaccggtaaactgaaggacccggcaaactttcagtaccccgctgagtccgtcctggcatataaagagggccatctcagccccgatattgtcgccgagcaaaaaaaacttgaagctgcggatctcgttatcttccagtttccccttcagtggtttggtgtgccagccatcctgaagggctggttcgagcgcgtgttcattggggaatttgcctatacctacgctgctatgtacgataagggcccattcagaagcgggatcctgcatttctgtggctttcaggtgcttgaacctcaacttacctacagcattggacatactcccgctgatgctagaatccaaattctggagggatggaagaagcgtcttgaaaacatctgggacgaaacacccttatactttgctccttcttccttgtttgatctgaactttcaggccggtttcctgatgaagaaggaggtccaagatgaggagaaaaataagaaatttggattaagtgtcggtcatcacctgggcaaatcaatacccactgacaaccaaatcaaagctcggaaatag

SEQ ID NO: 231894 - DNA, 609 bp, synthetic construct
  misc_feature 1..609: note = Description of Artificial Sequence: Synthetic coding sequence
  source 1..609: mol_type = other DNA
atggtggggagaagagccttgatcgtgctggcacactccgaacgtacaagcttcaattatgccatgaaagaagccgcagctgccgctctcaagaagaaaggatgggaggtggtggagtctgatttgtatgccatgaacttcaaccccatcatctcgcgcaaagacatcacaggcaagctcaaggatccagctaatttccagtatccagcagagtccgtgctggcatacaaggaggggcatctgtcacccgatattgtggccgaacagaaaaagttagaagcagccgatcttgtgatatttcagagcgggatcttacatttttgtggcttccaggttttggagccacaactgacatacagtattggccacacgcccgctgacgctagaatccagattcttgaaggctggaagaaacgccttgagaacatatgggatgagacacctctctacttcgcacctagtagtcttttcgatctcaatttccaagcaggctttctgatgaaaaaggaagtgcaggatgaagagaagaacaagaaattcggcctcagcgtgggccaccacctggggaaaagcatccccacagataatcaaattaaggctcgaaagtag

SEQ ID NO: 231895 - DNA, 696 bp, synthetic construct
  misc_feature 1..696: note = Description of Artificial Sequence: Synthetic coding sequence
  source 1..696: mol_type = other DNA
atggccggaaaaaaagtgctgatcgtttacgcccatcaagagcctaaatcttttaatggatcactgaaaaacgtcgcggttgacgaattgagtcgacaggggtgcactgtgacagtatctgacctgtatgccatgaatctcgagcccagagccacagataaagatattactggaaccctatcaaatcccgaggtgtttaattatggcgttgagacacacgaggcttacaagcagcgatctctagcttcagacataacggacgagcagaaaaaggtgagagaagctgacttagttattttccagttccctctatattggttttcggtccccgctatcctcaaaggatggatggaccgagttctttgccagggattcgcttttgatattcccggattttacgattctgggctcttgcagggcaaactggccctactgtctgtgaccaccggaggcaccgccgagatgtacacaaaaaccggagtgaacggcgattcacgctattttctttggcccctgcagcatggcactctgcatttttgcggctttaaagtgttagcaccgcaaatctcttttgccccagaaatcgcctcagaagaagagagaaagggcatggtggccgcatggagtcaaaggcttcaaacgatttggaaggaggaacctattccctgtactgcacactggcacttcggccagtag

SEQ ID NO: 231896 - DNA, 696 bp, synthetic construct
  misc_feature 1..696: note = Description of Artificial Sequence: Synthetic coding sequence
  source 1..696: mol_type = other DNA
atggccggaaaaaaggtcctcatcgtctacgctcatcaggaacccaagtctttcaacggatccctgaaaaatgttgcagtcgacgagctgagcaggcaggggtgcaccgtaacagtctccgatctatatgcgatgaatctcgagccacgggcaactgacaaagacattaccggcactctctccaaccctgaggtctttaattacggggttgagactcacgaggcatataaacaaagatctcttgctagcgacatcacggacgaacagaaaaaggttagggaggctgacttagtcatctttcaattcccactatattggtttagtgttcccgcaattctcaagggatggatggatcgagttctatgccagggctttgcatttgacatacctggattttatgactcaggcctgttgcaaggtaagctcgcactgttaagcgtgacaactggaggaacagctgaaatgtatacaaaaaccggtgtgaacggggatagccgctactttctgtggccattacagcatggcactctgcacttttgtggcttcaaggtgcttgctccccaaatttctttcgccccagagattgcttccgaagaagagcggaagggcatggtggcagcttggtctcagcggctgcagaccatctggaaagaggaacctatcccttgtaccgctcactggcacttcggacagtag

SEQ ID NO: 231897 - DNA, 582 bp, synthetic construct
  misc_feature 1..582: note = Description of Artificial Sequence: Synthetic coding sequence
  source 1..582: mol_type = other DNA
atggccggtaaaaaggtgctcattgtgtatgcccaccaggagcccaagagctttaacggcagtctgaagaacgtagccgtggatgaactcagccgacagggttgtacagtgactgtctcagacctgtatgcaatgaacttagaacctagggctacagacaaggacataacaggcaccctttctaatccagaggtgttcaactatggtgtggagacccacgaggcttataaacagaggtccctggcatcagacataaccgacgagcaaaaaaaggtccgcgaagctgacttagtcatctttcaaggaaaactcgcccttctcagcgttactactgggggaactgcggaaatgtataccaaaacaggcgtcaacggcgactcccgctacttcctgtggcccctgcagcacgggaccttgcatttctgtggattcaaggtcttggcacctcagatcagcttcgccccagagattgcctctgaagaggaacgtaagggcatggtggcagcttggtcccagcgactacagacgatttggaaggaggaacccatcccatgtactgctcactggcactttggacaatag

SEQ ID NO: 231898 - DNA, 582 bp, synthetic construct
  misc_feature 1..582: note = Description of Artificial Sequence: Synthetic coding sequence
  source 1..582: mol_type = other DNA
atggcaggaaagaaagtcctcatagtctacgctcatcaggaacctaaaagtttcaatggcagcctgaaaaacgttgcggttgacgaacttagcagacaagggtgcactgtgacggtcagcgacttgtatgccatgaatttagaaccgcgagcaaccgataaggacattacggggacactgtctaaccctgaggtcttcaactatggagtggaaactcatgaagcatacaagcagcgcagtctggcatcagatattactgatgaacagaaaaaagtgagagaagccgacctggtgatatttcagggaaagcttgccctcctatcagtgactactggagggacggccgagatgtacactaaaactggagtgaatggtgactctagatatttcctctggccgctccagcatggcaccttgcatttctgcggatttaaagtactggcacctcagatatcattcgcccctgagattgcctcggaagaagagagaaagggaatggttgctgcttggtcacagaggttgcagactatttggaaagaggagccaatcccatgtacagcacattggcattttggacagtag

SEQ ID NO: 231899 - DNA, 696 bp, synthetic construct
  misc_feature 1..696: note = Description of Artificial Sequence: Synthetic coding sequence
  source 1..696: mol_type = other DNA
atggcaggcaaaaaggttctgattgtatacgcacaccaggagcccaagtcttttaatggctccttgaagaatgttgccgttgacgagctttcccggcagggctgcaccgtgactgtttcggatctgtacgctatgaaccttgaaccaagggctaccgataaggatataacaggaaccttgagcaacccagaggtgttcaactacggagtcgagacacacgaagcttataagcagagaagcctggcctccgacataactgacgaacagaaaaaggttcgtgaagcagatttggtgatctttcagtttcccttgtactggttctccgtgcccgctatcttgaaggggtggatggaccgggtgctctgccagggattcgctttcgacattcccggattctacgattcaggtctgctgcagggcaaattggccctcctgtccgttactactggtggcacggccgagatgtatactaaaaccggagtcaacggcgacagccgctacttcctgtggccccttcaacatggcacactgcacttctgcggatttaaagtgctcgcaccacagatctctttcgcccctgagatcgccagcgaagaggaacgtaaaggaatggtggcggcttggagccaacggctccagactatttggaaagaagagcctatcccttgtacggcccattggcatttcggccagtag

SEQ ID NO: 231900 - DNA, 420 bp, synthetic construct
  misc_feature 1..420: note = Description of Artificial Sequence: Synthetic coding sequence
  source 1..420: mol_type = other DNA
atggcaggcaagaaggtcttgattgtctatgcacaccaagagcccaaatctttcaatggcagcctgaaaaatgtggcagtggacgagctgagtaggcaggggtgtaccgtcaccgtaagtgacctgtatgcaatgaacctggagccgagagcaactgataaggacatcacgggtacactgtctaatcccgaagtttttaactatggggtggaaacccacgaggcgtataagcaacggagtctggcttctgatattaccgacgagcagaaaaaggtacgagaggcagacctcgtaattttccagtttcccctgtactggttttctgttcccgctatcctgaaaggctggatggatagagtgctttgccagggattcgcctttgacatcccaggattctatgactccggactactccagtag

SEQ ID NO: 231901 - DNA, 420 bp, synthetic construct
  misc_feature 1..420: note = Description of Artificial Sequence: Synthetic coding sequence
  source 1..420: mol_type = other DNA
atggccggaaaaaaggtgctgattgtctacgcccaccaagagcctaaatcttttaatggttcccttaaaaacgtagctgtcgatgagttgtctcgccagggctgcacagtaactgtgtccgatctgtatgcaatgaacttagaacccagggctacagataaagatataaccggaaccctgagcaaccctgaggtctttaattacggcgtggaaacacatgaggcctataaacagaggagtcttgcgagcgatatcacagatgagcaaaagaaggtgcgcgaggccgatttggtgatctttcagttcccactgtattggttttctgtacctgcaatcctgaagggctggatggaccgcgtcctttgccagggcttcgccttcgatataccaggcttctacgactccgggctgctccagtag

SEQ ID NO: 231902 - DNA, 192 bp, synthetic construct
  misc_feature 1..192: note = Description of Artificial Sequence: Synthetic coding sequence
  source 1..192: mol_type = other DNA
atggcgggaaagaaggtcttaatcgtttatgcgcatcaggaacccaagagctttaatggtagtctgaaaaacgtggcagtggacgaattgtcacgtcagggatgcacagttaccgtgagtgacctgtatgcaatgaatcttgagccacgtgccactgacaaggacattacggggactctgagcaacccctag

SEQ ID NO: 231903 - DNA, 483 bp, synthetic construct
  misc_feature 1..483: note = Description of Artificial Sequence: Synthetic coding sequence
  source 1..483: mol_type = other DNA
accccgggactaaagcagtcaagccacctgtccttgtggagttcttgggactatcgcctgctagattcactcaaaagagactacgccggaaagcctcagcctcccattaaaagtgaacgacgcaatccaccctcatacgcaatggcgggtaagaaggtcttaatagtgtacgcacatcaggaaccaaagagctttaatggtagccttaagaatgtggctgtggatgagttgagccgtcagggatgtactgtgacagtgtctgacctctacgccatgaatctggagccaagagcaaccgacaaggatatcaccggaacattaagcaatcctgaggtgtttaactatggggtagagacacatgaggcctataaacagcgctccctggcttctgatatcacagatgaacagaagaaagtgcgtgaagctgacctggtgatttttcagatgctgtccactgagctgtccctcacttcaagatgttag

SEQ ID NO: 231904 - DNA, 231 bp, synthetic construct
  misc_feature 1..231: note = Description of Artificial Sequence: Synthetic coding sequence
  source 1..231: mol_type = other DNA
atggcagccgctgccgcatcaaggggcgtgggggcaaaactgggcctgcgggagatccgaatccacctgtgccagaggtctcctgggagccagggcgtcagagactttattgaaaagagatatgtcgaactgaaaaaggccaatcctgatctccctattctgatccgcgagtgcagcgatgtccagccgaaattgtgggctaggtacgcatcgcgggtccagaactcctag

SEQ ID NO: 231905 - DNA, 213 bp, synthetic construct
  misc_feature 1..213: note = Description of Artificial Sequence: Synthetic coding sequence
  source 1..213: mol_type = other DNA
atgtggttcgagatcctccccggattatccgtcatgggtgtctgcctgctgatccccggtctcgctactgcctacattcaccgattcacaaatggaggaaaggagaagcgggttgcccactttgggtaccactggtcactgatggagcgtgacaggagaatctcgggcgtggaccggtattatgtttcaaaaggactggagaatatcgactag

SEQ ID NO: 231906 - DNA, 1068 bp, synthetic construct
  misc_feature 1..1068: note = Description of Artificial Sequence: Synthetic coding sequence
  source 1..1068: mol_type = other DNA
atggccctcaggcttctgaagctggcggctacttcagcatcagcaagagtggtcgcggcaggcgctcagcgtgtcaggggtatccatagtagcgtacagtgcaagcttcgttacggcatgtggcattttcttcttggggataaggcatccaaaagactaactgagcggtccagggttataacggtcgacggaaatatttgcaccggcaaaggcaagctcgctaaggagatagcagagaagttggggttcaagcactttccggaggctggcatacattacccggatagtaccacaggggacgggaagccgctagcaaccgactataatgggaactgtagcctggaaaagttctatgatgaccccaggtcaaacgacgggaacagctatcggctgcagtcttggctgtactccagtcgcctcctgcagtactctgacgcactggaacacctcttaacaacaggacaaggagtggtgctggagcgtagcatcttcagcgacttcgtgtttctcgaagcgatgtataaccagggctttattcggaaacagtgtgtggaccattataatgaggtcaagagcgtgactatctgtgattatctgcctcctcatctggtaatttacatcgacgtaccagttcctgaggtccaacggaggatccagaagaagggcgacccacatgagatgaagattacaagcgcctatctgcaggatattgagaatgcgtacaaaaagacctttttgccagagatgtcagaaaagtgcgaagtgttgcagtattccgcaagagaggcccaggattcaaaaaaggttgtcgaggacatcgagtacctaaaattcgacaaaggaccatggctaaaacaggataatcggactctctaccaccttcgacttcttgtgcaggacaagttcgaagtcctcaactatacatcaatcccaattttcctcccagaagtgaccataggagcgcaccagactgaccgggtactgcatcagttcagggagctgccgggacgaaaatactctccaggatacaacacagaggtaggagacaagtggatctggctgaaatag

SEQ ID NO: 231907 - DNA, 1068 bp, synthetic construct
  misc_feature 1..1068: note = Description of Artificial Sequence: Synthetic coding sequence
  source 1..1068: mol_type = other DNA
atggccctgcgcctcctaaagctcgccgctaccagtgcatcagctcgggtcgttgccagagcaccatcagcatggagaggcatccatagctctgtgcagtgtaagcttagatacgggatgtggcatttcctattgggggacaaggcctcaaagcgcctgactgagcggtcacgagtgatcactgtcgacggaaatatctgcactggcaagggcaagcttgccaaggagatagctgagaaactgggcttcaaacatttcccagaggctggcatacactatccggacagcactaccggcgatggcaagcccttggcaacagactacaacggaaattgcagcctcgagaaattctacgacgatcctagatccaatgatggcaactcctacagactacagtcttggctctactcttctaggctgctgcagtattctgatgccttggagcacctcctgacaacaggtcagggggtggtgcttgagaggtctattttcagcgatttcgtgttcttggaggccatgtacaaccaggggttcattagaaaacagtgtgtggaccactataacgaggtaaagagcgtaacaatttgcgactacctgcctccccatctggtcatctacatcgacgtccccgtcccagaggttcagaggaggattcagaaaaaaggggacccccacgagatgaagattacatccgcatatctacaagacatcgagaatgcctataagaaaaccttcttgccggaaatgtccgagaagtgcgaggtgctgcagtactccgccagggaagctcaggacagcaagaaggtggtggaagacattgaatatctgaaatttgacaaaggaccttggcttaaacaagataaccgcactttgtatcacctcagactgctcgtccaggataaattcgaggttctcaactacacatccatacccatattcctgcccgaggtcacgattggggctcatcagactgatagagttctgcatcagttcagagagctcccaggcagaaagtactcacccggatataataccgaagtaggagacaagtggatatggttgaagtag

SEQ ID NO: 231908 - DNA, 426 bp, synthetic construct
  misc_feature 1..426: note = Description of Artificial Sequence: Synthetic coding sequence
  source 1..426: mol_type = other DNA
atggcccctaaagtgtttaggcagtactgggatatccccgatggaaccgactgccatcgcaaggcttatagcacaacttcaatcgccagtgtggcagggcttaccgccgcagcttacagggtgaccctgaaccctcccggtacctttctagaaggcgtagccaaggtgggccagtacacttttaccgccgctgctgtcggggctgtgtttggcttgaccacctgtatttcagcacacgtgcgcgagaagcccgatgatccactgaattacttcctcggaggttgtgctggcggactgacactgggtgcccgtacccataattatggcattggagcagctgcatgtgtttacttcggcattgcggcatccctggtcaagatgggaaggctagaaggctgggaggtgttcgcaaagccaaaagtctag

SEQ ID NO: 231909 - DNA, 687 bp, synthetic construct
  misc_feature 1..687: note = Description of Artificial Sequence: Synthetic coding sequence
  source 1..687: mol_type = other DNA
atggcaccaaaggtgttccgtcagtattgggacatccctgatggaaccgactgccacaggaaggcttactctaccacgtccatcgcctctgtagcgggtctcaccgccgcagcctaccgggtgacgctgaatcctcccggaactttcctcgagggcgtggccaaggttggacaatataccttcacagctgccgctgtgggcgctgttttcggcctgaccacctgtattagcgcacacgtgcgggagaagcccgacgacccattgaactatttcttaggaggttgtgccggaggtttgacactgggggctcggaaaaccggtagtcattgcgtggttcaggccggtctgaagcttttagctagtagcagcccgcatacatcggcctcacagtccgctgggatcattggcatgagccactgtgtgcaaagattttgggtgcctagctcttccgcctgcctggaggttctcagcggtgagtccacagatgtccacgcgtgttcaagtactcgcggagcatgtaattctagcggaagtcggcctctgcctgaactgggagctcgagcgtctggaagcctcaggaaaggaggacatacacatccggcaccaaggggggctggtgctctaactccagtgcaggcactgatcgagagccttttaaatacactgggctccaaccccagaacctag

SEQ ID NO: 231910 - DNA, 684 bp, synthetic construct
  misc_feature 1..684: note = Description of Artificial Sequence: Synthetic coding sequence
  source 1..684: mol_type = other DNA
atgcaagaaccacgcagagtgaccccctgcctcggcaaacgaggagtcaaaacaccccagctgcagcctgggtccgcattcctgccgcgagtacgtcgtcaatcttttcccgcaagatctgactcctatacaaccgtgagggatttcctcgcggtgccaaggacaatttctagcgccagtgcgaccctgatcatggccgtggccgtgagtcacttccggcctgggcctgaggtgtgggacaccgcctccatggctgcaagcaaggtgaagcaggatatgccacctcctggtggatacggtccaatcgattacaagaggaatctcccgcgtagaggcttgagcgggtatagcatgttggcaatcggcatcggcacgctcatttatgggcactggtctataatgaagtggaaccgggaacggaggagactgcagatagaggacttcgaggccagaatcgcactgctgcctctcctgcaagcagaaaccgacagacggaccctgcaaatgctgagggagaacctggaggaggaagcaattatcatgaaggacgtgcccgattggaaagtcggggagagtgtattccatactacccggtgggtgccccctctaattggggaactttacggcttacggacaactgaggaagcattgcacgccagtcacgggttcatgtggtacacctag

SEQ ID NO: 231911 - DNA, 435 bp, synthetic construct
  misc_feature 1..435: note = Description of Artificial Sequence: Synthetic coding sequence
  source 1..435: mol_type = other DNA
atggccgctagtaaggtcaagcaggatatgccacctcccggaggttatggacctatcgattacaagcgcaatctgccgagaagagggctttccggatattccatgttagcaataggaattggtacccttatatacgggcactggagcatcatgaagtggaatcgggaacgacgcaggttgcagatagaagacttcgaagccaggattgccctgctcccccttcttcaagccgagaccgaccggaggacactgcagatgctcagggaaaatcttgaagaggaagctattatcatgaaggacgtaccagattggaaagtgggcgagagtgtgttccacaccactaggtgggttccgcctttaatcggggagctctatgggttaaggacgacggaagaggcgctacacgcttcgcatgggtttatgtggtatacctag

SEQ ID NO: 231912 - DNA, 300 bp, synthetic construct
  misc_feature 1..300: note = Description of Artificial Sequence: Synthetic coding sequence
  source 1..300: mol_type = other DNA
atggctgccgctgccgctagcaggggagtgggcgcaaaactggggctacgggagattagaatccatttgtgccagagatcccccggatcccagggtgttagggatttcatcgaaaaacgttatgtggaactgaaaaaggctaaccccgacctacctatcctcattcgggaatgttcggacgtccagcccaagctgtgggccagatacgcttttggccaggagactaatgtccctttgaataatttctccgctgaccaggtaactcgcgcactggaaaatgtgctgtccggcaaagcttag

SEQ ID NO: 231913 - DNA, 720 bp, synthetic construct
  misc_feature 1..720: note = Description of Artificial Sequence: Synthetic coding sequence
  source 1..720: mol_type = other DNA
atggccggtgtgttgaaaaaaaccactggcctggtgggcctggccgtgtgtaatactcctcacgaagtgtgcacctttgtgttgagtagcttcctcaattcccaggggcgtcttaacagttgtcattttgcatactgcagagtaaacggcattcagatgtttcaagccttgaattacaagccgagggaattgcttaggcacggcagatgtccaccaactagcctgatccggtgccatatatttatatacttctgtcacgacctgttcataaaaccagttttcctgcttacctttagcctgacattcagctggctgcatctgtgcctgctactaagtgctcctagccagatatacatatctgtatttcacctcttttccctgccatatcggttctgtttgggagccctggactacatttacctgggcctgctcaaagtgttgcctccatttcctagcgtgaggtcattcccttcagtttttacgaatgtcttcattaaaaagacccataagtttttcattctcctcgtgcccagtatcataacaccctttttgtgttttacactgcagattacacaaaaatcctacctgtatttcctccagtttctttcatacagtcccctcaacgcgctctctcacccctggaggttttctagctccccaataatcagcatgctgccgaacccgatggtatcgtcttactttagcccgtctttaacatag

SEQ ID NO: 231914 - DNA, 351 bp, synthetic construct
  misc_feature 1..351: note = Description of Artificial Sequence: Synthetic coding sequence
  source 1..351: mol_type = other DNA
atggccggtgtgctgaagaaaaccaccggactggtgggcctcgctgtgtgtaatacccctcacgaacggctgagaattctgtataccaagattctggatgtgctcgaggaaatcccaaagaacgctgcctacaggaagtatacggaacagattactaacgagaagctcgccatggtcaaagcggagcccgacgtgaaaaagcttgaggaccagctgcagggcggacaacttgaggaggtgatcctccaggccgagcatgaactgaacctggccagaaagatgagagagtggaaactgtgggaacctctggttgaagagcctcccgcagaccagtggaagtggccgatttag

SEQ ID NO: 231915 - DNA, 351 bp, synthetic construct
  misc_feature 1..351: note = Description of Artificial Sequence: Synthetic coding sequence
  source 1..351: mol_type = other DNA
atgccttaccgcgttggtcagacaacaggcttggttggcttggcggtttgtaataccccccacgaaagactcagaattctctacaccaaaatcttggatgtactggaggaaataccaaaaaacgctgcgtatcgcaagtacacagaacaaataacaaacgaaaaactcgccatggtgaaagccgaaccagacgttaaaaagctcgaggaccaactgcagggaggtcagctggaagaggtgattcttcaggccgagcatgaactgaatctggccagaaaaatgcgcgaatggaaactctgggagcccctggtagaggagcctccagccgaccagtggaaatggcctatatag

SEQ ID NO: 231916 - DNA, 465 bp, synthetic construct
  misc_feature 1..465: note = Description of Artificial Sequence: Synthetic coding sequence
  source 1..465: mol_type = other DNA
atggggaaggacattcgaccgagatcagctagggcagcgtgcaagggcgtcggcctgtggagtggctgcttcggaaagatggcgggaagcggggttcggcaagccactagcacagcctccacattcgtgaaacccattttttccagggacatgaatgaggcgaagagacgggtaagagaactttaccgtgcctggtaccgcgaggtcccaaacacggtccatcagtttcaactggacattacggtgaagatgggtcgtgacaaggtgagggagatgtttatgaagaacgcgcatgttaccgatcctcgggttgtcgatcttctcgtcattaagggaaagatcgaactcgaggaaaccatcaaagtgtggaagcagagaacccacgtgatgcggttttttcacgagaccgaagcccctagaccaaaagatttcttgtctaagttctacgtcggccatgacccgtag

SEQ ID NO: 231917 - DNA, 342 bp, synthetic construct
  misc_feature 1..342: note = Description of Artificial Sequence: Synthetic coding sequence
  source 1..342: mol_type = other DNA
atggctagcgcaacacgactgattcagcgtcttcgcaactgggcgtccgggcacgatttacagggcaagctgcagctccgttaccaggaaatatcaaaacggactcagcctcctccaaagcttcccgtgggcccatctcacaaactttcaaataactactactgcacaagggatggccgaagggaatcggttccaccctctattattatgagttctcagaaggccctggtttccggaaaacccgctgaaagctccgccgtcgcagctactgagaaaaaggccgttacccctgcccctcccatcaagcgctgggagctcagttcagatcagccttacttgtag

SEQ ID NO: 231918 - DNA, 519 bp, synthetic construct
  misc_feature 1..519: note = Description of Artificial Sequence: Synthetic coding sequence
  source 1..519: mol_type = other DNA
atgccaggtatcgtggagctccccaccctcgaagaactcaaagtggacgaggttaaaatttctagcgctgtgttgaaagcggctgcccatcactatggcgcacagtgtgacaaaccaaataaggagtttatgttgtgtaggtgggaggaaaaggatccgaggaggtgccttgaagaaggaaagctagttaataagtgcgccctggacttcttccggcagatcaaaagacattgcgccgaaccatttaccgaatactggacgtgcattgattacactggccaacagctctttaggcattgtcgtaagcaacaagccaagtttgatgaatgcgtcctggacaaactaggctgggtcagacctgacctcggagagctctctaaggtaacaaaagtaaagacagaccgcccactccccgagaacccataccactccagaccacgaccagatccaagtcccgagattgaaggcgaccttcagcctgccacccacggctcacgattttacttctggaccaaatag

SEQ ID NO: 231919 - DNA, 387 bp, synthetic construct
  misc_feature 1..387: note = Description of Artificial Sequence: Synthetic coding sequence
  source 1..387: mol_type = other DNA
atgcccggaatcgtggagctgcccaccctggaggaactgaaagtggatgaggtcaagatctcatctgccgttctgaaagctgcagcacaccattatggcgctcagtgcgacaaacctaacaaggaatttatgttatgcaggtgggaggagaaggatcctagaaggtgtctggaggagggaaagttggtgaacaaatgtgccctggacttcttccgccaaatcaaacgccactgcgcagagcctttcactgaatattggacctgtatagactatacaggacagcagctgtttagacactgtcgtaaacagcaagccaaatttgacgaatgcgtgctagataaactagggtgggtcagacctgatcttggggaactatccaaaggatag

SEQ ID NO: 231920 - DNA, 1134 bp, synthetic construct
  misc_feature 1..1134: note = Description of Artificial Sequence: Synthetic coding sequence
  source 1..1134: mol_type = other DNA
atggccgctgctgctcagtcgcgggtagtgcgagtgttaagcatgagtcggagtgccataaccgcgattgctacgtctgtctgtcacggaccgccttgccgccagctccatcatgcgctgatgccacatgggaagggaggtaggagcagcgtttccgggattgtcgctaccgtttttggcgcaacaggcttcttggggagatacgtcgtgaatcaccttggaaggatggggtctcaagtaatcataccttatcgttgtgataaatacgacatcatgcacctgagaccaatgggggatctgggtcaattactgttcctggaatgggatgctcgggataaggacagtatacgaagagtggtccagcactcgaacgtagttattaatttgatcgggcgagattgggagaccaaaaattttgatttcgaagacgtgttcgtgaaaattccgcaggcaattgcgcagctctccaaggaagcgggagtggaaaagtttatccatgtgtctcatttaaatgctaacatcaaaagctcgtctcgatatctgagaaataaagccgtcggtgaaaaggtggtgcgggatgcctttcccgaggctatcatagtgaaaccgtccgatatctttggtcgcgaagacaggttcctaaatagctttgcttctatgcatagattcggccctatcccgcttggatcgctggggtggaagaccgtcaaacaacctgtttacgtggtggacgtgtcaaaaggaatcgtcaacgccgtgaaagacccggacgctaatggaaagagttttgctttcgtgggaccctccagatacctgttgttccatctagtgaagtatatttttgcagtggcccacaggctgtttctgccattccccctccctctgttcgcctatagatgggtggccagggtgttcgaaataagcccgttcgaaccgtggattacacgggacaaggtcgagagaatgcatattaccgacatgaagctcccacatcttcctggcctggaagatcttgggatccaggcgacgcctttggagctgaaggcgatcgaggttctacggcgtcataggacctatcggtggctaagtgccgaaatagaggatgtcaagcccgcaaaaactgtgaacatctag

SEQ ID NO: 231921 - DNA, 984 bp, synthetic construct
  misc_feature 1..984: note = Description of Artificial Sequence: Synthetic coding sequence
  source 1..984: mol_type = other DNA
atggccttggtgcacaagttgttgagagggacttattttctgaggaaattttctaaaccaactagcgcgttgtaccccttcctcggcattcggttcgccgagtactccagctcactgcagaaacctgtggcatcgcccggaaaagcatccagtcagcgtaagacagagggcgaccttcaaggggaccaccagaaggaggtggcattggatattacgtctagcgaagagaaacctgacgtttccttcgataaggccatccgggacgaagctatctaccatttccgattactgaaagatgaaatcgttgatcactggcggggacccgagggccatcctctgcatgaagtattgctagagcaagcgaaagtcgtatggcagtttcggggaaaggaggatctggataaatggaccgtgaccagcgacaagacaataggtggacggtcagaagtattcctcaagatggggaaaaacaaccagtctgctctcctttacggcacactgagctctgaagcaccacaggacggagagagcacgcgcagcggctattgtgcgatgatcagcagaatacctagaggcgcatttgagcgcaaaatgagctatgattggagccagttcaacacgctgtacctgagggtccgtggagatggcaggccgtggatggtgaacatcaaagaggataccgattttttccagcgtactaaccagatgtattcgtactttatgttcactcgaggtggcccttactggcaggaagtcaaaattcccttttcaaagttcttcttttctaatcgtggaaggatcagggacgtgcagcatgagctgcccctggacaagatttcgagcataggcttcacccttgcagacaaggtggacggacccttctttctggaaatcgactttatcggtgtattcactgacccagcacataccgaggagttcgcgtacgagaactctcctgagctgaatccccgacttttcaagtag

SEQ ID NO: 231922 - DNA, 576 bp, synthetic construct
  misc_feature 1..576: note = Description of Artificial Sequence: Synthetic coding sequence
  source 1..576: mol_type = other DNA
atggccctggttcacaagctgctgcgaggcacgtatttcctccggaaattctccaaacctacgagcgccctttacccgttcttgggcatcaggtttgccgaatacagctcatccttacagaaacctgtggcatcaccaggaaaagcatcctcacaaagaaagacggagggagacttgcagggagaccatcaaaaagaagtcgcactggacattacctcctcagaggaaaagccggacgtttcctttgataaggccattagggatgaagccatttaccatttcaggctgctcaaagatgagatagtggaccactggcgtgggcctgagggtcatcctttgcacgaggtgctcctggagcaagcaaaagtcgtctggcagttccgaggaaaggaggatctcgataaatggacggtaacgagcgacaagacaattggtggaagatctgaagtgtttctaaagatggggaagaataatcagagtgccctattatacgggacactgtcgagtgaagccccacaggatggagagagtacccggagcggatactgtgcgatgatttctcgtatccctagatag

SEQ ID NO: 231923 - DNA, 630 bp, synthetic construct
  misc_feature 1..630: note = Description of Artificial Sequence: Synthetic coding sequence
  source 1..630: mol_type = other DNA
atggcgctggttcacaaattgttacgtggtacgtacttccttcggaaattttccaagcccacttcagcactgtatccgtttctgggcatacgtttcgctgaatactcatccagtctgcagaagcccgtagccagccctgggaaggcatccagtcaacgaaagaccgaaggtgatcttcagggcgaccaccagaaagaagttgccctagatattaccagctcagaggaaaaacctgatgttagctttgacaaagcgattcgcgatgaggcaatataccattttcggctgctgaaagacgagattgtggatcactggagggggcctgagggtcatcctcttcatgaggttctgttagaacaagccaaagtcgtttggcaatttaggggcaaggaggatttggataagtggacagtcactagtgacaagaccatcggtggaaggtctgaagtttttctcaaaatgggaaaaaacaaccagagtgccctgctatacggcacgctcagtagtgaggcccctcaggacggggagtcaactaggtcggggtactgcgctatgatatctcgaatcccccgaggtgcctttgagagaaagatgtcttatgattggtcccaattcaacaccctttattag

SEQ ID NO: 231924 - DNA, 510 bp, synthetic construct
  misc_feature 1..510: note = Description of Artificial Sequence: Synthetic coding sequence
  source 1..510: mol_type = other DNA
atgggctggtcccaggatctgtttagggctctgtggcgctccctgtcacgagaggtgaaggagcacgtgggtacagatcagttcgggaacaagtactattacatcccccagtacaaaaactggcgcggacagacaatccgcgagaagcggatcgtcgaggccgctaataaaaaggaggtggattatgaggcaggcgatatcccgacggaatgggaagcttggattcggcgaacccggaagacccctcccacaatggaggagatcctgaagaatgaaaagcatagggaagaaataaagatcaagtcccaggacttttacgagaaggagaaattactcagtaaagaaacctccgaggaactgctgccgccaccagtgcagacccaaattaaagggcatgcatccgcaccttacttcgggaaagaagagccatccgtcgctcccagctccactggcaaaactttccagcccggtagctggatgcctcgagacggaaagtctcacaatcagtag

SEQ ID NO: 231925 - DNA, 384 bp, synthetic construct
  misc_feature 1..384: note = Description of Artificial Sequence: Synthetic coding sequence
  source 1..384: mol_type = other DNA
atgtatatcgacagctataacagccgtggatttatgattaatggcaatagggttcttggtccttgcgccctactcccccattcggtcgtccaatggaacgtcggatcccaccaagacataaccgaagactctttcagcttattctggctattagagccaagaatcgagattgttgtcgtgggtaccggagatcgtaccgagaggttacaaagccaagtcttgcaggccatgcgacagaggggcattgccgtcgaagtgcaggacaccccaaacgcctgtgcaactttcaacttcctgtgccacgaggggagagtgacaggggctgctctgataccccctcccggtggaacctcgctcacaagcctgggacaagcggctcagtag

SEQ ID NO: 231926 - DNA, 555 bp, synthetic construct
  misc_feature 1..555: note = Description of Artificial Sequence: Synthetic coding sequence
  source 1..555: mol_type = other DNA
atggccacagccttagcactgagatctctgtaccgtgctaggcctagcttgcgttgtccacctgtcgaactcccgtgggcccctcgccgtggccacaggctgtcaccagccgatgacgaactctaccaacggaccagaatttcactgctccaaagggaggctgcacaagcaatgtatatcgactcatacaattccagggggtttatgattaacgggaatcgggttctgggtccttgcgctctgttgccgcatagtgtggttcagtggaatgtaggctcacatcaggatattacggaagactctttcagcctgttctggctgctcgaacctcgaattgagatcgttgtggtgggaaccggcgatcggactgaacggctgcagtcccaggtcctccaggccatgcgacagagggggatcgcggttgaagtacaagatacacccaatgcatgcgccaccttcaatttcctgtgccatgaaggccgagtgacaggcgctgctctaattccaccaccaggcggtacctccctcactagccttggccaagcagcacagtag

SEQ ID NO: 231927 - DNA, 384 bp, synthetic construct
  misc_feature 1..384: note = Description of Artificial Sequence: Synthetic coding sequence
  source 1..384: mol_type = other DNA
atgtatatagattcctacaacagccgcggatttatgataaatggaaaccgcgtccttggtccatgtgccttgctgccgcacagtgttgtacaatggaatgtaggatcccatcaggacatcactgaggattcattcagcctattttggcttttagagccgagaatcgagattgtcgtggtaggcacgggtgatcgcacagaacgccttcagagtcaggttcttcaagcgatgcggcaacggggaatcgccgtcgaggtgcaggacacaccaaacgcctgtgccacgttcaacttcctgtgccatgaggggagggtaaccggcgctgccctgattcccccacccggtggtaccagcctgacatcgcttggacaggccgctcagtag

SEQ ID NO: 231928 - DNA, 384 bp, synthetic construct
  misc_feature 1..384: note = Description of Artificial Sequence: Synthetic coding sequence
  source 1..384: mol_type = other DNA
atgtacattgatagctataactcaaggggcttcatgataaatggaaatagagttctgggcccatgtgcactcctgccccattcggtcgtgcagtggaatgtcggatctcaccaggacattaccgaggattcgttttctctattctggctcctggaaccacgtatagaaatcgtcgtggtgggcaccggggatagaaccgagagactccagagtcaggtgctgcaagcaatgaggcagcgaggaatagccgttgaggtccaggacacgcccaatgcatgcgctaccttcaacttcctgtgtcacgagggcagggtgaccggcgcagcactgattccccctccaggcggaaccagcctgacgtcccttggtcaggcagcccagtag

SEQ ID NO: 231929 - DNA, 528 bp, synthetic construct
  misc_feature 1..528: note = Description of Artificial Sequence: Synthetic coding sequence
  source 1..528: mol_type = other DNA
atgggcgctctggtcattcgaggcatacggaatttcaatctggaaaacagagctgaaagagaaatttcaaagatgaaaccttctgtggcacctaggcacccctccactaactccttattgcgcgagcagatatcgctgtatcccgaagttaaaggggagatagccaggaaagatgagaagctactgtcgtttctgaaggacgtctacgtcgactcaaaggaccctgtgtctagcctgcaagtcaaggcggctgagacctgccaggagccgaaagagttccgtctgcctaaggaccatcacttcgacatgataaatatcaaatctattcccaagggcaagatctctatagtcgaagcccttacattactgaacaaccacaagctgttccctgaaacttggaccgccgaaaaaatcatgcaggagtatcaacttgagcagaaggatgtcaacagcttgctaaagtactttgtaacctttgaggttgaaatttttccgcctgaggacaagaaggccatccgatctaagtag

SEQ ID NO: 231930 - DNA, 519 bp, synthetic construct
  misc_feature 1..519: note = Description of Artificial Sequence: Synthetic coding sequence
  source 1..519: mol_type = other DNA
atgccagactcttgggataaggacgtttatcctgaacctcctcgcaggactcccgtacagcctaacccaatagtgtatatgatgaaggcgttcgatctgatcgtggacaggcccgttactctggtgcgggagtttatcgaacgtcaacacgccaagaaccgttattactactatcacagacagtacaggcgtgtacctgacatcactgagtgcaaggaagaggacattatgtgcatgtacgaggctgaaatgcagtggaagcgcgactacaaggtcgaccaagagatcatcaatattatgcaggatagacttaaggcatgccagcagagggaaggtcagaactatcagcagaactgcataaaagaagtcgaacaattcacacaagttgccaaagcctaccaggacaggtatcaggacctgggcgcttactctagcgcaagaaaatgtttggcaaagcagaggcaacggatgctccaggagaggaaggccgcaaaagaggccgcagctgctacttcctag

SEQ ID NO: 231931 - DNA, 507 bp, synthetic construct
  misc_feature 1..507: note = Description of Artificial Sequence: Synthetic coding sequence
  source 1..507: mol_type = other DNA
atgccagatagctgggacaaagacgtatatcccgaacctccaagacggacgccagtccaacccaaccccattgtgtatatgatgaaagccttcgacttgatcgttgatcgtcccgtgacactagtgcgagaatttattgagcgccagcacgccaagaatcggtattattactaccaccgtcaatacaggagggtaccagatatcaccgagtgcaaggaggaagacattatgtgcatgtacgaggcagagatgcagtggaaaagagattacaaagtggatcaggaaataattaacatcatgcaggaccgactgaaggcatgtcaacagcgggagggacagaattaccaacagaattgcataaaggaggtggaacagtttactcaggttgcaaaagcttaccaggaccgatgtgcttgccccacgcaccctcaacctccaaccattctcttacgccctggaggccagaatcactgcaagagttcccttccatcccttgtccttacatag

SEQ ID NO: 231932 - DNA, 492 bp, synthetic construct
  misc_feature 1..492: note = Description of Artificial Sequence: Synthetic coding sequence
  source 1..492: mol_type = other DNA
atggccgctgggctgttcggactttctgccagacgattgctggccgctgctgccacgaggggcttgcccgcagctcgagtgcggtgggagagctctttttctcgcaccgtcgtggcaccttcagcggtggcgggaaagagacctcccgaaccaactacgccctggcaagaagatccggagcccgaggacgaaaatctatacgagaaaaacccagactctcatggctacgataaggatccagtactggacgtatggaatatgcgactggtatttttctttggagtgagcatcatcttagttttggggagtactttcgtggcatacttaccagattataggtgtactggatgtccacgcgcatgggacggcatgaaagaatggagcaggagggaggcggagcgtcttgtgaagtatcgagaagcgaatgggctgcctattatggaaagcaattgctttgatccttctaaaattcaactccctgaagacgaatag

SEQ ID NO: 231933 - DNA, 462 bp, synthetic construct
  misc_feature 1..462: note = Description of Artificial Sequence: Synthetic coding sequence
  source 1..462: mol_type = other DNA
atggccgctggcttattcggactgagtgcgaggcgtctgcttgccgctgctgccacccgcggactgccggcagctcgtgtgagatgggagtctagtttctcacggaccgtggtggcaccaagcgcagtcgccggaaagcggccacccgagcctactacaccgtggcaggaggatcctgaaccagaggacgagaacctctacgaaaagaatccagacagccatggctacgacaaggacccagtgttagacgtttggaatatgcgactggtgtttttcttcggggtcagtatcatcctggttctggggtcaacatttgtcgcgtacttgcccgattatagaatgaaggagtggtcacgcagagaagcagaaaggctggtgaaatacagggaagcaaatgggttgcccatcatggaatcaaattgctttgaccccagcaagatccaactacccgaagacgaatag

SEQ ID NO: 231934 - DNA, 474 bp, synthetic construct
  misc_feature 1..474: note = Description of Artificial Sequence: Synthetic coding sequence
  source 1..474: mol_type = other DNA
gctgccccaagcgtgatggctgcaggactctttggcctatcagcccgacgcttactggccgcacgtcgcaggggccttccggcagcccgtgtgcggtgggaatcctccttcagtcggacggtggttgctccctctgccgttgccggtaagaggccaccggagccaactactccgtggcaagaggacccagagcctgaagacgaaaacctctacgagaagaacccagacagccatgggtacgacaaagaccctgtgttggacgtgtggaacatgcggttagtgtttttctttggggtctccattattctagtgctgggaagcacgttcgtcgcttatctgcctgactacagaatgaaggaatggtcacggagggaggcagagagactggtgaagtaccgggaagcaaatggtctgcccatcatggaatccaactgttttgacccctccaaaatccagctccccgaagacgaatag

SEQ ID NO: 231935 - DNA, 297 bp, synthetic construct
  misc_feature 1..297: note = Description of Artificial Sequence: Synthetic coding sequence
  source 1..297: mol_type = other DNA
atggcccacgaacacgggcacgagcatggtcatcataagatggaactacccgattatcgacagtggaagattgagggaacccccttggaaacaatccaaaagaagttggccgcaaaagggctcagggatccttgggggaggaacgaagcctggcgttatatgggcggattcgctaaatccgtgtccttctcggatgtcttcttcaaaggctttaaatggggctttgccgcttttgtcgtggctgtgggggctgaatattatctggagagtctaaataaggacaaaaaacaccattag

SEQ ID NO: 231936 - DNA, 297 bp, synthetic construct
  misc_feature 1..297: note = Description of Artificial Sequence: Synthetic coding sequence
  source 1..297: mol_type = other DNA
atggcccacgagcatggccacgaacatgggcatcacaaaatggagttgccagactatcgacagtggaagattgagggcactccattagaaacgattcaaaaaaagctggctgccaaaggcctcagagacccgtggggacggaacgaggcttggcgctacatgggcggattcgctaaatcagtctctttctctgatgtctttttcaagggcttcaagtggggatttgcagcattcgtggtggcagtaggcgcagaatactatctggaatccctcaacaaggacaaaaagcaccattag

SEQ ID NO: 231937 - DNA, 198 bp, synthetic construct
  misc_feature 1..198: note = Description of Artificial Sequence: Synthetic coding sequence
  source 1..198: mol_type = other DNA
atggcccacgagcacgggcatgaacatggacatcacaagatggagctccctgattatcgccagtggaaaatagagggtacccccctggaaacaatccagaaaaaactggccgctaaaggtctgcgcgatccttgggggagaaacgaagcctggcgttatatgggcggattcgccaaatctgtgagtttttcagactag

SEQ ID NO: 231938 - DNA, 297 bp, synthetic construct
  misc_feature 1..297: note = Description of Artificial Sequence: Synthetic coding sequence
  source 1..297: mol_type = other DNA
atggcccatgaacatggtcacgagcacggccaccacaaaatggaattaccagattatcgacagtggaagatagagggcaccccactggagacgatacagaaaaaactggcagccaaggggctccgggacccctgggggaggaatgaagcatggcgctatatgggaggatttgctaagtccgtcagcttctctgatgtcttcttcaagggctttaaatggggttttgccgcatttgtagtagctgttggtgccgagtattatctggagtccctcaataaagacaaaaaacatcactag

SEQ ID NO: 231939 - DNA, 741 bp, synthetic construct
  misc_feature 1..741: note = Description of Artificial Sequence: Synthetic coding sequence
  source 1..741: mol_type = other DNA
atgaccacgggggattgctgccacttgcctgggtccctgtgcgactgctccggctctccggctttctcaaaggtggtggaggctaccgggttggggcctccgcaatacgtagcacaagtgacatcacgtgatggcagactgctgtcaactgtaatcagggctcttgacacaccgagtgatggcccattttgcaggatctgtcacgagggagctaatggggagtgcctgctgtccccttgcggctgcacagggacactaggagcagtccacaaatcctgcctggaaaagtggctctcaagttctaacacttcatattgtgagttgtgtcataccgaattcgccgtggagaaacgacctagacctctaaccgaatggttaaaagaccctgggcctcggacagaaaagcgcaccttgtgctgtgacatggtctgttttctttttatcactcctctagcagctattagcggatggttgtgcttgagaggcgctcaggatcatttgcggctgcattcccagcttgaggccgtcggcctgattgctttgaccatcgcattgttcaccatctacgttctgtggacactggtgagtttccgatatcactgtcagttatattctgagtggaggaaaaccaaccagaaggttcgactcaaaattagagaggccgactcaccagagggcccacaacactcacctctggccgctggactcctgaagaaggtggccgaagagacgcccgtttag

SEQ ID NO: 231940 - DNA, 561 bp, synthetic construct
  misc_feature 1..561: note = Description of Artificial Sequence: Synthetic coding sequence
  source 1..561: mol_type = other DNA
atggccgtggccagagccggagtcctgggcgtgcaatggctccagcgcgcaagcagaaacgtaatgcctctgggggcaagaaccgcatcacatatgactaaggatatgttcccagggccatacccccgtacccccgaggaaagggcagctgctgcgaaaaagtataatatgcgcgtggaggactacgaaccatacccagatgacggcatggggtatggagactaccccaagttgccggatagatcacaacacgaacgcgacccctggtatagttgggaccagcctggtctacggttgaattggggggaaccaatgcactggcatttagatatgtacaacaggaaccgtgtagatacaagtcccactccagtgtcctggcacgtcatgtgcatgcagctgtttggattcctggcctttatgattttcatgtgttgggtaggagatgtgtacccagtctaccagcccgttgggcctaaacaatacccatacaataacctgtatctggaaaggggtggggacccaagcaaggagcccgagagggtcgtgcactacgagatttag

SEQ ID NO: 231941 - DNA, 519 bp, synthetic construct
  misc_feature 1..519: note = Description of Artificial Sequence: Synthetic coding sequence
  source 1..519: mol_type = other DNA
atggcagtcgccagggcgggagtcctaggcgtgcaatggctacaacgcgcaagcagaaacgtgatgcccttaggggcaagaacagcttcccatatgacaaaggacatgttcccagggccttaccctagaacccctgaggaacgggctgccgctgccaaaaaatacaatatgcgcgtggaggattacgagccctaccctgatgacggcatgggatatggtgactaccccaagctccctgaccgcagccagcacgaacgcgatccatggtattcatgggatcagccaggattgcgcttgaattggggcgagccaatgcactggcatctggacatgtataaccgtaatcgggtcgacacctccccgacacctgtgagctggcacgtgatgtgtatgcagctcttcggttttttagcatttatgatctttatgtgctgggtgggagacgtctaccctgtctatcaaccagtatgtcgtcaccactttagttataatctgggattcctcagtgctctggggtag

SEQ ID NO: 231942 - DNA, 468 bp, synthetic construct
  misc_feature 1..468: note = Description of Artificial Sequence: Synthetic coding sequence
  source 1..468: mol_type = other DNA
atgactaaggacatgttccctggcccttacccacggacccccgaggaaagagccgcagcggctaagaagtacaatatgagagttgaggactacgaaccctatcccgacgacggaatgggctatggggactacccgaagcttccagaccggtcccagcatgaaagggacccttggtacagttgggatcagcccggactgcggcttaattggggtgaacccatgcactggcaccttgacatgtacaataggaacagagtagacacgagccccactcctgtgagctggcacgtgatgtgcatgcagttgttcggatttctggcgttcatgatattcatgtgttgggtgggagacgtctatccagtgtaccagccggtgggacccaagcaatacccgtacaataatttgtacctagaaagggggggtgacccgtccaaggagccagagagggtggtgcattacgaaatctag

SEQ ID NO: 231943 - DNA, 519 bp, synthetic construct
  misc_feature 1..519: note = Description of Artificial Sequence: Synthetic coding sequence
  source 1..519: mol_type = other DNA
atggctgtggctagggccggagtgctgggagtgcagtggctgcagcgggctagcaggaatgtcatgccccttggggcacgaacagccagtcacatgacgaaagacatgttccctggcccataccccagaactcctgaggagcgcgctgctgccgctaaaaagtacaacatgcgcgtggaagattatgaaccctaccccgacgacggcatgggatatggcgattatcccaaactgcctgatcggtctcaacatgaacgggacccatggtactcttgggatcagcccggattaagacttaactggggtgaaccaatgcactggcatctcgatatgtataacagaaatagggtggacacatcccccacccccgtgtcatggcacgtcatgtgtatgcagctgtttggatttctggcctttatgattttcatgtgctgggtgggcgacgtgtacccagtttatcaacccgtttgccggcaccatttctcatataatttaggcttcctgagtgccttgggctag

SEQ ID NO: 231944 - DNA, 540 bp, synthetic construct
  misc_feature 1..540: note = Description of Artificial Sequence: Synthetic coding sequence
  source 1..540: mol_type = other DNA
atggcgttcctcgcctctggcccatatcttacccaccagcagaaagtcctgagactttacaaaagagcgctgcgccacctcgaatcctggtgtgtccaaagggacaaataccggtactttgcctgtttgatgagggctcgcttcgaggaacataagaatgagaaggatatggcaaaggccacccagttgctgaaggaggccgaggaagaattttggtaccgccagcacccgcaaccatatatctttcccgattcaccgggtggaactagttacgaaaggtatgattgttataaagtgcccgaatggtgtttagacgattggcatccttctgaaaaagccatgtaccccgactacttcgccaaaagggagcagtggaagaaactgcgcagagagtcatgggagcgggaggtgaaacagctgcaggaagagacaccaccgggaggtccactgaccgaagcgcttccgcctgcgagaaaggagggcgaccttcctcctctgtggtggtatatagtaacgagaccacgggagcggccaatgtag

SEQ ID NO: 231945 - DNA, 471 bp, synthetic construct
  misc_feature 1..471: note = Description of Artificial Sequence: Synthetic coding sequence
  source 1..471: mol_type = other DNA
atggccagccgagtactgtcagcatatgtcagtagactcccagctgctttcgctcctctccccagggtcaggatgttagccgtcgccagaccattgtccacagctctgtgcagcgcaggcacacaaacccggttggggactctccaaccggctcttgtgcttgcgcaggtgcccggacgggtgacacagctctgccggcagtactctgatatgcccccacttactttagaaggaatccaggatcgcgtcctttatgtactgaagctttatgataagatcgatcccgagaaactctctgtgaatagccactttatgaaagacctcggcctggatagtctggatcaagtggaaatcattatggccatggaagatgaatttgggtttgagattccagacattgacgccgagaagctgatgtgcccgcaggagatcgttgactacatcgctgacaagaaggacgtctatgagtag

SEQ ID NO: 231946 - DNA, 231 bp, synthetic construct
  misc_feature 1..231: note = Description of Artificial Sequence: Synthetic coding sequence
  source 1..231: mol_type = other DNA
atggccccatcagccctcctcaggccactctcacggctgctagcacccgctcgcttgcccagcggcccttccgtgcggtccaaattctatgtgcgcgagcctcctaacgctaagccagattggctgaaagtgggcttcactttgggcaccaccgtattcctgtggatctatttgattaagcagcataacgaagatatccttgaatataaacggaggaatggacttgagtag

SEQ ID NO: 231947 - DNA, 231 bp, synthetic construct
  misc_feature 1..231: note = Description of Artificial Sequence: Synthetic coding sequence
  source 1..231: mol_type = other DNA
atggccccttcagccctactgcgccctctctcaagactattagcgccagccaggctgccttccggtcccagcgttcgctcaaaattttacgtgcgtgaacctcccaatgctaagccagactggctcaaagtggggttcacgctcgggaccacagtctttctctggatctacctcatcaagcagcacaatgaagacatcctggaatataagcgcaggaatgggctggaatag

SEQ ID NO: 231948 - DNA, 231 bp, synthetic construct
  misc_feature 1..231: note = Description of Artificial Sequence: Synthetic coding sequence
  source 1..231: mol_type = other DNA
atggcacccagcgctttattgagacccctatctagactactggctccggctcgactcccaagtggccctagcgtaagatccaagttctacgtcagagagcctccaaacgctaaaccggattggctgaaggtaggcttcaccctgggtactacagtgtttctctggatctatttgattaaacagcacaatgaggatattctggagtataaaaggagaaatggtctggaatag

SEQ ID NO: 231949 - DNA, 231 bp, synthetic construct
  misc_feature 1..231: note = Description of Artificial Sequence: Synthetic coding sequence
  source 1..231: mol_type = other DNA
atggccccatctgctttactgagaccgctctcacgcctgctcgcacccgcaagacttccctccgggccatcggtcaggagcaagttctacgtcagagagcctcctaatgctaagcccgattggctgaaagtgggttttacactgggcactacggtcttcctatggatttatcttatcaagcagcacaatgaagacatactggagtacaagagacgcaatggcttggagtag

SEQ ID NO: 231950 - DNA, 231 bp, synthetic construct
  misc_feature 1..231: note = Description of Artificial Sequence: Synthetic coding sequence
  source 1..231: mol_type = other DNA
atggcaccttctgcacttttacggcctctttcccgtctgctagccccagccagactgccatctggccctagcgtgaggtctaagttctatgtccgagaaccacccaatgccaaaccagattggctgaaagtcggattcactctcggaactactgtgtttctgtggatttatctgataaaacagcataacgaggatatcttggagtataagaggaggaacggccttgagtag

SEQ ID NO: 231951 - DNA, 231 bp, synthetic construct
  misc_feature 1..231: note = Description of Artificial Sequence: Synthetic coding sequence
  source 1..231: mol_type = other DNA
atggctccctctgccctgctccggccattaagccgtttgctggcacctgcaaggctgccttccgggccatccgtaagatctaagttctacgttagagagcccccaaacgcaaaacctgactggctcaaggtgggatttaccctggggacgaccgtttttctgtggatatacctaatcaaacagcacaacgaggacattctggagtataagagacggaatggactggaatag

SEQ ID NO: 231952 - DNA, 231 bp, synthetic construct
  misc_feature 1..231: note = Description of Artificial Sequence: Synthetic coding sequence
  source 1..231: mol_type = other DNA
atggctccttcagcactcctccgacccctcagccgcctcctggcgccagcacggctgccatcgggcccatccgtgagaagcaagttttacgtccgcgagcccccaaatgccaagccagattggcttaaggtgggctttacgcttgggactacagtttttctgtggatttatctaatcaaacagcataacgaggatatcctggaatacaagaggagaaacggactggagtag

SEQ ID NO: 231953 - DNA, 231 bp, synthetic construct
  misc_feature 1..231: note = Description of Artificial Sequence: Synthetic coding sequence
  source 1..231: mol_type = other DNA
atggcacccagtgccttgctgaggccactaagtcgtctccttgcgcctgcaagactcccctccgggccttcggtgaggtccaagttctacgtccgggagcctcctaacgcaaagcccgattggcttaaggtgggctttaccctgggaaccaccgtcttcctgtggatctacctcataaaacaacacaatgaggacatcctcgaatacaagagacgtaacgggctcgagtag

SEQ ID NO: 231954 - DNA, 915 bp, synthetic construct
  misc_feature 1..915: note = Description of Artificial Sequence: Synthetic coding sequence
  source 1..915: mol_type = other DNA
atgatctacaccatgaagaaggtccatgctctatgggcatcagtttgtctcctgttgaatctggccccagcacccctgaatgctgacagtgaagaggatgaagagcatactattataacagacaccgaattaccgcctctgaaactgatgcacagcttctgtgccttcaaagccgatgatggcccttgcaaggccatcatgaagagattctttttcaacatctttacaagacaatgtgaggaattcatctacgggggatgcgagggcaaccagaacaggtttgaatctcttgaagagtgcaagaaaatgtgtacgcgagacaacgcaaatcgcatcatcaaaacaactctgcagcaggagaaacctgatttctgctttctcgaagaagatccgggaatttgccgcggatacattaccaggtatttctataacaaccagactaaacagtgcgagcggtttaaatatggtggctgcctggggaatatgaataacttcgaaaccctcgaagagtgtaagaacatttgcgaggacgggccaaatggcttccaagtcgataactacggcacccagctgaacgcagtcaataattcgctgaccccccagtcaactaaggtgccgagtctgttcgaatttcacggcccatcctggtgcttaacccctgcggaccgcggattgtgtagggctaacgaaaatcgtttttattacaattctgtgattggaaagtgcaggccctttaagtactcaggatgcgggggtaacgaaaacaacttcacgtcaaagcaagaatgcctgcgggcttgtaagaaggggttcatccaaaggattagtaaagggggtctaatcaaaacaaagaggaagcgcaaaaagcagcgcgtcaaaatcgcctatgaggaaatcttcgtcaagaacatgtag

SEQ ID NO: 231955 - DNA, 2013 bp, synthetic construct
  misc_feature 1..2013: note = Description of Artificial Sequence: Synthetic coding sequence
  source 1..2013: mol_type = other DNA
atgcaaatcccacggttctgctaccacgaaaggctaagcgtagccggtaactgtaggatgtgcctggtcgaaatagagaaagctcccaaggtggtcgccgcttgcgcaatgcctgtcatgaaggggtggaatatcctgaccaactccgaaaaatcgaagaaggcaagggagggcgtgatggaattccttctcgccaatcatccacttgattgtcctatctgtgaccaggggggtgagtgtgacctccaggatcagtctatgatgtttgggaatgacagatcccggtttttggagggaaaaagggccgtggaggacaagaacatcgggcctctggtcaaaaccattatgactcgctgtatccagtgtacccgctgcattaggtttgcaagtgagatagcaggggtcgacgacctcggaacaaccggaagaggaaatgacatgcaggtcggaacgtacattgagaagatgtttatgtcagagctatccgggaatatcatcgacatctgccctgtgggagccctgacctcaaaaccgtatgcgttcacggcgagaccatgggaaacccgcaagaccgagagtatcgacgttatggacgctgttgggtccaacattgtcgttagtactagaaccggcgaggtgatgcgcattctccctcgaatgcacgaggatattaacgaggagtggatatcagacaagacaaggttcgcctacgacgggcttaagcgacagcgcctaactgaacctatggttcgcaacgagaagggcctgctgacgtatacaagttgggaagacgctctttctagggttgctgggatgcttcaaagctttcagggtaaagacgttgcagccattgccggtgggttggtggacgctgaggcgcttgtggcactgaaggacttgcttaaccgcgttgactcagatacactatgcacagaggaggtattccccaccgcgggtgcaggcacggatttacgcagcaactacctcctgaataccaccatcgccggagtcgaagaggcagacgtagttctgctggttggcactaaccctagatttgaggcccctttgttcaatgcacggattcgcaagtcatggttgcataacgacctcaaggtcgccctgatcggctcccccgtcgatcttacctacacgtatgaccatctcggagactctcctaaaatactgcaggacatcgcctccggctcccaccctttctctcaggtgctgaaggaagctaagaaacctatggtggttctgggttccagcgcactccaacggaatgacggagctgccatcctggcagcagtctcaagcattgcccagaaaataagaatgaccagcggagttaccggtgactggaaggtgatgaacatactgcacagaatagcctcccaggtggcagctcttgatctgggatacaagcccggtgtggaggcaattcggaaaaacccacctaaggtactgtttttgctgggtgctgatggaggatgtatcacaagacaggacctgcccaaggactgtttcatcatctaccaggggcaccatggcgacgtgggggcacccatagccgacgttatcttaccaggggcagcttacaccgagaagagcgccacatacgttaacacagaaggtagggcacaacagacaaaagtggctgtcacaccccctggcctggccagggaagactggaagataatccgggctcttagcgaaattgcaggaatgacccttccttacgatacactggaccaagtgcgcaatcgcttggaagaagtctcaccgaatttggtgaggtacgacgatatagagggagccaattatttccagcaggctaatgagctctcaaaactcgtgaatcaacagcttctcgccgaccccctggtccccccacagttgactattaaagacttctatatgactgatagcatctctagagcttctcaaaccatggctaagtgtgtgaaagcagtaaccgagggagctcaggcggtcgaggaaccttctatctgttag

SEQ ID NO: 231956 - DNA, 1851 bp, synthetic construct
  misc_feature 1..1851: note = Description of Artificial Sequence: Synthetic coding sequence
  source 1..1851: mol_type = other DNA
atgtgggaaggcgtcatggagtttctcctggcaaatcatccgttggattgcccgatctgcgaccaaggaggagaatgcgacctccaggatcagtccatgatgtttggaaacgacagatcccgcttccttgaagggaagagggccgtagaagataagaacataggtcccctcgttaagaccatcatgacccgttgtatccagtgcactcgctgcattcgattcgcgtcggagattgcgggagtggacgatctaggtacgactggcaggggaaatgacatgcaagtggggacgtacatagaaaagatgtttatgtccgaactcagcggcaacatcatagatatttgtcccgtcggggctctgacgtctaagccctatgcattcactgccagaccgtgggagacccgtaaaacggagtcaatcgacgtgatggacgccgtggggtcaaacattgtcgtgtcaacccgtacgggcgaagtgatgagaatcctgcccagaatgcatgaggatatcaatgaagaatggatttcagacaaaacccgctttgcttacgacgggctgaagaggcagaggctgaccgaacctatggtgcggaacgaaaaggggcttttgacttatacatcgtgggaagacgcactgagcagagtggcgggaatgctgcagagcttccagggtaaggacgtcgccgctatcgcgggtggactagtggatgcagaggccttagtagctctcaaagatttgctcaatcgcgtggacagcgacactctctgcaccgaggaagtgtttcctacagctggcgctgggaccgatctcagaagcaattatctccttaatactactatcgccggtgtggaagaggcagacgtcgtgctgctggtcggcaccaacccgcgtttcgaggcacccttatttaacgcgagaatccggaaatcatggctccacaacgatttgaaggtggccttaattggcagccctgtagatctgacctacacatacgatcatctcggtgactcccctaaaatcttgcaagacattgcttctggcagccaccccttcagccaagtgctgaaagaagcgaagaagccgatggtagtcttgggctctagtgccttgcagcggaacgacggcgcagcaatcctggccgcagtatcaagcatcgcacagaagatcaggatgactagcggggtgacaggcgactggaaggtgatgaacatccttcaccgcatagcttcccaggtcgctgctctagacctgggctacaaaccaggcgttgaagctatacgcaagaatccccctaaggtcttatttctgctaggggcagacggaggctgtatcacccggcaagatctgccgaaagattgcttcatcatatatcagggacaccacggagacgtgggagctccgattgccgacgtgatcctgcctggcgctgcctacactgagaagtctgcaacgtacgttaacacagagggcagggcccagcagacaaaggtcgctgttacacccccaggactcgctcgagaagattggaagattataagagcgctaagcgaaatcgcgggtatgacactaccgtacgatacacttgatcaggttcggaatcggctagaagaggtgagccctaacctggttcggtacgacgatatcgaaggggctaactacttccagcaggcgaatgagctctccaaacttgtgaaccaacaactgctcgctgacccactcgttccccctcaattaaccatcaaagacttctatatgacggactccattagcagggcttcccagaccatggctaaatgcgtgaaagccgttacagagggcgcacaggcagttgaggagccctctatatgttag

SEQ ID NO: 231957 - DNA, 2076 bp, synthetic construct
  misc_feature 1..2076: note = Description of Artificial Sequence: Synthetic coding sequence
  source 1..2076: mol_type = other DNA
atgctgcgcatcccagttcgaaaggctcttgtgggcctcagcaaatcacccaaaggatgcgtgaggacaaccgcgacagccgcttcgaatctcatagaagtgtttgtcgacggccagtcagtgatggtcgagccaggcacaacagtactccaagtggtggcagcatgtgcaatgccagttatgaaaggctggaacattctgacaaactcagagaagtccaaaaaggccagggagggggttatggagttccttctggccaatcaccccctggactgcccgatctgcgaccagggtggcgagtgcgacctgcaggaccagtccatgatgttcgggaacgatcgctcaagattcctcgaagggaaaagagccgtcgaggataaaaatattggcccactagtcaagactattatgactcgatgcatccagtgtactcggtgtatcagattcgccagcgaaatcgctggcgtagatgacctgggcacaaccggcaggggaaacgatatgcaggtgggaacatacatagagaaaatgtttatgtctgagctgtccgggaacatcatagatatttgccctgtgggtgcgttaacttctaagccctacgcttttactgctcgcccatgggagactaggaaaactgagagcatagatgtgatggatgctgttggaagcaatatcgtggtgtccacccggacaggagaggtaatgcggatcctgcccagaatgcacgaagacatcaatgaggaatggatctcagataagacccgatttgcctatgatggtctcaagcggcagcggctcaccgagccaatggtccgaaacgaaaaggggctgctgacttatacctcatgggaagatgccttgagccgtgtggccggaatgctgcagtcttttcagggcaaagacgtcgccgcaatcgccggtggcctagttgacgctgaagccctggtggccctaaaggatttgcttaaccgagtagactctgacaccctgtgtactgaagaggtatttcctacagcaggcgcaggtacagaccttcggagtaattatcttttgaacaccaccatcgccggagttgaggaggccgacgttgtgctgctagtgggaacaaaccctagattcgaggcgcctctattcaatgctagaatccgaaaatcatggttgcacaatgatctgaaagtggccctcataggaagcccagtggacttaacatacacttacgaccatctgggcgatagcccaaagattttgcaggacattgcctcaggttcacatccattttcgcaagtgctaaaagaagccaagaaacccatggtcgtgttagggtcctcggccctgcagcggaatgacggcgctgctatcctggcggcagtgtctagcattgctcaaaaaatcaggatgaccagcggggtcacaggcgattggaaggtcatgaatattctccacaggattgccagtcaggtggctgctctcgacttgggatacaagcccggtgtggaggccatccggaaaaatcccccaaaagtgctctttttgctgggggcagacggcggttgcatcactagacaggatctgccgaaagattgcttcattatctaccagggccatcacggagatgttggggctccaatagctgatgtaatactgccaggggcagcttataccgaaaaaagtgctacatatgtgaatacggagggccgagcccagcagactaaggttgcagtcaccccccctggcttggccagggaagattggaaaattatcagagccctttctgagatcgcaggcatgacgctgccttacgacacactggatcaggtgcgaaacagactcgaggaagtgagcccaaatttggtgcggtatgatgatatcgagggagccaattacttccaacaggccaacgagctgtctaaactggtcaatcagcagcttttagccgaccctctcgtgcccccacaacttacaattaaggacttctatatgacggattctataagtagggcgtcccagacaatggcaaaatgcgttaaggccgttacagagggggcacaagcggtggaggaaccatccatctgctag

SEQ ID NO: 231958 - DNA, 2184 bp, synthetic construct
  misc_feature 1..2184: note = Description of Artificial Sequence: Synthetic coding sequence
  source 1..2184: mol_type = other DNA
atgctaagaataccggtgcgaaaagctttggtcggcctgtcaaagtctccaaaggggtgcgtcagaacgactgccacagccgcaagcaatttgattgaagtgtttgtggacggccagtccgtgatggtggaacctgggactaccgtgctgcaagcctgcgaaaaggtcggaatgcagatcccccgtttctgttaccacgaacgcctgtctgtggctggcaactgcagaatgtgccttgtggagatcgaaaaagccccaaaagtggtcgctgcctgcgccatgcccgtgatgaagggatggaatatactgaccaatagcgagaaaagcaagaaagcgagagaaggagtcatggaatttttgttagcgaatcaccccctggattgccccatctgtgaccaggggggagaatgtgatctgcaggatcagtcaatgatgttcggtaatgacagatctagatttctcgagggcaaaagagctgtcgaggataagaacattggtccactggtcaagactatcatgactaggtgtatccagtgcacaaggtgcatcagatttgcatctgagattgccggagtggacgatctgggaaccacggggagaggcaacgacatgcaggtgggaacttatattgaaaaaatgttcatgtccgaattgtctggaaacataatagacatctgtccagtcggggcacttacaagtaagccctacgctttcaccgccagaccttgggagactagaaagacagaaagcatagacgtgatggacgccgtcggaagtaatatcgtggtatccaccagaacaggagaggtcatgagaatactgccccgtatgcacgaagatatcaacgaggaatggatttcagataagacccggttcgcctatgatggactcaagagacagagacttaccgaaccgatggttagaaacgaaaagggtttgctgacatacacctcttgggaagacgcattgtcccgcgtggccggaatgctgcaatctttccaggggaaggatgtcgccgcaatcgcgggaggactggtggatgctgaggccctggtggctctgaaggacctgctgaatcgggtggactccgatactctttgtacagaagaggtgtttccaactgccggagccggaactgatctgagatccaattatctactgaacactactatcgccggtgtagaagaagctgacgtggtactgctagtaggaacaaatccaaggtttgaagcacctctgtttaatgctcgcatacgcaagtcctggctgcataatgacctaaaggtcgcccttatagggagccctgtggacctgacatacacgtacgatcacctgggagatagcccgaaaatcctgcaggacatcgcctccggatcacatccattttctcaagtcttgaaagaggcgaaaaaacccatggtggtgctcggcagttcagctttacagcgcaacgatggggctgctatacttgccgcagtatcatccatagcacagaagatccggatgacatccggagtaactggggattggaaagtgatgaacatcttgcaccgcattgcaagtcaggtggccgcactggatcttggatataaaccaggggttgaggccattcggaagaaccctccaaaggttctgtttctcctcggggctgacgggggttgcattactcggcaggatctacctaaggactgctttataatttaccagggccatcacggcgacgtgggtgctccaatcgccgatgtaatactgcccggagcagcttatactgagaaaagtgcgacatatgtcaacactgaaggaagagcccagcaaacaaaggtggccgttacgccacccggattggccagggaagattggaaaatcattcgagccctcagcgagatagccggaatgacgctgccatacgatacactggaccaggtgcggaacagactcgaggaggtctcccctaacttggtccgttacgacgatattgagggcgcaaattacttccagcaggccaatgagttgtccaagctcgtgaaccagcagctgctggccgaccctttggtgcccccacaactgacaattaaggatttctacatgaccgactccattagccgcgcatcccaaactatggcgaaatgtgtcaaggccgtcacggagggcgcacaggcggtcgaagaacccagcatctgctag

SEQ ID NO: 231959 - DNA, 393 bp, synthetic construct
  misc_feature 1..393: note = Description of Artificial Sequence: Synthetic coding sequence
  source 1..393: mol_type = other DNA
atgctgcgcatcccagtcagaaaagccttggttgggttgagtaagtcccccaaaggatgtgtgagaaccactgctacagcggcttcgaatttaattgaggtctttgttgacggacaatccgtgatggtggaacctgggactaccgtcctgcaggcttgcgaaaaggtgggcatgcagataccacggttttgttaccacgagcggctctccgtggctgggaactgtaggatgtgcctggttgagattgagaaagcacctaaggtcgtcgctgcctgcgccatgcctgtcatgaagggatggaacattctgaccaactcagagaaatcaaaaaaggccagggaaggcgtgatggaattcctgctggccaaccacccgctggattgccctatctag

SEQ ID NO: 231960 - DNA, 2226 bp, synthetic construct
  misc_feature 1..2226: note = Description of Artificial Sequence: Synthetic coding sequence
  source 1..2226: mol_type = other DNA
atgcgtatacgcggtagctccggaacgttgagccgcataaatatgctaaggattccagttagaaaggcattagttggtttgagtaagtcaccaaaagggtgcgttcgaactaccgcgacagctgcctcaaacctgatcgaggtatttgtcgatggccagagcgttatggtcgagccagggaccaccgttttgcaggcgtgcgagaaggttggcatgcagatccctaggttctgttaccacgaaagactcagcgtggccggaaattgccggatgtgcctcgtggaaatcgagaaggcccctaaggttgtcgcagcctgtgccatgccagtgatgaagggctggaatatcttgactaactctgagaaatctaagaaagcacgagagggggtgatggagttcctcctggctaaccacccgctcgattgccccatttgtgatcaaggcggagagtgtgacctacaggatcagagtatgatgttcgggaacgatcgttctaggttcttggagggtaaaagggcagtggaagacaaaaacattgggccattagtcaagacaattatgaccagatgtatacaatgtacacgatgtattcgcttcgcaagtgaaatcgctggggtggatgacctagggaccacaggcagagggaacgacatgcaggtaggtacatatatagagaagatgttcatgtcagagctttctgggaatattatagacatctgtccagtgggcgcacttacatcaaagccttacgccttcaccgctagaccttgggagacgcggaaaaccgagtccatcgacgttatggacgcagtcgggtccaacatcgtcgtctctacgcgcaccggagaggtgatgcgaattctgccaaggatgcacgaggatattaatgaagagtggatcagcgacaaaacacgatttgcttatgatggcctgaaacggcaacgactgacagaaccgatggtgagaaatgagaagggattactgacatacacgtcttgggaagacgctctgtccagggtagccggaatgttacagtcgtttcagggaaaagatgttgcagcaattgccggaggactggtggacgcggaggctctggtggcattgaaggacctgttaaacagggtggactctgacacattatgcaccgaggaagtgttcccaaccgcgggtgcaggtactgacctgaggagtaactacctgctgaacacgaccatcgctggcgtggaggaggcagacgtagttctactcgtgggcacgaatcccaggtttgaggcaccactcttcaatgccagaatcaggaagagttggctccacaatgacctgaaggtggcactcattggatcaccggttgatcttacatacacatacgaccacttaggcgacagccctaagatcctccaggacattgcctcaggctctcaccccttcagccaggtgctgaaggaggcaaagaaacctatggtggtccttgggtcatccgctctgcagcggaacgatggggcagcaattctcgcggcagtttctagtatagcccagaaaataagaatgacttcaggtgttactggcgactggaaggtcatgaacatcctacacagaatcgcctcacaagtggccgctcttgatttgggatataaacccggtgtagaagcaattcgaaaaaaccctccgaaagtgctgtttctgctgggcgctgacggaggctgtattacccgacaggatttaccaaaggactgcttcatcatctaccaggggcaccacggcgatgttggagcgcctattgccgatgtcattctgcccggagccgcatacaccgagaagtcggccacctatgttaatacagagggcagggcccagcagacgaaggtggccgtgaccccgccagggctcgctcgcgaggattggaagattatcagagctctgtccgagatagctggaatgactctgccatacgatacattagaccaagtaagaaaccgactggaggaggtgtctcctaatctggtccggtacgacgatattgagggggcaaattattttcagcaggccaatgagctctctaagctggtgaaccaacagttgcttgcagatcctctggtgccgcctcagctaactattaaagacttctacatgacagattccatcagcagagctagtcaaactatggccaaatgtgtgaaggcagtgacagaaggcgcacaggcagttgaggagccttcgatatgctag

SEQ ID NO: 231961 - DNA, 1836 bp, synthetic construct
  misc_feature 1..1836: note = Description of Artificial Sequence: Synthetic coding sequence
  source 1..1836: mol_type = other DNA
atggagttcttgctggcaaatcatcctctggactgccccatttgcgaccagggcggagagtgcgacctccaggaccagtccatgatgttcggaaacgatagatcccgattcttggagggaaagcgggcagtggaggacaagaacataggtccactggttaaaactattatgacgaggtgtatccagtgtacacgctgtattcgtttcgcttcggagatcgcgggagtggacgatttggggacaacaggacggggaaatgacatgcaagttggaacctacatcgaaaagatgtttatgtctgaactgtctggaaacatcattgatatttgcccggttggtgccttgactagcaaaccgtacgcctttaccgcccgtccctgggaaactcgaaagaccgagtccattgacgtgatggatgcagtggggagcaacatcgttgtctcaacccgcacgggtgaagtcatgcgcattttgccccgaatgcacgaagacatcaacgaagagtggatttccgataagacacggttcgcatatgatggccttaagaggcagaggctcacggagcctatggtgcgtaatgagaagggcttgcttacctatacatcgtgggaggacgctctttcccgagttgcaggcatgctgcagtcctttcaaggcaaggacgtggccgctatcgcagggggattggtggatgctgaggcactcgtcgctctgaaggatttactgaaccgagttgattccgacaccttatgtactgaggaggtattccctacggctggtgcgggtactgatctgcgatcaaattatttgctgaatacaacaatcgctggcgtggaggaagccgacgtagtacttttggtcggaacaaatccaaggtttgaagcgccactgttcaatgcacgcatacgaaagtcctggctccacaatgacctgaaggtcgcactgatcgggtctccagtggatctaacctacacgtatgatcacctcggcgatagcccgaaaatcctacaggatatcgcatccgggagccacccctttagtcaagtcctgaaggaggccaaaaagccaatggttgtcctaggctcttccgctcttcagcgcaatgatggagcagccattcttgcagccgtgagctcaatcgcccaaaaaatccgaatgacaagtggcgttacaggagattggaaggtgatgaacatcctgcaccggattgcatcacaggtcgctgctctggacctggggtacaagccgggagtggaggccatcagaaaaaatcctccaaaagttctcttcctattgggggctgatggcggatgcattacacgccaggatctgccaaaagactgcttcatcatttatcaggggcaccatggggacgtgggtgcaccaatcgcggatgtgatactgcctggagctgcctacactgaaaaaagtgcaacctacgtgaacacagaaggcagggcccagcagaccaaggtggctgtcacacctcccggactcgcccgagaggactggaagatcattagagcgctgtccgagatcgcaggcatgaccctgccttacgataccctggatcaggtccggaaccgcttggaggaggtatccccaaatctggttcgatacgatgatattgaaggcgctaactatttccagcaggccaacgagctgagtaagctggtgaaccaacaattgctggcagaccccttggttccccctcagttaacaatcaaggacttttatatgactgactctattagtcgagcttcacaaacaatggcaaagtgcgtgaaagccgtgactgaaggggctcaggctgtggaagagccgtctatctgctag

SEQ ID NO: 231962 - DNA, 1392 bp, synthetic construct
  misc_feature 1..1392: note = Description of Artificial Sequence: Synthetic coding sequence
  source 1..1392: mol_type = other DNA
atggccgctctgcgcgcactttgcgggttccggggtgtggccgcacaggtactgcggcctggagccggagtccggttgcccattcaaccttcgcgcggtgtgagacagtggcagcctgacgtcgaatgggcccaacaattcggtggtgccgtgatgtatcccagcaaggagaccgcccattggaaaccgccaccatggaatgacgtcgatccgcctaaggacaccatagtgaagaacattaccctgaatttcggtcctcagcatcccgcagcgcacggggtgcttaggctcgtgatggagctgagcggggagatggttcgtaagtgcgatccccacattggactgctgcatcgcggaaccgaaaaattgatcgaatataaaacttatctgcaggccctgccctacttcgatcggctggactacgtgtcaatgatgtgcaatgaacaagcctattctctcgccgtggagaaactgcttaatattcgccctcctccacgagctcaatggatcagagtgttgtttggcgagattactcgcttgctcaatcacatcatggccgtgacaacacacgcacttgacttgggcgctatgacgcccttcttctggctcttcgaggagcgggaaaagatgtttgagttttatgaaagggtgtcgggggcacgcatgcacgctgcctacatccgtcctggcggtgtgcatcaggatctacctctcggcctcatggatgacatctaccagttcagcaagaatttttcgctccgtctcgacgagctggaggagctcctgacaaataatcgcatttggcgcaaccggaccatagatatcggagtggtgacggccgaggaagccctgaattacgggttctccggagttatgctgcggggatcaggaatccagtgggatctgcgcaagacacagccatatgatgtgtatgatcaggtcgaattcgacgtgcccgttggctccaggggtgattgttacgacaggtatctatgccgtgtcgaagagatgcgccaatccctccgcataattgcccagtgtttaaataaaatgcctccaggtgagattaaagtggacgatgccaaggtctccccgcctaaacgtgccgagatgaagacgagcatggaatctctgatccaccatttcaagctatacacggaaggataccaagtcccacctggcgctacatataccgccattgaggccccaaagggtgaatttggagtgtatctcgtgagcgatggctcatcacgaccttacagatgcaagattaaggctcccggatttgcgcatcttgctggactcgataagatgtccaaggggcacatgctggctgatgtagttgccataataggtactcaggatatagtctttggcgaggtcgatcggtag

SEQ ID NO: 231963 - DNA, 1374 bp, synthetic construct
  misc_feature 1..1374: note = Description of Artificial Sequence: Synthetic coding sequence
  source 1..1374: mol_type = other DNA
atggctgcacttagggcattgtgtgggttccgaggcgtggccgcacaggtgctgcgcccaggcgcaggcgtgcgcttaccaatccagcccagcaggggcgtgcgccaatggcaacccgatgtggagtgggctcagcagttcggtggagcggtgatgtatccaagcaaggagaccgctcattggaaaccaccaccttggaatgatgtagatcctcccaaggatacgatcgtcaagaatattacactgaatttcggcccacagcaccctgccgcacacggggtgctcaggctagtgatggaactttccggtgaaatggtccggaaatgtgacccccatatcggcctcctgcacagaggaacagaaaagctgatagaatacaaaacatacctccaagctctcccctactttgacaggctggattatgttagcatgatgtgtaacgagcaggcatactcactggctgtggagaagctcttgaacatccggccacctcctcgagcacaatggatacgcgttctctttggcgaaatcactaggctgctgaatcatattatggcagtcactactcatgcccttgacttaggcgctatgacacctttcttctggctgttcgaagaacgtgaaaagatgtttgaattttacgaaagggtgtccggcgcaagaatgcacgccgcatatatccggccaggtggcgtgcaccaggacctgccattaggcctgatggatgacatctatcagttcagcaagaattttagcctgcgcctagacgaactggaagagttgctgacaaataatagaatttggcggaaccggactatcgacattggagtagtcaccgctgaggaggccctaaattacgggttctccggggtgatgttaagaggttctggcatccagtgggacttgcgtaagacacagccctacgatgtgtatgatcaagtggagttcgacgttccagtcggctcgagaggtgactgttatgaccgctacctatgtagggtcgaggagatgcgccagtctctacggattatcgctcagtgcctgaataaaatgccgccaggcgagataaaagtcgatgacgcaaaagtgtcacccccaaagagagctgagatgaaaacttctatggagagtctgattcaccactttaagctgtacacagaagggtatcaagtgccccctggcgctacttacacagccatcgaggcacctaaaggcgaatttggcgtctacctcgtgagcgacggaagctcccgaccatacagatgcaaaatcaaggcccctggcttcgcccacttagccggtctggacaaaatgagtaaagggcacatgctggccgacgttgtcgcgatcattggaaccagacccatcgtgtag

SEQ ID NO: 231964 - DNA, 696 bp, synthetic construct
  misc_feature 1..696: note = Description of Artificial Sequence: Synthetic coding sequence
  source 1..696: mol_type = other DNA
atggaactgtccggcgagatggtgcgcaaatgcgacccccatatcgggctgctgcatagaggaaccgagaagcttattgagtataagacctacctgcaggccctgccctattttgatcgcctggactacgtgagcatgatgtgtaacgaacaggcatacagcttggcggtggagaagttactgaacatcaggcccccaccacgagcacagtggattcgcgtgctctttggcgagataactcgtcttctgaaccatattatggcggtgacaacacacgcccttgacctaggcgcaatgacaccgttcttctggctcttcgaagagagggagaagatgtttgaattttacgagcgtgtgagtggcgcacgaatgcacgctgcctacatcagaccgggaggggtccatcaggaccttccattgggtttgatggacgatatataccagttttcaaagaacttttctctacggctcgatgaactcgaagaactgttgactaacaatcggatatggaggaacagaaccattgatatcggagtggtcacagccgaagaggcgcttaattacggtttctcgggagttatgctccggggttccggcatccagtgggacctgaggaagacccagccatacgacgtatacgatcaagtggagttcgatgtaccagttggttctagaggggattgctacgatcgctag

SEQ ID NO: 231965 - DNA, 162 bp, synthetic construct
  misc_feature 1..162: note = Description of Artificial Sequence: Synthetic coding sequence
  source 1..162: mol_type = other DNA
atgtttgaattttacgagagggtgtctggtgctcggatgcatgcggcatatataaggcctggaggggtccaccaagacctgccactcgggctgatggacgatatctaccagttcagtaagaactttagtctccgcttggatgagctggaagaggtgagctag

SEQ ID NO: 231966 - DNA, 795 bp, synthetic construct
  misc_feature 1..795: note = Description of Artificial Sequence: Synthetic coding sequence
  source 1..795: mol_type = other DNA
atggcagctgccgctgtagctcgtctgtggtggcgaggcattttgggagccagtgccttgacacggggaaccggaaggccctctgtgctcctgctgcctgtccgacgggaaagcgctggggctgacaccaggcccaccgtcagacctaggaacgatgtggcccataaacaactatcagcatttggtgagtacgtggcagagattctgcccaaatacgtgcagcaggtgcaggtgagctgcttcaacgagctggaggtctgtatccatccagatggcgtcattcctgtactgaccttcctgcgcgaccacacgaacgcccaattcaagtccctggtggacctgaccgcagttgatgtgcccactagacaaaacagattcgaaattgtgtacaacctcctgtcactgagatttaactccaggatcagggtgaagacatacactgatgagctgacccctatcgaatcggctgtcagtgtgttcaaggctgcgaactggtacgagagggagatttgggacatgtttggggtcttttttgccaaccatcccgacctacgacgcatcctcacagattacggctttgaaggccaccccttcaggaaggatttcccgctgtctggttacgtcgagctccggtatgacgacgaagtgaaacgagtcgtcgcagaaccagtggaactagctcaggaatttcgtaagttcgacctgaactccccttgggaggccttcccagtctaccgacagcctcccgagtccttaaagctggaggctggcgacaagaagccagatgcaaagtag

SEQ ID NO: 231967 - DNA, 528 bp, synthetic construct
  misc_feature 1..528: note = Description of Artificial Sequence: Synthetic coding sequence
  source 1..528: mol_type = other DNA
atggcggctgtgtccatgtcagtggtactcaggcagaccctctggcgccgtcgagccgtcgcagtggccgcattgagcgtgtcacgcgttcccacgagatctctacgcacaagtacctggcggttggcacaagaccagacacaggatacccaacttatcacagtggacgagaaattggacattaccacactcacaggcgttcctgaggagcacatcaaaacccgcaaggtgcgaatctttgtgccggctcgtaacaatatgcagtctggcgttaacaacaccaaaaagtggaagatggaattcgataccagagaaaggtgggaaaatccactgatggggtgggccagtaccgctgatcccctctccaacatggtgcttacattctctaccaaagaagatgctgtgtccttcgcagagaagaacggatggtcttatgacattgaagaacgtaaagtgcccaagccaaaaagcaagagctatggcgctaacttttcttggaacaagcgcacccgcgtgtcaaccaaatag

SEQ ID NO: 231968 - DNA, 321 bp, synthetic construct
  misc_feature 1..321: note = Description of Artificial Sequence: Synthetic coding sequence
  source 1..321: mol_type = other DNA
atgcctttccttgatatccagaagagatttggcctgaacattgacaggtggctaaccatccagtccggtgagcagccatataaaatggccggaaggtgccacgcatttgaaaaagagtggatagaatgcgcacatggaatcggctacacgagggcagaaaaggaatgtaagattgagtacgatgacttcgtcgaatgccttttacgtcagaaaaccatgcgacgcgctggaacaatacgcaaacagcgggacaagcttattaaagaaggtaaatacactccaccacctcaccatatcgggaagggggagcccagaccttag

SEQ ID NO: 231969 - DNA, 321 bp, synthetic construct
  misc_feature 1..321: note = Description of Artificial Sequence: Synthetic coding sequence
  source 1..321: mol_type = other DNA
atgccatttctggatattcagaaaagatttggcttgaatattgataggtggctgaccattcagtcaggagagcagccttacaaaatggccggacgttgccacgccttcgaaaaggagtggatagaatgcgcccacggaatcggctacaccagggcagagaaggaatgcaaaatagaatatgacgactttgtggagtgtctgctcaggcagaagacgatgcgcagggctgggactatcagaaaacagagggataaactgattaaagaaggtaagtacacccctccccctcatcacattgggaaaggcgagccacgaccctag

SEQ ID NO: 231970 - DNA, 375 bp, synthetic construct
  misc_feature 1..375: note = Description of Artificial Sequence: Synthetic coding sequence
  source 1..375: mol_type = other DNA
atggccgcagccatgaccttttgcaggttattgaatcggtgcggggaggccgctcgctctctgccactcggggcacggtgcttcggagtcagagtctcgccgaccggagagaaggttacacacactgggcaggtatatgacgataaggactaccgccgaattagattcgtgggtcgccagaaagaggtgaatgagaacttcgctatcgatctgatagccgagcagccggtctctgaggtcgagaccagggtgatagcctgtgacgggggaggaggggcactggggcaccccaaagtttacatcaacctagataaggagacaaagacaggtacctgtggttattgtgggttgcagttccgtcaacaccatcattag

SEQ ID NO: 231971 - DNA, 1560 bp, synthetic construct
  misc_feature 1..1560: note = Description of Artificial Sequence: Synthetic coding sequence
  source 1..1560: mol_type = other DNA
atggccccaatacctaagaccgtgggcagaatcaagcttgactgctcacttagaccttcttgcccgttggaagtcgcggctgcccctaagctatgtaaagaattcggcccagaagactatggggaagaggatatcgtggacttcttgaggagactggttgagtctgaccctcaggggctgcaccgcattcacgtagatggcagcagtggacggctccagctgtggcaccatgattacctgctcggccatcttgacgatgaaggcaaatccactgggcagagtgatcgagggaagggcgctgaaggtctgggaacttattgtggcctgagaaagtcctttttatatcccccacaagagtctgagccttgcccccagtcgcctagcgcctcggccaccttcccctctgttagcgactccctcctgcaggtcgcgatgccacagaagttattggtgaccgaggaggaggcaaataggttagccgaagaactcgtggccgaagaagaaaggatgaaacaaaaagccgagaaaaagcggctgaaaaagaaaaggcaaaaagagcggaagcgacaggaacggttagagcagtattgcggcgaacctaaggcatccaccaccagcgatggggatgagtctcctccatcctccccaggaaatcccgtgcaagggcaatgcggagaggaggaagatagtctggatttgtcttccactttcgtctctctggctctgcggaaggtgggagactggccactgagtgccaggcgagaaaagggcctcaaccaagagcctcaggggcgaggattggccctgcaaaaaatgggacaggaagaggagtcccctccacgggaagagcgcccacagcagtcccccaaagttcaggcttcaccaggattgctcgcggctgccttgcaacagagccaggagctggccaaactggggaccagcttcgcacaaaatggcttttaccacgaggccgtggtgctgtttacccaggccttgaaacttaaccctcaggatcacaggctgtttgggaacaggtcgttctgtcatgagcggttgggccagcctgcttgggctctcgcggatgcccaagttgccctgacgttaaggcccggatggccgcgagggctgttcagattaggcaaagcccttatgggcctacagcggttccgagaggccgctgctgtttttcaggagaccttaagaggagggtcacagcctgacgctgctagagagttgagaagttgccttctccacctgacccttcaggggcagcggggtggcatttgtgctccacctcttagtccaggtgccctgcagcccctaccccatgcagaattagctccgtcaggcctcccgtcccttaggtgtccgcgatcaacggcgttacgctcgcctggactttcaccacttctccactacccctcctgtcacaggtcacatccaaaccagccattgtcccagacgcaatcacgcaggcctcaccctttgaagccacaagatccgtcaaaaggctgggacatacttggtctcggtcttcaacacctgtcccaggcgaggtag

SEQ ID NO: 231972 - DNA, 621 bp, synthetic construct
  misc_feature 1..621: note = Description of Artificial Sequence: Synthetic coding sequence
  source 1..621: mol_type = other DNA
atggctgttctctcggctccaggtctgcggggatttaggattctaggcctacgatcctccgtgggcccagcagtgcaggcgaggggagttcaccaatcagtcgctacagacggaccatcctccactcagcccgctctacccaaggctcgggcagtagctcccaagccatctagcaggggagaatacgtggttgcaaagctggacgaccttgttaactgggctaggcggtcctctttatggcctatgacattcggtctcgcctgctgcgccgtggaaatgatgcacatggccgcaccacggtacgacatggacaggttcggggttgtgtttagagcgtcccctaggcagtcggacgttatgatcgtggccggtactttaaccaacaagatggcccctgccttgaggaaagtttacgaccagatgcccgagcctcggtacgtggtctctatgggaagctgcgcaaacggcggaggatattaccattattcctacagtgtcgtgcgcggatgtgaccgaatcgtgcccgtggatatttacatcccaggcagagccggaaccgcgcctccaacaagagagctggagactggccctgcccctcatggcgcacgtcgtcctctgtag

SEQ ID NO: 231973 - DNA, 885 bp, synthetic construct
  misc_feature 1..885: note = Description of Artificial Sequence: Synthetic coding sequence
  source 1..885: mol_type = other DNA
atggccgttttgagtgccccaggcctcagaggctttcggatccttgggctccgctcaagtgtgggaccggcagtacaggccaggggagtccaccagtctgtggcgactgatggtccatcatcaactcaacctgccctgcctaaggcccgagctgttgcacctaagccttcatctaggggcgagtacgttgtcgcaaagctggacgacctggtgaattgggcaagaagagtgtcgacgatgtcctgtcgaccgtccagttctgccagggcctcgcttcacacccacaggcatactcatacacatactaacgtccagacacggacccatactacacatgcctgtaccctgacatgtgcacacgtacacgcctcttcccacgtctggactgacgtatacaccgaccacacacacacacacgctcataatgcccacatgcataccaggactcacgcacatctgcatacacacgcacatactagcacttgcgctcatacgctcgcacatattcatacctgcacactcgctctgatgcacacccatgcccacatttacacctgcactagaacactcgctcatacgtgtacctacatgcactcgcacgctcatacctgcaccctgacacacatgcacaccaggccatgcgttgatacgtgcatgtgtgcgtgctggcacgcttgtacacaggcccattccctcatgcacacacatccatgcggaaggggcgcagggaggacgctgccagaagcaccagtgctggcctggtggccagttgtgccttcagaggattcagatccagctggcgacgatcctagtgtaagcgtgatcctgttcttggcttcagtgtgcagctcatgtttctcatttaaggtgaaagcggtgttctag

SEQ ID NO: 231974 - DNA, 645 bp, synthetic construct
  misc_feature 1..645: note = Description of Artificial Sequence: Synthetic coding sequence
  source 1..645: mol_type = other DNA
atggctgttctgagcgctcccggactgaggggttttaggattttagggcttaggagtagcgtgggacctgctgtgcaggcacgcggagtacatcaatccgtggcgaccgatggtcccagcagcacccaacctgctttgccaaaagcccgagccgtcgcacctaagcctagttcccggggagagtatgtggttgccaagctggatgatcttgtcaactgggcacgacggagttccctatggcccatgacttttggattggcgtgctgtgcagttgagatgatgcatatggccgcaccaagatacgatatggatagatttggagttgtcttcagagctagcccacgtcaatctgacgtgatgatcgttgcgggaacacttacgaataagatggccccagccttgcggaaatctagtcttcggcctgatgccggagcagctctccgcggtctgcatggagaactgcgacagagacgcagattgcttcctctgtttttgctgggaggcgaaggcctccgaccacacagagcaagagggcaccttcacccacgcctgccaacaacagcagaggctctgctgtacggcatcctccagcttcagcgcaagatcaagagggaaaggagactgcaaatttggtatcgcagatag

SEQ ID NO: 231975 - DNA, 621 bp, synthetic construct
  misc_feature 1..621: note = Description of Artificial Sequence: Synthetic coding sequence
  source 1..621: mol_type = other DNA
atggccgtgctgtccgccccaggtctgagaggcttcagaatactgggcctcagatccagcgttggtccagcggttcaagctcgtggggtgcaccagagcgtggccaccgacgggccatcatctacccagcctgctttacccaaggccagagccgtcgccccaaaaccgtcttccaggggcgagtacgtggtcgccaaattagacgacctcgtcaattgggccagaagaagctccctttggcccatgaccttcggcctggcatgttgtgccgtggagatgatgcatatggccgcacccagatatgatatggatcgctttggcgtggtgttccgagcgtcaccacgtcagtcagacgttatgatcgtggccggtacccttacaaacaagatggctcccgctctaagaaaggtgtacgatcagatgcctgaaccacggtacgtggtctcaatgggaagctgtgctaatgggggagggtattaccactattcttactctgttgtaaggggctgtgataggattgtaccggtggacatttacatacctggcagggccggaacggcccctcctacccgagagttggaaacgggccctgcaccacatggcgcacggagacccctatag

SEQ ID NO: 231976 - DNA, 633 bp, synthetic construct
  misc_feature 1..633: note = Description of Artificial Sequence: Synthetic coding sequence
  source 1..633: mol_type = other DNA
atgagatgcttgaccacccccatgttactgcgggctctggctcaggccgctcgcgcagggcctcccggaggacgaagcctgcactcgtctgccgtggccgctacatacaaatacgtcaacatgcaggatcctgaaatggacatgaagagtgtcacagaccgggctgcaagaacactgctgtggaccgagctgtttagggggctcggaatgactttgagttacctctttagggaacctgcaaccatcaattatccctttgagaaggggccactgtctcccagattccgaggggagcatgcactgaggagatatccatctggggaagagagatgcatcgcctgcaagttatgcgaggcaatctgccccgctcaagcaatcacgatcgaagccgaaccccgagccgatggttccaggagaactactagatacgacattgacatgaccaagtgcatctattgtggcttttgtcaggaagcatgtcccgtggatgctatcgtggagggaccgaactttgagtttagcacagaaacccacgaggagttactgtacaacaaggagaagctgctcaataacggcgataagtgggaggcggagattgcagcgaatattcaggcggattacctgtaccgctag

SEQ ID NO: 231977 - DNA, 375 bp, synthetic construct
  misc_feature 1..375: note = Description of Artificial Sequence: Synthetic coding sequence
  source 1..375: mol_type = other DNA
atgcggtgtcttactaccccaatgctgcttcgagctttggctcaagcagctagagccggtcctcctggtggccgaagcctgcacagcagcgccgtagcagctacgtacaagtatgttaacatgcaggatcctgaaatggacatgaagtctgtgactgaccgcgcagcacgaaccctgctgtggacagagctgtttcgtggcctaggcatgacgctgtcatacttgttcagagaacccgctactattaattatcctttcgaaaagggaccactctctcctcgatttcggggagagcatgcccttagaagataccctagcggggaagaacgctgcatcgcctgcaaactctgtgaggctatctgccccgcacagtag

SEQ ID NO: 231978 - DNA, 333 bp, synthetic construct
  misc_feature 1..333: note = Description of Artificial Sequence: Synthetic coding sequence
  source 1..333: mol_type = other DNA
atgcggtgtctgacaacccccatgcttcttcgagcactggctcaggccgcacgtgcaggccctcctgggggacggtctctgcacagtagcgcggtggctgcaacgtataagtacgttaacatgcaggatcccgagatggacatgaaaagcgtgactgatcgcgctgccagaactttgctgtggaccgaattgttcaggggcttaggcatgacactgagttacttgttccgcgagcccgcaactatcaactaccccttcgaaaaagggcctctttccccccgtttccgcggtgaacatgccctgcggagatacccttcaggcgaggagagatag

SEQ ID NO: 231979 - DNA, 555 bp, synthetic construct
  misc_feature 1..555: note = Description of Artificial Sequence: Synthetic coding sequence
  source 1..555: mol_type = other DNA
atgagatgcctaaccacccccatgctgctgagagcacttgcccaggctgccagagctggccctcctggaggaagatctctccatagctccgccgttgccgctacatacaagtacgtaaacatgcaggaccctgagatggacatgaagagcgtaaccgaccgggcagctcggacactcctctggaccgagctgtttcgcggactgggcatgacgctaagttacctgtttcgtgaacctgccactatcaattacccttttgagaaggggccactcagccccagatttagaggcgaacacgcactacgccgatatcccagcggcgaagaaaggtgtattgcttgtaagctctgtgaggcaatttgcccagctcaggcgatcacaatcgaagccgagcctcgcgctgacggttccagacggactacaaggtacgatattgatatgaccaaatgtatctactgtgggttctgccaggaagcatgtcccgtcgatgccattgtggaggggcctaacttcgagtttagtactgaaacacacgaggaacttttgtataattag

SEQ ID NO: 231980 - DNA, 195 bp, synthetic construct
  misc_feature 1..195: note = Description of Artificial Sequence: Synthetic coding sequence
  source 1..195: mol_type = other DNA
atgactaagtgcatttactgtggattctgccaagaggcctgccctgtcgacgcaatcgtggaaggccctaacttcgagttttctacggaaacacacgaggaattactgtacaataaggagaagctattaaacaacggggacaaatgggaagcggaaatcgcagcgaacattcaagcagattacctatatcgatag

SEQ ID NO: 231981 - DNA, 1395 bp, synthetic construct
  misc_feature 1..1395: note = Description of Artificial Sequence: Synthetic coding sequence
  source 1..1395: mol_type = other DNA
atgctggccacccgacggttgctggggtggtccctccccgctagggtgtccgtgcgattcagcggggacacaacagcccctaagaaaacaagctttggcagccttaaggacgaggatcgcatttttaccaacttatacggacgtcacgactggcggctgaaggggtctctctcccgtggggactggtacaaaacgaaggagatattgctgaagggtccagactggatcctcggtgaaatcaagacctccggccttcgcggaaggggtggcgctggcttccctactggcctgaagtggagctttatgaataagccaagtgacggccgacccaaatacttggtagtcaacgctgacgagggagagcctgggacatgcaaggatagagaaatcttgcgacatgacccccacaaactgctggagggctgtcttgtcgggggacgcgcaatgggcgcaagggctgcctacatctacattagaggcgagttctacaacgaagcaagcaatctgcaagtagccatccgggaagcttacgaggctggcttaatcggaaaaaatgcatgcggcagtgggtacgacttcgacgttttcgttgttcgcggtgcaggcgcatacatttgtggtgaggaaactgcccttatcgaaagtatcgagggaaagcaaggaaagcccaggttgaaaccccctttcccggcagatgttggagtcttcggatgtccaaccacggttgctaacgtcgaaacggtagctgtgtcacctaccatctgtcgaagaggcggtacgtggttcgccggttttgggagagaaagaaattcgggaacgaaactgtttaacattagcggccatgtgaaccatccgtgcaccgtggaagaagagatgtccgtccccttgaaggagttgattgaaaagcacgctgggggagtaaccgggggatgggacaatctgctggcagttatccctgggggatccagcacccctctgatcccaaagagtgtgtgcgagaccgtgctgatggatttcgatgctctggttcaggcacaaacaggactcgggaccgctgctgtgatcgtcatggaccgtagcacggatattgtgaaggcaatcgcacgtctgattgagttctataagcatgagtcatgcgggcagtgtaccccttgtagagagggagttgattggatgaacaaggtgatggcgcgatttgtccgcggagacgccaggcccgctgaaatcgactcgttgtgggagattagtaagcagatcgaaggccataccatctgcgctctgggagatggagccgcttggccggtgcagggtctgataaggcactttcggccagagttggaagagaggatgcagcggttcgctcagcagcatcaggctcgacaggccgcatcatag

SEQ ID NO: 231982 - DNA, 1374 bp, synthetic construct
  misc_feature 1..1374: note = Description of Artificial Sequence: Synthetic coding sequence
  source 1..1374: mol_type = other DNA
atgctcgctacaaggcgactgcttgggtggagtctgcctgcacgggtttccacagcgcctaaaaagacctccttcggaagcctgaaagacgaagatcggatatttaccaacctctatgggcgtcacgactggagactgaaggggtctttgtccagaggcgactggtacaagacaaaggagattctgctgaaaggaccagattggatcctgggcgaaataaaaacctccggcttgcgcggacggggaggcgctgggttccccaccggactgaaatggtcctttatgaacaagccctcagatggacgcccaaagtatctcgttgtgaatgccgacgagggcgagcctggtacatgcaaggacagggaaattctccggcacgatccacacaagctgctggaggggtgtctcgtcggaggacgggctatgggcgctcgagccgcttacatatatatccgcggagaattctacaacgaagctagtaatcttcaggttgctattagggaagcctacgaagctgggctgattggcaagaacgcatgtggatcagggtacgacttcgacgtgttcgtggtgcgcggtgccggtgcctatatttgcggggaagaaacggctctcattgagagtatagaaggtaagcaaggcaaacccaggctgaagcctcccttccctgccgatgtgggagttttcgggtgtcctactacagtcgcaaatgttgaaaccgtagccgtttctccaacaatctgcagacgaggtggaacatggtttgccggtttcggcagggagcgcaatagcggtacaaagctcttcaatatcagcggccacgttaatcatccatgcactgttgaagaggagatgagcgttccattgaaagaactcatcgaaaaacacgcaggtggcgtgactggcggttgggataaccttctggcagtgattcctgggggtagttctacccctcttatccccaaatccgtgtgcgagaccgttctaatggattttgatgccctggtgcaggctcagaccggacttggcaccgctgctgtgattgttatggatcgcagcacggacatcgtgaaggcaattgctcgcctcattgaattttacaaacacgagagttgcggacaatgtaccccttgtcgggaaggcgtcgactggatgaacaaggtgatggcccgttttgtaagaggcgacgctcgcccagccgagatcgattcgctatgggagatttcaaaacagatcgagggccacacaatatgcgcgctcggcgacggagctgcttggcctgtgcagggtctcatccgccatttcaggcctgagctcgaggagagaatgcagcggtttgctcagcagcatcaagccagacaggctgcgagttag

SEQ ID NO: 231983 - DNA, 1008 bp, synthetic construct
  misc_feature 1..1008: note = Description of Artificial Sequence: Synthetic coding sequence
  source 1..1008: mol_type = other DNA
atgctggcaactcgaaggttgcttggctggtctctccccgctcgggtgtccgtgcggttttctggagatacaactgcaccaaagaagacttcttttggcagtcttaaggatgaagatagaattttcacaaatttgtacggcaggcatgattggaggctgaaagggagcctaagccggggagattggtacaaaactaaggagatactgctgaaaggccctgactggatcctgggggagatcaagaccagcgggctgaggggcaggggcggagcaggcttccctaccggattgaagtggagttttatgaataaaccttcggacggttcacctaccaccgtggctaatgtggagaccgtagccgtgagccccaccatctgtcgtagagggggaacctggttcgctggctttggccgtgagagaaacagcggaacgaaactgtttaatatctcaggtcacgtgaatcacccttgtacagtcgaagaggagatgagtgtgcctctcaaggagctgatcgagaagcacgccggtggtgtcaccggagggtgggacaaccttctcgcagtgattccgggaggtagcagtacaccactcattccgaagtcagtgtgcgagacagtgttaatggatttcgatgccttagtccaggctcagactggcctgggtaccgctgcagttattgttatggataggagtacagatatcgtgaaagccatcgcaagattgattgagttctataagcacgaatcttgcggacagtgcaccccatgtagagaaggcgtggactggatgaacaaggtcatggcccgattcgttaggggcgacgcccgacccgctgagatagactcattgtgggagatcagcaagcaaattgaaggtcacactatttgtgctctcggggatggagccgcatggccagtccagggattgattcgacattttcgccctgagctcgaggagaggatgcaaaggtttgcgcagcaacaccaggccaggcaggcggcttcttag

SEQ ID NO: 231984 - DNA, 1368 bp, synthetic construct
  misc_feature 1..1368: note = Description of Artificial Sequence: Synthetic coding sequence
  source 1..1368: mol_type = other DNA
atgttggccacgcggcgtttgttggggtggagtttgcccgctagaacagcccctaaaaagacaagcttcggatctctgaaagacgaggacaggatcttcactaatctgtacgggagacatgactggagactcaagggatccctctccaggggtgactggtacaaaaccaaggagattctgctgaagggcccagactggatactcggggaaattaagacatctggccttcgcggtcgcggaggcgctgggttccccaccggactaaagtggagcttcatgaacaagcccagtgacggtcgacccaaatatctggtcgtaaatgcggacgagggcgaacctggcacatgcaaagatcgcgagattctgcggcacgacccacacaagttgctggaaggatgtctggtagggggtcgggctatgggtgccagggccgcatacatatatattagaggcgaattttataatgaggccagcaatctgcaagtcgctattagagaagcctacgaggcgggacttattggaaaaaacgcttgcggatctggttatgactttgacgtttttgtggtcagaggcgctggcgcttacatttgcggagaggagacagcactcattgaatctatcgagggaaaacagggaaagccacgattaaaacctcccttccccgctgacgttggtgtcttcggatgccctacaacggtcgcgaacgtcgagacagtggctgtctccccgacaatttgtcgcagaggcggaacctggtttgcaggctttggtcgggagcgaaacagcgggactaaactctttaatatctccggacacgtgaaccacccatgtaccgtagaagaagaaatgagtgtgcccctcaaggaactaattgagaagcatgcagggggagttacgggagggtgggataatctactagcggtaatccccggtggctctagcacgccactgattcccaaatcagtctgcgaaaccgttttgatggacttcgacgcactggtgcaggcccaaactggcctcggcaccgccgctgtcatcgttatggaccgtagtaccgatattgttaaggcaatcgcacgcctgatcgaattttataagcatgagagctgcggtcagtgcaccccttgccgtgaaggggtcgattggatgaataaagtcatggccagattcgtacgcggtgatgcccgacccgcagaaattgactccttgtgggagatcagcaaacagattgagggccacaccatttgcgctcttggggatggtgccgcatggcccgtccagggactgatccgtcacttcagaccggaactggaggaacggatgcagcggttcgcacagcagcatcaagcccgtcaggcggcatcctag

SEQ ID NO: 231985 - DNA, 1092 bp, synthetic construct
  misc_feature 1..1092: note = Description of Artificial Sequence: Synthetic coding sequence
  source 1..1092: mol_type = other DNA
atgaataagccatccgacggcaggcctaagtacctggttgtgaatgccgacgaaggtgaaccgggaacatgtaaggatcgggaaatcctgcgccatgatccccataagcttctggaggggtgtttagtgggtggacgggctatgggtgcccgagcagcttacatttatattcgaggcgaattctataacgaagccagtaatctacaggtggcgatcagggaggcctatgaggccggtctgatcgggaagaacgcgtgtggttcaggctacgacttcgacgtgtttgtggtccggggagcaggagcttatatatgtggcgaagagacagctctgatagaatcgatagaggggaaacaaggcaagcccagactcaagccacctttccctgccgacgtcggcgtcttcggctgcccaaccactgtggctaacgtggagacagtggccgtcagccctacaatatgtaggagggggggaacctggttcgccggttttggacgagaacgcaattcggggactaagttattcaacatttccggccatgtcaatcacccctgcacagttgaagaagagatgagtgttcctttaaaggaactaatcgagaaacatgctgggggtgtcacaggaggatgggacaatctgctggccgtaatccctggaggaagctcaacccctctgattcccaaatcagtttgcgagaccgtgctaatggacttcgatgcccttgtgcaagcccaaactggcctgggcacagccgcagtgatagtcatggacaggtctaccgacatcgtcaaggccattgcccgtctgatagagttttataagcacgagtcctgtggccagtgtactccttgtagagagggggtggattggatgaataaagtgatggcccgtttcgtccgcggagacgctagacctgcggaaattgattccctttgggaaataagcaaacagatcgaggggcacaccatttgtgcactaggagacggcgcagcgtggccagtgcaaggactgatccggcatttcagacccgaattggaggagcgaatgcagaggttcgcccaacaacaccaagccaggcaggctgcaagttag

SEQ ID NO: 231986 - DNA, 750 bp, synthetic construct
  misc_feature 1..750: note = Description of Artificial Sequence: Synthetic coding sequence
  source 1..750: mol_type = other DNA
atgtttttttcggccgctctcagagccagagccgctggactgaccgcacattggggccgtcacgtccgcaacttacacaaaacggtgatgcagaacggcgctgggggagcactatttgtccatcgtgacacaccagagaacaaccctgatacgccgttcgactttacccccgagaactacaaacgcatcgaggccatcgtcaaaaactacccggagggccataaggccgcagccgtcctccctgtactggaccttgcacagaggcagaacgggtggctcccaatttcagccatgaataaagtcgctgaggtacttcaggtgcctcccatgagagtatacgaagttgcaacattttatacaatgtataatcggaaacctgtgggaaaataccacatccaggtatgtaccacaactccgtgtatgttgcggaacagcgactccatcctggaggccattcagaagaagttaggtattaaagtgggagagaccaccccggacaaactgtttactttgattgaggtggaatgtcttggagcgtgcgttaatgcccctatggttcaaatcaacgacaactactacgaggacttgaccgctaaggatatagaggagatcatcgatgagctgaaggccggaaagataccaaagcctggccctaggtccggacgatttagttgtgaacccgctggtggactcactagcctaaccgagccccctaagggtccaggttttggcgttcaagccggtctatag

SEQ ID NO: 231987 - DNA, 327 bp, synthetic construct
  misc_feature 1..327: note = Description of Artificial Sequence: Synthetic coding sequence
  source 1..327: mol_type = other DNA
atggccgctccctgcctgctccgccaaggacgcgctggtgccctgaagacaatgctacaggaggctcaggtctttcgcggattggcctctaccgtctccttgtcagcggaatccggcaagtctgaaaaggggcagccccagaattccaagaaacaatctccgcctaagaaacccgcaccagtgcccgctgaaccctttgacaacacaacttacaagaatctgcagcatcatgactattcaacctatacctttctagatctgaatctggaattgagtaagttccgcatgccccagccttcctctgggagagagagccccagacattag

SEQ ID NO: 231988 - DNA, 1422 bp, synthetic construct
  misc_feature 1..1422: note = Description of Artificial Sequence: Synthetic coding sequence
  source 1..1422: mol_type = other DNA
atggcagctccatgcctccttcgacagggacgcgctggcgctctgaaaacaatgctccaggaggcccaggtgtttcgaggtctggcatccacggtaagccttagcgccgagtctggcaaaagtgagaagggacaacctcagaatagcaagaaacagagtccgccaaaaaatgtggttgaacctaaagagcggggtaaattgctggctacacaaaccgccgcagagttgagcaaaaatctgtcctccccaagctcctacccaccagcggtcaacaagggccgaaaggtggcatcaccatcccccagtggcagcgttttatttacagacgagggagtgccgaagttcctctctagaaagaccctggttgagttccctcagaaggtactctcccctttccgcaagcagggcagcgattcggaagctcgtcaagtgggcaggaaagtgaccagtcccagctcatcctctagctcttcctcgtctgacagtgagagtgacgacgaagctgacgttagcgaggtcactcccagagtggtcagcaaaggaagggggggactgcggaagcccgaggcctcacacagtttcgaaaatagggcacctagagtcacggtgagcgcaaaagaaaagactttgctgcagaaacctcatgtcgatatcacagaccctgaaaaaccacaccaaccaaagaagaaggggtctcccgcaaaaccctcagaggggagagaaaacgctcgtcccaagacaaccatgcctaggtctcaggtcgatgaggaatttctgaagcagtctcttaaggaaaaacagcttcagaagacctttcgcttaaatgaaatagataaggaatctcaaaagccattcgaggtcaaaggccctctgcccgtgcacaccaaatcaggtctgagcgcccctcccaaaggaagtcctgcacctgccgttctggccgaagaggcgcgagccgagggtcagctgcaagcatcacctcctggcgctgcagagggccacctcgaaaaacctgtgcctgagccacagaggaaagcagctcctcccctgcctagaaaagagactagcggaactcagggtatagaggggcacctcaaaggcggacaggcgatcgtggaggatcagatccccccttccaatctcgagacagtgccagtcgagaacaaccatggtttccacgagaagaccgccgctctgaagctcgaggccgagggagaggccatggaagacgccgctgcccctggcgatgataggggtgggacgcaggaacccgctcctgtacctgcagaaccattcgacaacaccacttacaagaacttgcagcatcacgattattccacatacacgttcctagatctcaacctggaactgagcaaattccgaatgcctcagccatcctctggcagagaaagtccaaggcactag

SEQ ID NO: 231989 - DNA, 339 bp, synthetic construct
  misc_feature 1..339: note = Description of Artificial Sequence: Synthetic coding sequence
  source 1..339: mol_type = other DNA
atgcttcaggaagcccaggtgttcagaggcctcgcttccactgtatcgctgtctgccgagagtggcaaaagcgagaaaggccagccccagaactccaaaaagcaaagtcccccaaagtccgtaccaacaccacataggcgttacagcccctgcggagactggaaggatgcctcgtctctgaagcctgcacctgtgcccgctgagccttttgataacaccacttataaaaatctgcagcatcatgactatagcacctacaccttcttggatctgaatctcgaactgtccaagttccggatgccccagccttcttcaggaagagagtcacctcgccactag

SEQ ID NO: 231990 - DNA, 2223 bp, synthetic construct
  misc_feature 1..2223: note = Description of Artificial Sequence: Synthetic coding sequence
  source 1..2223: mol_type = other DNA
atggaaaagctgggtgtcgaacccgaggaggagggaggtggtgacgatgacgaagaagacgctgaggcttgggccatggagttagccgatgtgggtgccgcagccagtagccagggagtccacgatcaggtccttcccacgccaaatgcctcaagccgagtaatcgtgcacgttgatttggattgcttctatgcacaggtggagatgatctctaaccctgagctgaaggacaagcccctaggcgtccagcagaaatacctggtggttacttgtaattatgaggccagaaaactcggtgtgaaaaagctcatgaacgtgagagatgctaaagaaaagtgcccacaactcgtgttagttaacggggaagacctcacacgctaccgtgagatgtcctacaaggtcacagagttactcgaagagtttagtcccgtcgtggagcgcttggggttcgatgaaaatttcgtcgacctgaccgagatggtggagaagcggctccagcagttgcagtctgacgagctttctgccgtcacagtgtctggacacgtctataacaaccagtccattaaccttttagatgtgctccatatccggctgctggtggggtcccagatcgctgccgagatgagagaggctatgtacaatcagctaggactgaccgggtgtgctggggttgctagtaataaactgctggcgaaactggtcagtggggttttcaaaccaaatcagcaaacagtgcttttaccagaatcgtgccagcacctgattcattcgttgaaccacataaaggagatcccaggcataggctataagaccgcaaagtgtttggaagccctgggaatcaattctgtcagggatctacagactttttctcccaaaattttagaaaaggaacttggcatctccgtggcccagaggattcagaagctatccttcggcgaagataactcccctgtcattctttccggaccgcctcagagcttttcagaggaggatagttttaaaaagtgctctagtgaagttgaggctaaaaacaaaatcgaggagctgctggcctcactgcttaaccgggtttgccaggatggcagaaagccacatactgtgcggttgatcatccgtcgatactcctccgaaaagcactatggaagagagtcacggcagtgtcccatccctagtcacgtcatccagaaactcggtacaggaaactacgacgtgatgacccctatggtcgacattctgatgaagcttttcagaaatatggtaaacgtcaagatgccatttcacttgacattgttgagcgtctgtttctgtaatctgaaggcactgaacacagcaaagaaaggtctgattgattattatctgatgccttccctgagcacaacaagtaggtcaggaaaacactctttcaagatgaaggatacacacatggaagatttcccaaaagacaaggagacaaacagggattttttgccatccggcagaatcgagtcaactagaacccgagagagcccgctggacaccacaaattttagtaaggagaaggacatcaatgaattcccgctttgttcccttccagagggagtcgaccaagaagtctttaaacagctgccagtcgatatacaggaggagatcctgagtggaaagagtcgcgagaagttccagggaaaggggagcgtgtcttgccccctgcatgcctcgagaggcgtcttatcatttttcagtaaaaaacagatgcaggacattcctattaacccgcgagaccaccttagcagcagcaagcaggtgtccagcgtgagcccctgcgagccgggtacctccggcttcaattcctcaagctcctcctatatgtccagtcagaaggattatagctactatctcgataaccgcctgaaggatgaacgcatcagccaggggccaaaggaaccccaaggcttccactttacgaatagcaatcccgctgtgagcgcctttcactcatttcctaaccttcagtccgagcaactttttagcagaaaccatactaccgattcacacaagcagacagttgccacagactcccacgagggactaacagagaaccgggaacccgactcagtcgatgaaaagataacctttccatccgatatagacccacaggtgttctacgaacttccagaagctgttcaaaaagagctactcgccgagtggaaaagagcgggatctgatttccatatcggtcacaaatag

SEQ ID NO: 231991 - DNA, 540 bp, synthetic construct
  misc_feature 1..540: note = Description of Artificial Sequence: Synthetic coding sequence
  source 1..540: mol_type = other DNA
atgaataagcgcggtttctctatggaggttggccagtacatttttgtgaactgcccctccatctcactgctggagtggcatccattcacgctgaccagtgcccctgaagaggatttttttagtattcatatccgagcagcaggggactggaccgagaacttgatcagggcctttgagcagcagtacagtcccattcctaggatcgaagtggacgggccattcggaacagcatccgaggacgttttccagtatgaggttgctgtactggtgggagccggaatcggcgtgacccctttcgctagtattctgaaaagcatctggtacaaattccagtgcgctgatcataacttgaagactaaaaagatctacttctattggatttgcagggaaaccggcgcattcagctggtttaataatctgctcactagcctggaacaggaaatggaggagttgggcaagtctttacgcaaatgttgtcatcggtatagtagtttagatccaagaaaggtccaattttactttaacaaagagaatttctag

SEQ ID NO: 231992 - DNA, 1584 bp, synthetic construct
  misc_feature 1..1584: note = Description of Artificial Sequence: Synthetic coding sequence
  source 1..1584: mol_type = other DNA
atgggcaactgggtggtcaatcactggttctcggtcttgttcctcgtcgtttggctaggtctcaatgtcttcctcttcgtggatgcctttctaaagtacgagaaagctgataagtactactacacgcgaaagatccttggtttttgctcccgaaccctgcgaaagcagctcgaccacaatttgacctttcacaagctcgtggcctatatgatatgcctccatacggcgatccacattattgcacacctgttcaactttgactgctacagtcggagcaggcaggccactgatgggagcctggcttccatcctctctagtttgtcacacgacgaaaaaaagggtgggtcttggcttaaccccatacaatctagaaataccaccgtggagtatgtaactttcactagcattgccggactgactggcgtcatcatgacaattgccctaatcctaatggtcactagtgctacggagtttatacgcagaagttacttcgaagtgttctggtatacccatcatctgttcattttctacattctcggcctcggcatccatggcatcggcggtatcgtcagaggtcagactgaggaaagcatgaatgagagccatcctcgcaaatgcgcagagtccttcgaaatgtgggatgatagagactcacattgcagaaggccgaaattcgagggtcacccgcctgagtcatggaaatggattctggctcccgtaattctgtatatttgtgaaagaatcctgcggttctaccggtctcagcagaaggtggtaataactaaggttgtgatgcacccgagtaaagtgctggagctgcagatgaacaaacgcggattctctatggaagtgggtcaatacattttcgtgaactgcccaagcatctccctcttggagtggcacccctttacacttacctcggcccctgaagaggatttcttcagcattcacatacgagccgctggagattggacggagaacctgatccgcgcattcgaacagcagtacagtccaattcctagaattgaagtcgatggtcctttcggcacagcaagtgaagacgtattccagtacgaggtagcagtccttgtgggagcagggattggagtgaccccttttgccagcatccttaaaagcatctggtataaatttcagtgtgctgaccataatctcaaaactaagaagatctatttctactggatatgtcgggaaaccggtgccttttcctggttcaacaatctattgaccagcttagagcaagagatggaagaactgggcaaggtgggattcctgaactatcggttatttctcacaggatgggactctaatatcgtaggccacgcagcattaaactttgacaaggcgaccgatatagtgaccggacttaaacaaaaaacgtccttcggacgtccgatgtgggataacgagttttccacgattgctacaagccaccctaaatccgttgtgggcgtcttcctgtgtggccctcgcacgctggccaaatcgctgaggaaatgttgccaccgctactctagtctggatcctcgaaaggttcaattttactttaacaaggagaatttctag

SEQ ID NO: 231993 - DNA, 579 bp, synthetic construct
  misc_feature 1..579: note = Description of Artificial Sequence: Synthetic coding sequence
  source 1..579: mol_type = other DNA
atgggcaattgggtggtcaaccactggttctcagtgcttttcctggtggtctggctgggtctgaacgtgttcctgtttgtggacgctttccttaaatacgaaaaggccgacaagtactactacacaagaaagatcctagggagcaccctggcgtgtgctcgtgccagcgctctttgtctgaattttaatagcaccctgattcttctgcccgtctgtcggaacctgctgtcatttttacgcggaacgtgtagcttttgtagtagaaccctgcgcaagcagttagaccacaatctcactttccataagcttgttgcatacatgatatgcctgcacactgccatccacatcatcgctcacctgtttaactttgattgttattcgcgttccaggcaggcaactgacgggagcctggccagtattctgagttccctaagtcacgatgagaagaaaggcggatcatggctgaaccccattcatcctcacataaccccgaccgtctacatgttcacggttactttcgacatggtgctcagcagtgtgaattctaacctgttcctgttcctgctcattaaaaagtag

SEQ ID NO: 231994 - DNA, 579 bp, synthetic construct
  misc_feature 1..579: note = Description of Artificial Sequence: Synthetic coding sequence
  source 1..579: mol_type = other DNA
atgggaaactgggtggttaaccactggttctcggtgcttttcctggtagtctggcttgggttaaacgttttcctctttgtggacgcattcctcaaatatgaaaaagccgacaaatactattatactcgaaagattcttggttccacactggcatgtgcccgagcatccgctctgtgcctcaacttcaactcaactctgatactgctgcctgtttgtcgcaatttactctcttttctgcggggaacatgctccttctgctcaaggactctccgcaagcagttggaccacaacctgacgttccacaagctggtcgcgtacatgatctgcctgcacaccgctattcatatcatagcccatctgttcaacttcgactgttactcgcgatctcgccaggcgactgacgggagccttgcaagcatcttaagctccctctcacacgatgaaaaaaaaggcggttcttggctgaacccgatccacccgcacataacccctaccgtttacatgttcaccgtaacattcgacatggttcttagctcagtgaatagtaatctgttcctgtttctcttgattaagaagtag

SEQ ID NO: 231995 - DNA, 1695 bp, synthetic construct
  misc_feature 1..1695: note = Description of Artificial Sequence: Synthetic coding sequence
  source 1..1695: mol_type = other DNA
atggggaattgggtggtgaaccactggttctctgtgctgtttctggtcgtgtggttgggactgaacgtgtttttattcgttgatgcctttctgaagtatgaaaaggctgacaagtactattatacaagaaagatactgggctccacactcgcatgtgccagagccagcgccttgtgcctgaatttcaatagcacgctgattcttctcccggtttgcaggaacctactgtccttcctcagaggtacatgtagcttctgctccagaacgctgagaaagcagcttgatcacaatctcacttttcacaagctggtggcctatatgatttgcctccacaccgctatacacatcatcgcacacctatttaacttcgactgctactccagaagccggcaggcaacagacgggagcctggccagcatcttatctagtctctcacacgatgaaaaaaagggtggctcttggctaaatccaattcagtcccggaataccactgtggagtatgtgaccttcacttctatagcagggctgactggagtgatcatgaccattgctttgatcctcatggttactagtgccaccgaattcattagacgctcctatttcgaggttttctggtacacccatcatctgttcattttctatattcttgggctcgggatccacggaatcggaggcatagtgcggggacagacagaggagtccatgaatgaatcacaccccagaaagtgtgccgagagctttgaaatgtgggatgacagagactcacattgccggagaccaaagttcgagggtcatccccctgagtcatggaagtggattcttgccccagtgatattgtacatatgcgagagaatccttaggttctaccgctcacagcagaaggtggtgattaccaaggtggtcatgcatccatcaaaagtcctcgagctccaaatgaacaagagaggcttcagtatggaagttggacagtatatcttcgtcaattgcccaagcatttctttactggagtggcatcccttcaccttgacaagcgcccctgaggaagatttttttagtattcacattagagccgctggcgattggacagagaacctgataagggcattcgaacagcaatatagccccattccaaggatagaagttgatggtccctttggaacagcctccgaagacgttttccaatacgaagtggcagtgcttgttggtgctggtatcggggttacaccgttcgcctctatacttaagtccatatggtacaagtttcagtgtgccgaccacaatctgaagaccaagaagatctatttttattggatctgtcgcgaaactggggctttctcgtggtttaacaacctacttacaagcctcgaacaggaaatggaggagctgggaaaggtaggatttctgaactaccggctctttttgacagggtgggattcaaatatagtgggccatgctgcacttaacttcgacaaagctacggacatagtaacgggtctcaagcaaaaaacctccttcggcagacccatgtgggacaatgagtttagtaccatcgcaacttcgcaccctaaatccgttgtgggagtgttcctgtgcggaccacggacgctggccaagtctttgaggaaatgctgccaccgctattcctctctagatcccaggaaggttcaattctacttcaacaaagagaacttttag

SEQ ID NO: 231996 - DNA, 528 bp, synthetic construct
  misc_feature 1..528: note = Description of Artificial Sequence: Synthetic coding sequence
  source 1..528: mol_type = other DNA
taattttccatggaagttggacaatatatttttgtgaattgtccgtctatctcgctgcttgaatggcacccatttacactcaccagcgccccagaggaggactttttttccattcacattagagccgcaggagactggacagagaacctcatcagggcatttgagcagcagtactctcccatacctcggatcgaggtggacggtccctttgggacggcatcagaggatgtttttcagtacgaggttgccgtgcttgtgggcgcagggattggtgtaaccccattcgcttctattttaaagagcatctggtataaatttcagtgtgccgatcacaatctcaagaccaaaaagatctacttttattggatttgcagggagacgggtgccttcagttggtttaacaacctgctcacctccttagaacaggagatggaagagctgggcaagagtcttcggaagtgctgtcaccggtattcctctcttgatcctcgtaaagtccagttttactttaacaaagagaacttctag

SEQ ID NO: 231997 - DNA, 1707 bp, synthetic construct
  misc_feature 1..1707: note = Description of Artificial Sequence: Synthetic coding sequence
  source 1..1707: mol_type = other DNA
atgatgggctgctggattctaaatgagggtctgagcacaatactggtcctgtcctggctgggtatcaatttttacctcttcatcgataccttttactggtatgaagaggaggaatcatttcactacacacgggtgatcttgggatccactctagcatgggcacgggctagcgctctgtgcctgaacttcaactgcatgcttattcttatccctgtgtccaggaacctcatatctttcatccgtggaacaagtatttgctgtcgtggcccatggcgtcggcaactggacaagaatctcaggttccataagttggttgcctacggcattgccgttaacgccaccatccacattgtcgcgcacttcttcaacctggagcgctatcattggagccagtccgaagaagctcagggattgctcgccgctctctccaaacttggtaacactcccaatgagtcttacctaaatcccgtccgcacattcccaactaatactactacggaactgctccggaccattgctggagtcaccggacttgtaatctccttggccctggtcttaatcatgacttctagcaccgagttcattagacaggctagttacgagctgttttggtatactcaccacgtgtttatagtgtttttcttatctctggctattcacggcacgggccgaattgtgaggggccagactcaggattccctttctctgcataatatcactttctgccgcgaccggtatgcagagtggcaaactgtagctcagtgtcccgtccctcagtttagcggcaaggaaccctccgcatggaagtggattttaggccctgttgttttgtatgcttgtgaacgcatcatacggttttggcgcttccagcaagaggtcgtcattacaaaggtggtctcacatccatctggagtactagagttgcatatgaagaagagggggtttaaaatggcaccagggcagtacatcctggtccagtgtccggcaatcagttccctcgagtggcatcctttcacgttgactagcgccccacaggaggacttttttagtgttcatattagagccgcaggtgattggactgctgccctgttggaagccttcggtgctgaaggccaggccctccaggaaccttggtccctgccacgcctagccgtcgatggcccttttgggacagcactcacggatgtgttccattaccccgtgtgcgtttgcgtggcggctggaatcggggtgacacccttcgcagccttgttgaagagtatatggtacaaatgcagcgaggctcagaccccattgaaactgtctaaggtgtacttctactggatatgccgcgacgctcgagcatttgaatggtttgccgacctacttctcagtctggaaactagaatgagcgagcaaggcaagacgcattttttaagttaccacattttcctcaccgggtgggatgagaatcaggccctgcacattgcgctccactgggacgagaacaccgacgtgattaccggactaaagcagaagactttctacggacgaccaaactggaacaatgagtttaagcagatcgcttataaccacccaagttctagtatcggggtattcttctgcggtccaaaggccctgagtcgcaccctgcagaagatgtgtcacttgtattcatccgccgatccaaggggtgtgcacttctactacaataaggaaagtttctag

SEQ ID NO: 231998 - DNA, 1737 bp, synthetic construct
  misc_feature 1..1737: note = Description of Artificial Sequence: Synthetic coding sequence
  source 1..1737: mol_type = other DNA
atggccgtttcatggagatcttggctcgcaaacgaaggcgtgaagcatctgtgcctgttcatctggctctccatgaatgttttactcttttggaaaacctttctgctctacaaccaagggcctgagtatcactatcttcaccagatgctcggcttgggcctgtgcctgtcccgcgcatctgctagcgtcttgaatctgaattgtagcctgattctgctaccaatgtgccggactcttctcgcttacctgcggggttctcagaaggtaccctcccggaggaccaggcggctgctggataagtcccggacctttcacatcacctgcggagtcaccatatgcattttctctggcgtgcacgtcgccgctcatctggtgaatgcactgaacttttccgtgaactattccgaggattttgttgaacttaatgcggctaggtatcgcgacgaagatccacgcaagcttcttttcactacggtgccgggtctgaccggggtgtgtatggtagtggtgttgttcctaatgattacagcaagtacatatgcgattcgtgtttctaactacgacatcttttggtatactcataacctcttttttgtcttctatatgcttctgaccctgcatgtgtcagggggtttgcttaagtaccaaacaaacttggacacacaccctccgggatgcatcagtttaaaccgcaccagcagccaaaacatctctctgccagagtactttagtgagcactttcacgaaccatttcccgaagggttcagcaagccagcggagttcactcagcataagttcgttaaaatttgtatggaagaacctcggtttcaggccaattttccccaaacatggctgtggatctctggtcccctatgcctgtactgtgctgaaaggctgtaccggtacatccgctctaataagccagtcaccatcatctctgtaatgtcccatccttccgatgtcatggaaataaggatggtgaaggagaatttcaaagcccgtccaggacagtacattacactacattgcccttccgtgtcggcactggaaaatcaccccttcactctgacgatgtgtcccacagagactaaagccacatttggcgtacacctcaagattgtaggcgactggacagaacggtttagggatctgttattgccacctagttctcaagacagtgaaatacttccgtttatccagtccaggaactaccctaaactgtatattgatggccctttcggctccccttttgaagaatccctgaattatgaagtgagcctctgtgttgcagggggaataggtgttactccttttgcgtccattctcaacacactgttggatgattggaagccttacaaactgcgaaggctttacttcatctgggtgtgcagagatatccaatcctttaggtggttcgctgatctcctgtgcatgctccataataaattctggcaagagaaccgaccagactatgttaatattcagctgtacctgagccagacagacgggatccagaagatcatcggtgaaaaatatcatgccctcaactctcggctgttcattggcagaccgcgatggaagttgctcttcgatgagattgcaaagtataaccggggaaaaactgtaggggtgttttgctgcgggcctaattcgctttctaagacactgcacaagttatctaaccaaaataacagctacggaactagattcgagtacaataaagagagcttttcctag

SEQ ID NO: 231999 - DNA, 1665 bp, synthetic construct
  misc_feature 1..1665: note = Description of Artificial Sequence: Synthetic coding sequence
  source 1..1665: mol_type = other DNA
atgaatgtgctgctgttctggaaaacttttctgttgtataatcaaggacccgaataccactatctccaccagatgctgggactgggactttgcctatcccgagcatctgcctccgttctcaacctcaactgttcactgatactgctcccaatgtgtcgcacactacttgcctacctcaggggcagccagaaggtgccatcacgaagaaccaggaggctgctggacaaaagtagaacattccacataacctgtggagtcaccatttgtatctttagcggtgttcatgtggctgcccacctcgttaatgccctgaatttttcagtgaactattctgaagacttcgtagaattgaatgcagctcgttaccgagacgaagaccctcggaagctgctctttaccaccgtaccaggcctaactggcgtctgtatggttgtggtgctatttctgatgattactgcatcaacatacgcgatacgagtgtccaattatgatatcttctggtacactcacaatctcttttttgtgttctacatgctgcttacattgcatgtctcaggtggtcttcttaagtatcagaccaacctggacacacatccacccggttgcataagcctcaaccggacaagtagccagaacatctcactgcctgagtattttagcgaacactttcacgagccgtttccggaaggcttcagtaagcctgcagaattcactcagcacaagtttgtcaaaatttgcatggaggagccgagatttcaggcgaactttccgcagacttggttgtggatttccggacccctgtgcctgtactgcgctgaacggctgtatcgttacattcgctctaataaaccggtgaccattatctctgttatgagccacccttctgacgtgatggaaattagaatggtgaaggagaatttcaaggccaggccagggcagtatataacactgcactgcccttccgtgtctgctttggaaaaccacccgttcactctcaccatgtgtcctacagaaaccaaggctaccttcggcgtccaccttaagattgttggagactggaccgaacggtttagagatctgttacttcccccatcttcacaggactctgagatattgccatttatacagagcaggaactacccaaagctctacatagacgggccattcggatcccccttcgaagagtcattaaactacgaggtctccctatgcgtcgctggcggaatcggagtcaccccctttgcaagcatcctcaatacattgctggatgactggaaaccatacaaactaaggcgtctgtacttcatctgggtttgtcgcgacatccagtcctttcgatggttcgccgacctgttatgcatgttgcacaacaagttctggcaggaaaacaggcccgactacgttaatatacagctctacctgtcgcagactgacggcatccagaagattatcggcgagaaatatcacgccctgaactcccgcctattcatcgggagaccccgatggaagttgctgtttgatgagatagccaagtataacagaggtaagaccgtcggcgtgttttgttgtggacccaatagtctgtccaagaccttgcacaagctgagtaaccagaacaactcttacgggaccaggttcgagtataataaagagtctttctcatag

SEQ ID NO: 232000 - DNA, 816 bp, synthetic construct
  misc_feature 1..816: note = Description of Artificial Sequence: Synthetic coding sequence
  source 1..816: mol_type = other DNA
atggcagtctcatggaggtcttggctggccaacgaaggtgtcaagcacctgtgcctgttcatttggcttagtatgaacgtgcttctgttttggaagaccttcctgctgtataaccagggacccgaataccactatctacatcagatgctgggatgtcctaccgagacaaaggccactttcggcgtgcacttgaagatcgttggagactggacagaaagatttcgagatctccttttgccaccttcgagccaagactccgagatcctgccttttatccagtccaggaattaccccaagctgtacatcgatggccctttcgggtcaccttttgaggagagtctgaattacgaggttagtctatgtgtcgctggaggtatcggggttacaccttttgcgtccatcctgaacacgctcctagacgattggaaaccctacaaactgaggaggctgtattttatttgggtctgtcgcgacatacagagtttcaggtggtttgctgacctcctgtgcatgctccataataaattttggcaggagaacagacccgattatgtgaatattcagctgtatctgagccagacagacggaattcagaagatcatcggcgagaaatatcacgccctcaactccagactgttcattgggaggcctcgctggaaactcctgttcgacgagattgccaaatacaatcgaggaaaaactgtcggcgtgttctgttgtggccctaactctctcagcaaaaccttgcacaaactctctaatcagaacaactcgtatgggacccgctttgaatataacaaagagagcttcagttag

SEQ ID NO: 232001 - DNA, 165 bp, synthetic construct
  misc_feature 1..165: note = Description of Artificial Sequence: Synthetic coding sequence
  source 1..165: mol_type = other DNA
atggcagtgagttggcggagctggcttgccaatgaaggcgtcaaacatttgtgcctcttcatttggctaagtatgaatgtcttgctgttctggaagacctttttactgtacaaccaggggcctgagtatcattatctgcatcagatgcttggagaactcagctag

SEQ ID NO: 232002 - DNA, 1800 bp, synthetic construct
  misc_feature 1..1800: note = Description of Artificial Sequence: Synthetic coding sequence
  source 1..1800: mol_type = other DNA
atgggcgagatgtggaggaagagagaagaggtcatcttccgggagtattcattttctttttacccactgaatattttcgcacctttcgttctttttcctgactacttctgcctgctgggatttatctggcttagcatgaatgtcctgttgttctggaagacatttctcctctacaatcaagggccagaatatcactatttacatcagatgctggggcttggtctgtgtctgagccgggctagcgccagcgttctgaacctcaattgctccctgatcctgttgcctatgtgtcgaaccctgctagcttatctacggggatcgcaaaaggttccatctcggaggactcgaaggttgctggataaatccagaactttccacataacttgcggtgtgaccatctgtatcttctccggggtccatgtggctgcgcacctggtgaatgccttaaacttctcagtaaactattccgaagacttcgtcgaactgaacgctgctcgttaccgggatgaggaccctcggaaactgctgtttaccaccgtcccaggcctcactggggtgtgtatggtcgtggtgttgttcttgatgatcacagcctcaacatacgccatccgggtgagcaattatgatattttttggtatacacataacctcttctttgtgttctacatgctgctgactttgcatgtgtccggaggactcctgaagtatcagactaacctggatactcacccccctggttgcattagcctgaacaggacttcctcacaaaacatttcgttgcccgaatacttctcggagcactttcatgagccttttcccgaaggattcagcaaaccggctgagtttacccaacataaatttgtcaaaatctgcatggaggagccgaggttccaggccaacttcccccaaacttggttgtggataagcggcccactgtgcctgtactgtgccgagaggctttaccggtatatccgcagcaataaaccagttaccataatttccgtgatgagccatccttccgacgtaatggagattcgtatggtgaaagagaacttcaaggctcggcctggccagtacattaccctgcactgccccagcgtgagtgcgctcgagaaccacccctttaccctgaccatgtgccctacggagaccaaggccacctttggcgtgcatctgaaaatcgtgggcgactggactgagcgtttccgcgatctattacttccacccagcagccaagattcagagatcctcccattcattcagtctaggaattacccaaagctatacattgatggcccatttggatctcccttcgaagagtcactcaactatgaggtgtctctttgcgtggctggcggtattggggtgacaccctttgcaagtattctgaacaccctgctggacgattggaaaccttacaagttgaggcgcctctactttatttgggtgtgtcgagatattcagtcctttagatggtttgctgatctcctctgcatgctgcataacaagttctggcaggagaatcgccctgactatgtgaacatccaattatacctaagccagactgatggcatccagaagattatcggggagaagtatcacgcgcttaacagtcgactgtttattggccgtccgaggtggaagctgttgtttgatgagatagcaaagtataacaggggaaagaccgtaggcgtattctgctgcgggccaaactctctcagcaagacccttcataagttaagcaaccagaacaattcctatgggacccgctttgaatataataaggagtcattcagctag

SEQ ID NO: 232003 - DNA, 1665 bp, synthetic construct
  misc_feature 1..1665: note = Description of Artificial Sequence: Synthetic coding sequence
  source 1..1665: mol_type = other DNA
atgaatgtgctactcttctggaaaacttttttgctgtataatcaggggcctgagtatcattatctgcaccaaatgcttggacttggcctctgcctatcccgcgcaagcgcatctgttctgaaccttaactgctccctgatcctattaccaatgtgccgaacactcctggcatatcttagaggatcacagaaagtaccctcccggcgtactaggagactgctggacaagtcaagaaccttccacataacttgcggcgtgactatctgtattttcagcggagtccacgtggccgctcacctcgtcaacgcacttaacttctccgttaactactcggaggattttgtggaattaaatgcggctagatacagggatgaagatcccagaaagctgctgttcacaacggtgcctggcctgacaggcgtatgcatggtcgtcgttctttttctgatgattactgcttctacctacgccatccgtgttagcaattatgacatcttctggtatactcacaatttgttttttgtgttctacatgctgctgacactccatgtgtcggggggtcttctgaagtaccagactaacctcgacacgcacccacccggatgcatctcccttaatcggacaagctctcagaacatttctctccctgagtacttcagcgagcacttccatgagccattcccagaaggattttctaagcccgctgaatttactcaacataaattcgtcaagatatgcatggaggaacccaggttccaggccaatttccctcaaacgtggctttggattagtgggcctctctgcctctattgcgccgagagattgtacagatacataagaagtaataagcctgtgaccattatcagtgttatgtcacaccccagcgacgtcatggaaattcggatggttaaggagaacttcaaagctaggcccggacagtatattacattacactgcccaagcgtctctgctctcgagaatcacccctttactctgaccatgtgccccaccgagacgaaagccaccttcggtgtgcatctcaaaattgtgggtgactggacagagcgattccgcgacctgcttttgcccccttcaagtcaggacagtgagattctgcctttcatccagagcaggaactatccaaaattgtacatcgacgggccattcgggagcccttttgaagagtcactcaattacgaggtttcattatgcgttgctgggggaatcggggtaacgccgttcgcaagtatactgaatactctgctggacgactggaagccgtacaagctgcgccgtttgtattttatttgggtgtgtcgcgatattcagtcttttcggtggtttgctgatttactttgcatgctacacaacaagttttggcaggaaaaccgaccagattacgtgaacatacagctctacctgagccagacggatggcatacagaaaattatcggtgagaagtatcacgctctgaacagcaggctgtttatcggacgtcctaggtggaaattgcttttcgacgaaatcgctaaatataatagaggtaagactgtcggtgtgttttgctgcggtcccaacagtctgagcaaaacacttcacaagctgtctaaccaaaacaactcctacggcaccagatttgagtataataaggagtcctttagctag

SEQ ID NO: 232004 - DNA, 1665 bp, synthetic construct
  misc_feature 1..1665: note = Description of Artificial Sequence: Synthetic coding sequence
  source 1..1665: mol_type = other DNA
atgaacgtgcttctgttctggaaaactttcctgctgtataatcaaggaccagagtaccattacctgcaccagatgctggggcttggtctctgcctatctcgggcttcagcatctgtcctgaacctcaactgttcactgatattgttgccaatgtgtcgcaccttgctggcatacctacgtggcagccagaaggtaccttcaagacggacaaggcgcttactcgacaaatcccgcacctttcatatcacttgtggggttactatctgcatattcagcggagttcacgtagcggctcatttggttaatgctcttaacttctccgtgaactactctgaggactttgtggaactcaacgcggctcgatacagagatgaggacccacgaaagctcctctttaccacagtgccgggattgacgggagtttgtatggtggtagtgttatttctaatgataacggcttcaacttacgctatcagagtttccaattatgacatcttttggtacacgcataacctgttcttcgtgttctacatgctgctcactctgcacgtatcagggggattactgaagtatcagactaaccttgatactcacccacccggttgtatatcattgaacaggacaagcagtcagaatatctcgttgccggagtacttcagcgaacacttccatgagccgtttcccgagggattctctaaaccagctgagttcacacagcataagttcgttaagatatgcatggaagaaccgaggtttcaggcgaatttcccacagacctggctatggatctccggcccactgtgcctgtattgcgcagaacgactgtataggtacattaggagcaataagcctgttaccataatctccgttatgagtcaccctagtgacgtcatggagattcggatggtcaaggaaaactttaaagcccgtcccggacaatatatcacccttcattgtccaagtgtctccgccctggaaaaccacccattcaccctgaccatgtgccccaccgaaaccaaggctactttcggtgtgcacctgaagatagtaggcgattggaccgagcgcttccgggatctgctgcttccaccttcatcccaagactcagaaattttgcctttcatacagtcaaggaactatcctaagctttacatagatgggccatttggatccccctttgaagagagcctgaattacgaggtgtcactctgtgtggcaggaggaataggtgtgacgccctttgcctccattctgaacaccctgcttgatgactggaagccgtacaagctccggaggctgtatttcatttgggtctgccgcgatatacagtcatttcgttggtttgccgacctgttatgcatgctgcacaacaaattctggcaagagaatcggcctgattatgtcaatatccagctgtatctctctcagaccgacggtattcaaaagataattggcgagaaataccacgccttaaattcgagacttttcatcggccgaccccgatggaaattgttgttcgatgaaatcgctaaatataatcgtggtaagactgtgggagtgttttgctgtggtcccaatagcctgtctaaaacattgcataagctcagtaaccagaataactcttacggtactcgtttcgaatataataaggagagctttagctag

SEQ ID NO: 232005 - DNA, 696 bp, synthetic construct
  misc_feature 1..696: note = Description of Artificial Sequence: Synthetic coding sequence
  source 1..696: mol_type = other DNA
atggcggtctcatggcgatcttggctggccaacgaaggtgttaagcacctatgtctattcatctggctgtcgatgaacgtgctcctgttctggaagaccttcttactctacaatcagggccctgagtaccattaccttcaccagatgctaggatgccccacggagaccaaggccacttttggggtccatctgaagattgtgggggactggactgaacgctttagagatctcctcctgcccccatcatcccaggattccgagatcctccctttcattcaaagccgaaattacccgaaggatgattggaagccatataaactccggaggctgtacttcatctgggtatgccgagacatccagagtttccgctggtttgccgatttgctctgcatgctacacaataaattctggcaggagaatcgcccagattatgtgaatatccagttatacctgtctcaaaccgacggcattcagaaaattattggagagaaatatcatgcactgaattctaggcttttcatcggcagacctcgatggaagctgctgtttgatgaaatagccaagtacaatcgtgggaagactgtgggcgtcttctgctgtgggccaaactcactgtcaaagaccctgcacaaattgtcaaatcagaataacagttatggaacaagattcgagtacaataaggagagctttagttag

SEQ ID NO: 232006 - DNA, 1617 bp, synthetic construct
  misc_feature 1..1617: note = Description of Artificial Sequence: Synthetic coding sequence
  source 1..1617: mol_type = other DNA
atggctgtgagctggaggtcgtggctggctaacgagggggtgaaacatctgtgtctctttatttggctgtctatgaacgtccttctgttctggaaaacgtttctgctctataaccaagggcctgaatatcactacctgcaccaaatgttgggtctgggactctgtctgtctcgggcaagcgcctctgtgttgaaccttaattgtagcctcatcctgctcccaatgtgtcgaacgcttctcgcctatcttaggggcagtcaaaaggtcccttcccgcaggaccaggagacttttggacaaatccaggacttttcatatcacttgcggggtgacgatatgcattttttcgggcgttcatgttgcggctcacctggtaaatgccttaaatttcagtgtgaactactccgaggactttgttgagctgaatgccgcacggtaccgtgacgaggatcctaggaaattgctgttcacaaccgtacccggtctgacaggagtgtgtatggtcgtggtgttattcctcatgattacagcatccacctacgcaatccgcgtatctaattacgatattttttggtacactcacaacctgttttttgttttttacatgttattaacacttcacgtgagcggcggtttgctaaaataccagaccaatctcgatacccacccgccaggatgcatttctctcaacagaacttccagccaaaacatctcactgcccgagtacttttcagagcacttccacgagcccttcccagagggtttttctaagcctgccgaatttactcagcacaagtttgtcaagatatgtatggaggagcctcgattccaggccaattttcctcaaacctggttatggatcagcggtcctttgtgcttatactgtgctgaaagactgtatcggtacatccggagcaataagcctgtgactattattagtgtgatgagccatccgtccgatgtaatggagattcgtatggtgaaggagaacttcaaggctaggcctggccagtacatcacgttgcactgtccaagcgtctcagcacttgagaaccatccatttactctgaccatgtgcccaaccgaaacgaaagccaccttcggagtgcatctgaaaatcgtgggcgattggacagagcgattccgcgacctccttctacctccctcctcgcaggatagcgagattcttcccttcattcagtcaagaaactatcctaaggacgactggaaaccttacaagcttcggagattatactttatttgggtgtgccgtgacatacagagcttcagatggttcgccgatctgttgtgcatgttacacaacaaattctggcaggagaacaggcccgactatgtgaacatccagctgtacctttcacagactgatggcatccagaagattatcggagagaagtatcacgccttgaattccagactctttatcggtcggccacggtggaagctgctgttcgacgaaatcgccaaatacaatcgtgggaaaaccgtgggggttttttgctgtggccctaattctttaagcaaaaccctacacaaacttagtaaccagaataatagctatggcactcgctttgagtataacaaagaatccttctcgtag

SEQ ID NO: 232007 - DNA, 1665 bp, synthetic construct
  misc_feature 1..1665: note = Description of Artificial Sequence: Synthetic coding sequence
  source 1..1665: mol_type = other DNA
atgaacgtgctattgttctggaaaacattcctgctctacaaccaaggacctgagtaccactacctacatcaaatgcttggcctggggttatgcctctctcgtgctagtgcaagcgtgctgaacctgaactgttctctgattctcctgcctatgtgcagaacgctattggcttacctccgaggttctcagaaagtcccctctagacgaacacggaggctgctggacaagtcccggacctttcatatcacctgcggggtaaccatctgtattttctccggtgtgcacgtggcggctcacctggtaaacgccctgaatttctcggtcaattatagtgaagattttgttgagctgaatgccgctcgataccgcgacgaggacccacgaaaacttctatttaccacagtccccggtctgacaggcgtctgtatggtggtagtcctattcttgatgattacagcctccacctacgctattcgagtttctaactatgatatattttggtatacacacaacctgttctttgtcttttacatgctgctaaccctacatgtttccggtggactcttgaagtatcagactaatctggatactcatccacctggttgcatcagtcttaaccgaacgagcagccagaacattagtctaccagagtacttttctgagcactttcatgagccattccctgagggctttagcaagcccgctgagtttactcagcacaagttcgttaaaatctgcatggaggagccaagattccaagcaaacttcccacaaacttggctgtggatcagtgggcctctctgcctttactgcgcagaacgcttgtaccgttacattcggtcaaacaaacccgttactattataagcgtcatgagccacccctcggacgtgatggagattaggatggtgaaggagaattttaaggccagacccggtcagtacataacactgcattgtcccagtgtgtccgccctggagaaccacccgttcacactgaccatgtgcccgaccgagactaaggcgacattcggcgttcacctgaagatagtcggtgattggaccgagcggtttagggacctgctgctgccaccctcctcccaggattccgagatcttaccatttatacaatccagaaattacccaaagctgtatattgacgggccttttggttcacccttcgaggagagcttgaattatgaggttagtttatgtgttgcgggaggtatcggagtgacccctttcgccagtatcctgaacaccttattggacgactggaagccttataagctgagacgtctgtacttcatttgggtgtgccgggatatccagtcattcaggtggtttgctgacttactctgcatgttgcataataaattctggcaggagaaccggcctgattatgttaatatccagctgtatttaagtcaaacggacggcatacagaaaatcatcggtgaaaagtaccacgctcttaatagccggttattcatcggtcgaccacgatggaagctactattcgacgaaatcgccaagtataaccgtggcaagacagtgggcgtcttttgttgtgggcctaattccctctcaaagaccctgcacaagctgtctaatcagaacaactcatacggaacccgctttgaatataacaaagagtccttctcctag

SEQ ID NO: 232008 - DNA, 1665 bp, synthetic construct
  misc_feature 1..1665: note = Description of Artificial Sequence: Synthetic coding sequence
  source 1..1665: mol_type = other DNA
atgaatgtgttgctcttctggaagacgttcctcctctacaaccagggtcctgagtatcactatctgcaccagatgctgggcttgggtttatgcctgtcccgggcatctgcctctgtcctgaatcttaattgcagtctgatcctccttccaatgtgtcgaacgttgttggcttatttgcgaggttcacagaaggtgccttcgaggcgtacacgacgcctgctcgataagtcgagaactttccatataacatgcggagtaactatctgtatattcagcggagtccatgtagcagcccatctggtcaacgccctgaacttctccgtgaactatagtgaagacttcgtggaactcaacgccgctcggtatagagacgaggaccccaggaagcttctgttcaccacagtgcccggtttaacaggagtttgtatggtggtggtcctgtttctgatgatcactgcttctacatacgcaataagggtgtcgaattatgacatcttttggtacacccacaatctgtttttcgtcttctacatgttactgacgcttcacgtctctggcggactcttgaaatatcagaccaatctcgatacccatcctcctggctgtatatctctcaatcggaccagttcccagaacatatctctcccagagtatttttccgagcattttcacgagcccttccccgagggcttttcaaagcccgcagaattcacacagcataagttcgttaagatatgcatggaggagccccgttttcaggctaattttccacagacgtggctctggatctctggacctttatgtttgtactgtgctgagcgcttatacaggtacattcggtcgaataaacccgtcaccatcatctccgttatgtcccatcctagtgacgtaatggagattcgcatggtgaaggaaaattttaaggccaggcccggtcagtatatcactctgcactgtccttctgtctccgctctagagaatcaccccttcactctgacaatgtgcccaacagagacaaaagccacttttggtgtccaccttaaaatcgttggcgattggacagagagattccgtgatttgctactaccaccatccagccaggactcggagatccttccgtttatccagtctcgtaactatcccaagctttacattgacggaccgtttggaagtcccttcgaagagagtctcaattatgaggtgtccctgtgcgtggccggaggtatcggagtgactcctttcgcctccatcctcaatactctgctggatgactggaaaccgtacaaactccgacggctctacttcatttgggtctgtagggatatccaaagcttcagatggttcgccgacctcttgtgtatgctgcacaataagttttggcaagaaaatagacctgactacgtgaacattcaactttacctgagccagacagacggaattcagaaaattattggggagaaatatcatgctctcaacagcaggctcttcatcggcagacctaggtggaagctactgttcgacgagattgcaaagtacaatcggggaaagactgtgggtgtgttttgctgtgggccaaacagcctgtccaagacactgcataaactttcaaaccagaataattcctatgggacccggtttgaatacaacaaggaatcattctcttag

SEQ ID NO: 232009 - DNA, 2193 bp, synthetic construct
  misc_feature 1..2193: note = Description of Artificial Sequence: Synthetic coding sequence
  source 1..2193: mol_type = other DNA
atggcctttgtgtgcgccggtctctcagacacaatgtccgcagaggaggacgctagatggttgaggtgggtgactcagcagttcaaaactattgccggagaggacggggaaatctctctgcaggagttcaaggccgctctccatgtcaaagagtctttctttgccgagcggtttttcgctctgttcgactctgatcgatccggcacaatcaccttgcaggagctgcaggaagcattgacgctgctgattcacggctcccccatggataaactgaagtttctcttccaagtttatgacatcgacggctctgggtctatcgatcccgacgaactgcggaccgttctgcagtcttgcctgcgggagtcagctattagcctgcccgatgaaaagttggaccagttgacactcgccctgttcgagtcagccgatgcagatggtaacggagccatcacatttgaggaattacgagacgagctgcagcgtttcccaggtgtgatggaaaaccttacgatctccgccgctcactggttaacagcccctgcaccacgcccacgtccgcgaaggcctcggcagctgacaagagcctattggcataaccacagatcccagctgttctgcctcgctacatatgcaggactgcatgtcctcctctttgggttagccgcatccgctcatagggaccttggcgctagcgtcatggtggcgaagggctgcgggcagtgtctgaatttcgattgttcgttcatcgccgttctcatgttgcggagatgtttaacatggcttagggccacttggctggcccaggtcttacccttggatcagaatatccagttccaccagttaatggggtatgttgtggttggactgagtcttgtgcacactgttgcccatacggtaaactttgtgctgcaggctcaggccgaagccagtcctttccagttttgggagctgctgcttaccacacggccaggcattggttgggtgcacggctccgccagccccaccggcgtcgcccttctgctgttgctgctgctaatgttcatttgcagcagcagctgtattaggagatctggccactttgaagtcttctactggacgcatctgtcttacctgctggtttggctgctcctgattttccacggcccaaatttttggaagtggctcctggtgccagggatcctcttttttcttgaaaaagctattgggctcgcagtgtcaaggatggctgccgtgtgcatcatggaggtgaacttactgccgtccaaggtgactcacctgctgatcaaaaggccgcctttcttccattaccggcctggagactatctctatttaaatatcccaactattgccaggtacgagtggcacccattcactataagctctgcccctgagcagaaggacaccatttggctacacattcgctctcagggacaatggaccaatcggttgtacgagagcttcaaagcgagtgatccacttggtagaggaagcaagcggctgtcaagatccgttaccatgcggaaatctcagagaagctctaagggcagtgaaatcctgttggagaaacataagttttgcaatatcaaatgttatatagacggaccttacggaactcccaccagacggatctttgcgtctgagcacgccgtccttatcggcgctggaatcggaatcacgccttttgcctccattttgcaatctattatgtatcggcatcagaagcggaaacacacatgcccgtcctgtcaacactcgtggatcgagggggtgcaggacaacatgaaactgcacaaagtggatttcatttggattaatagggaccagcgctcttttgaatggtttgtgtcactgctaacaaagctcgaaatggatcaggcagaagaagctcagtatgggaggtttctggaactgcacatgtacatgacttctgctctcgggaaaaatgatatgaaagccatcgggctgcagatggcgctggatctcctggccaacaaagaaaaaaaggatagtatcacaggcctgcagacacgcacacagccaggcagaccggattggtccaaggtgttccaaaaggtggccgctgaaaagaagggaaaggttcaggtgttcttctgcggctcaccagccctggcaaaggtgctgaagggacattgcgagaaattcggctttcggttcttccaggaaaacttctag

SEQ ID NO: 232010 - DNA, 2298 bp, synthetic construct
  misc_feature 1..2298: note = Description of Artificial Sequence: Synthetic coding sequence
  source 1..2298: mol_type = other DNA
atgaatacatccggagaccccgcacagaccggaccagagggttgtcggggtactatgtccgccgaggaggatgcccgatggctgcggtgggtgactcagcaatttaagaccatcgccggagaggacggggaaatatcactgcaagaatttaaggctgctttacatgtcaaagaatcattctttgcagagagattctttgccctgttcgactcagatcggtccggcacgatcacgctgcaggagctgcaggaagcgttaacgctgctcatccatggatctccaatggacaaactgaagttcctatttcaggtgtatgacattgatgtgtgtgctcgacaaggcgcttccgcagggactgaatggggtgcaggagctggcccacactgggcctcgtcacccctagggaccggatctggctcaatcgaccctgacgaactccgcacagtgctccagtcctgtcttagggaaagcgccatttctttgccagatgaaaaactcgaccagctcactctggccctgtttgagagcgctgatgcggacgggaatggggcaatcacatttgaagaacttcgcgacgaactccagagattccccggagtcatggaaaaccttaccatcagtgccgctcactggttaacggcccctgccccacgtcccagaccgaggaggccacggcagcttaccagggcctactggcacaatcatagaagccaactattttgtcttgctacatatgccggactgcacgtgctcttgtttggactggccgcatccgcacaccgcgacctgggcgcaagtgtcatggtggccaaaggctgtggccagtgtctgaacttcgattgtagtttcatcgctgtgctgatgctcagacgctgcttaacatggctaagggctacttggctcgcccaggtcctgccattggatcagaatattcagttccaccagctgatgggctacgtggtggttggtctgtccctggttcatacggttgcccataccgtcaacttcgttctccaggcgcaagctgaggcctcgccctttcagttctgggagctgctgttgaccacaaggcctgggatcgggtgggtgcatggatcagcgagtcccacaggcgtggctttgttactgttactccttctgatgttcatctgctccagctcttgcatcagacgctctggacatttcgaggtgttctactggacacatctctcatacttgcttgtctggctgcttctgatctttcacgggccaaatttttggaaatggctgctcgtccccggaatcttgttttttttagagaaggctataggactggcagtgagtcgtatggctgctgtctgcatcatggaagtgaatctcctgccatctaaagtgactcatcttctgataaagcgtccacctttcttccattacagacctggcgactacttgtatctgaacattcctacaatagctcgatacgagtggcatccttttacaatcagctctgcccctgagcagaaggatacgatttggctccatattcgatcccagggccagtggacaaacaggctttacgagagttttaaagcaagtgatcctctgggtcgcggttctaaaaggctatcacgctcggttaccatgagaaagagccagcgatcctcaaaggggtccgaaatattgctcgaaaaacataagttttgtaatattaagtgctatatagacgggccatacgggacgcctacgcgccgaatatttgcgtctgaacatgccgttcttattggagcaggaataggaataaccccttttgcatctatcctgcagtccatcatgtaccgacatcaaaagcgtaaacatacttgcccttcctgccagcacagctggatagaaggtgtgcaggacaatatgaagctacataaggtagatttcatctggatcaacagagaccagcgttcctttgaatggttcgtgagtctcctgacaaagctggagatggaccaggcagaagaggctcagtatgggaggtttcttgaattgcacatgtatatgacctctgccctagggaagaatgacatgaaggccattgggctgcagatggccctagatttgttggccaataaagagaagaaagactctattactggcctgcaaacaaggacacaaccaggacgccctgattggagcaaggtctttcagaaggtggccgctgaaaagaagggtaaggtgcaggtgtttttctgcgggagccctgccctcgccaaggtgcttaaggggcactgcgagaaatttggtttccgcttttttcaggagaatttttag

SEQ ID NO: 232011 - DNA, 2214 bp, synthetic construct
  misc_feature 1..2214: note = Description of Artificial Sequence: Synthetic coding sequence
  source 1..2214: mol_type = other DNA
atgaacacatccggagacccagctcagactgggcctgaaggctgccgtggcaccatgtctgccgaggaggatgctcgatggttgcgctgggttactcagcaattcaagactatagcaggggaagacggggagatttctctccaggagtttaaagccgctctgcacgtcaaagaatcctttttcgccgagcgctttttcgccctgttcgattctgataggtccgggactattacattgcaggaattgcaggaggcattaacattgctgatccacggatctccaatggacaaactcaagtttctttttcaagtgtacgatattgacggatctggttcgattgatccagatgagctgagaacagtgctgcagtcctgcctgagggagagcgcaatctcgctgcctgacgaaaagttagaccagctcacgttggccctcttcgaaagcgccgacgctgacggaaacggagcaatcacattcgaggagctcagggatgagctacagcgttttcctggggtcatggagaacctcaccatatccgcagcgcactggctgaccgccccagcgcctagacccagacctcggcgacccaggcagctcactcgcgcatactggcacaatcacaggtctcagctcttctgtctggccacttacgctgggcttcacgtactcctgtttggcctggccgcatccgcccatagggacctgggggcttccgtgatggtggcaaaaggatgtggccagtgcctgaacttcgactgttcttttatagcagtgctcatgctcagacggtgtcttacatggctgagggctacatggttggcccaggtgctgccactggatcagaacatccaatttcaccagttgatggggtatgtggtggtcgggctttctcttgttcataccgtcgctcacaccgttaacttcgtcctccaggcacaggccgaggcttcacctttccaattctgggagctcctgctgacaacacggcctgggattgggtgggtccatgggtcagcgtccccgacgggcgtggcactgctgctgctgctgctactgatgtttatctgctctagcagttgtatccggaggagtggccactttgaggtgttttactggactcacctttcctacctgcttgtgtggttactgctgatttttcacggacccaacttctggaagtggcttctggtgcctggcatattgtttttcttggagaaagcgataggcctcgcagtctctaggatggcggcagtgtgcattatggaggtcaacctgctgccttctaaggtgacacatctgctaatcaagaggcccccattctttcattacagaccgggagactacctgtatttaaatattccaaccatagcacggtacgaatggcatcccttcacaatctcgagcgcacctgaacagaaagacactatttggctgcatataaggagccaggggcaatggacgaaccggctatacgagtcttttaaagcatccgacccactggggagaggttctaagaggctatctagaagcgtgaccatgcgtaaaagccagcgcagtagtaagggatctgaaattctgctggagaagcacaagttttgtaacataaagtgctatatcgacggtccatatggaacacctacaaggcggatttttgcttccgaacatgctgtgctgattggagctggcatcggaatcacccctttcgcttctatactccagagcatcatgtatcgccaccagaaaagaaagcacacttgcccttcttgccagcattcctggatagagggggtgcaggataacatgaagctgcataaggtggatttcatttggatcaatcgggaccagcggagcttcgagtggttcgtgagcttgctgacaaaactagagatggatcaagctgaggaggcccagtatggtagattcctagagcttcacatgtacatgacctctgcgctgggaaagaacgacatgaaagctattggactccagatggccctcgacttactggcaaataaggaaaaaaaagattcaattacaggattgcagactcgcactcagcccggaaggccagactggtctaaggtcttccagaaagtcgctgctgagaaaaaagggaaagtccaagtcttcttctgtggatctcccgctttagctaaggtgcttaagggacactgcgagaaattcgggttccgattctttcaagagaatttttag

SEQ ID NO: 232012 - DNA, 4419 bp, synthetic construct
  misc_feature 1..4419: note = Description of Artificial Sequence: Synthetic coding sequence
  source 1..4419: mol_type = other DNA
atggataatgccctcttctgcctcgcggcagtgtctaacttagacattgagtccaagttatccgtgtactacagggctccatggcaccaacagcggaacattttcttgccagctacgcggccaccgtgcgtggaagagctacacaggcatgcacgtcaaagccttcaggccctacgcagggagcaccgcagcaggagcgaccggagagagcagagagcggctgcgcctctgtcaattgccgctcctccgctcccagcttacccacctgctcatagccagagacgacgggagttcaaagataggcactttctgacttttaactcaacgcgtagtccctcaccaaccgaatgctgtcacatgacaccatggagcagaaagagccaccctcccgaagatgaggatacggacgtgatgttgggccagaggccaaagaaccccatacacaacataccatctactctggataaacaaaccaactggtcgaaagctcttcctctgcctacacccgaggagaagatgaagcaggacgcacaggtgatcagcagctgcataatcccaataaacgtgaccggggtaggctttgatcgggaggcttctattagatgctctctggttcactcacagagtgttctgcagaggcgccgtaagttacgcagaaggaaaactatctcaggtatacctcgcagggtgcagcaggaaattgacagtgatgaaagccctgtggcgcgagagaggaatgtaatcgtgcacactaacccagacccctctaatactgtcaaccgcatatcagggacacgtgatagcgagtgccagaccgaagacatcttgatcgctgccccatcacgccgaaggatacgggcacagagaggtcagtcaatcgctgccagcctgagtcactctgcaggaaacatctccgcgcttgcggacaagggcgataccatgttcacccccgctgtaagctccaggactcgcagtagaagtctacctcgggagggaaatcgagggggtgacgccgaaccaaaagtgggagctaaacctagtgcctatgaggaaggcgagagctttgtcggagatcatgaaaggaccccaaacgacttctccgaggcaccttcgagtccatctgctcaggaccatcagccaacgctcgggttggcctgctctcaacacctgcatagcccccaacacaaactttcagagagaggtcggtcacggctgtcccggatggccgcagatagcggaagttgcgatataagttcaaatagcgatactttcggcagtccgatccactgcatttccaccgcgggtgtactgctatctagccacatggatcaaaaggatgaccaccagtcctcatcaggtaactggagcggatcctctagcacctgtcccagccagacatcagaaactattccccctgcagcaagcccaccactcactggttcaagtcattgtgattcggagctctctctcaatacagcacctcatgcaaatgaggacgcgagtgtgttcgtgacagagcaatataacgaccacttggacaaagttcgcggtcatcgggctaatagcttcacgagcacggtggctgacttgctggatgaccccaacaatagtaataccagtgacagcgagtggaattatttgcaccaccaccatgatgcgagttgtagacaggactttagccccgagcgacctaaggccgattcactgggatgtccaagtttcacctccatggctacttacgacagctttctggagaaatctccctctgataaggctgacaccagtagccatttcagcgtggacactgaggggtattacaccagcatgcatttcgactgcggactgaaaggcaacaagagctatgtatgtcattacgccgctctgggcccagagaacggtcaaggagtaggtgcatccccgggactcccagactgcgcatggcaggactacctcgaccataagaggcagggccgaccgagcatttcattcaggaagcctaaggcgaaaccgacacccccaaaacgttcttctagcctgaggaagagcgacggaaacgccgatatttcagagaaaaaggaaccgaaaatatcatctggtcagcacttgcctcatagctcacgcgagatgaagttaccactggacttcgcgaatacaccctcccggatggagaacgcgaacctgcccactaaacaggaacccagttggatcaaccagagtgagcagggaattaaagagccacagttggatgcctccgacattcccccattcaaggacgaggtggccgaatccacccactacgctgatctctggctgttaaatgacttaaagacaaacgacccataccggtcgctgtctaatagttccaccgcaacaggaaccacggttattgagtgtataaaatcccctgagtcgtcggagagccagaccagccagagtgaatctcgcgctacaacaccatccctgccttctgtggacaatgaattcaaactggcttccccagagaaattggctgggctggcatccccaagctccgggtacagcagccaatccgaaacccctacctcttcatttcctaccgcattttttagtggccctctttcacccggtgggagcaagcgtaagccaaaggtgcctgaaaggaaatcctccctacagcagccttcactcaaggatggcacaatctctttatctaaggatctcgaactgcccatcatccctcctacccatctcgacctaagcgctctgcacaatgtgctcaacaagccctttcaccacaggcaccccttacacgtgttcacccataataaacagaacaccgtcggggaaaccctccgatctaaccctcccccaagtctggcaattacgcctacgatcctcaaatctgtaaacttacgttcaataaataagtcggaagaagtgaagcagaaggaagaaaacaacacagacctcccatacctcgaagagtctacactgaccacagctgccctgagcccatccaagattcggcctcacaccgcaaacaaatctgtttcacgacagtactccaccgaggacacaatcctgtccttcctcgattcttccgctgtggaaatgggcccagataagctgcatctcgagaagaactcaactttcgacgttaaaaatagatgcgacccagaaactataactagcgctgggtcatcactattggacagtaacgtgacgaaagatcaggtgcggaccgaaaccgagcccatccccgaaaacactccgaccaagaactgcgcgttcccgacagaggggttccagagggtatccgcagccaggccaaatgatctggatggtaagatcatacagtatggtcctgggcctgacgaaactcttgaacaggtgcaaaaggccccaagcgccggtctcgaagaggtggcacaacccgagtcggtcgatgtcatcacaagtcagagtgattctcctactagagccaccgatgtttccaatcaattcaagcaccagttcgttatgtctcgccatcatgataaggtgcctggaaccatcagttatgagtcagaaatcacatccgtaaatagtttccccgaaaagtgctcgaaacaggaaaatatcgccagcggaatatcagccaaatctgcttccgacaattctaaagccgaagaaactcagggaaatgtggacgaggcctcactcaaggaaagctccccgagcgacgactctatcatctctcctctgagtgaggatagccaagcggaggccgagggtgtctttgtctccccgaacaagcctcgcaccaccgaagacctcttcgcggtgatccacagatctaagcggaaggttttaggacggaaagatagtggtgacatgtctgtgagaagcaaatcccgggcaccactgagctctagcagctcttctgcctcttcaattacttcccctagcagcaatgtgaccactcctaattcccagcgctcaccaggactgatttatagaaatgcgaaaaagtccaatacgtccaacgaggagttcaaactactcttacttaagaagggttcaagaagcgacagttcttataggatgtccgcaactgagattcttaaatccccaattctgcctaaaccaccgggagagctcaccgccgagagccctcaatctacagatgatgctcaccaagggagccagggtgccgaagccctgtcaccgctcagcccctgttcccccagggtgaacgcagaagggttcagctctaagtcattcgccacgagtgcatccgcccgagtgggtagaagtagagcacctccagccgcaagtagtagcaggtactcggttcgctgccgtctgtacaacaccccaatgcaggctatctccgagggggagaccgagaatagcgacgggagcccccatgacgatcggtcgtcccagtcctctacttag

SEQ ID NO: 232013 - DNA, 4892 bp, synthetic construct
  misc_feature 1..4892: note = Description of Artificial Sequence: Synthetic coding sequence
  source 1..4892: mol_type = other DNA
atgcccttcgccaagcgcatcgtcgaaccacaatggctttgccgccaacggcgacccgcaccaggacccgctgtcgacgcaagcggaggctcagcggagcctccaccacctctgcagcccccaggaaggagagacctggacgaggtagaggcccctggccctgaagaaccagcacgggcagtccccgctccttctgggctgcctcccccacctcctccgctgcctgcaccagcggaccagactcagcctcctcatggggaggcgagcgtggcaggagaagagagcaccgcaggcatcccagaggctgctcctgccgctggggaggcttccagcgcagcagcagccgctgctgtactgctcatgctggacctatgcgcagtcagtaacgctgccctggccagggttctgcgccagctctcagacgtggcaagacatgcatgcagtctgtttcaggaactcgaatccgatattcagctgactcacagacgcgtctgggctctgcaggggaaacttggcggagtccagcgggtcctgagtaccctcgatcctaagcaggaggccgtgcccgtgtctaatctggatattgaatctaagctgtctgtctactaccgcgcaccgtggcaccaacagcggaatatctttttgcccgctacccgaccaccttgcgtagaagagctccatagacatgctaggcagagcctacaggcgctcagacgagaacaccgctcacggtcagacaggagagagcaacgtgccgctgccccactttctatagccgcacctcctttgcctgcgtaccctcccgcacattcacaacgaagaagggagtttaaggatcggcattttcttacatcacaccctcccgaggacgaagacaccgatgtgatgttgggccagcgccctaagaaccctatccacaacatcccatctactcttgacaaacaaaccaattggtccaaagctctgcccttgcccactccggaggaaaaaatgaagcaggatgcccaggtaatctcgtcatgtattattcccatcaatgtaaccggcgtcgggttcgatagagaggcttctattcgatgttcgctcgtccattcacaaagcgtgctgcaacgtagacgtaagcttaggaggagaaagaccatttccggcatccctcgtcgggttcagcaggagattgactccgacgagagccccgtggcgagggaacggaacgtaattgtgcacactaatccagacccctctaataccgttaatcggatctccggcactagagattcggagtgccagaccgaggatattttgatagccgctccatcccggaggaggatcagagcccaaagagggcagtccattgccgcatctctgagccactccgccggaaatatctcagctctggcagacaagggcgacaccatgtttacacccgctgtcagctcccgaaccagatcgcgcagcctgccacgcgagggaaacaggggtggggatgcagagccaaaagtcggcgctaaacctagcgcctacgaagaaggggaatctttcgtgggagaccatgagagaacaccaaatgattttagtgaagccccttcaagcccatccgcacaagaccatcagccaacattgggcctggcctgttcccagcacctgcattctcctcaacacaagctttcagagagggggagatccagacttagtcgcatggcagccgacagcggctcttgcgatatcagctccaattctgacacattcggctcccccatccattgtatatcaacagccggagtcctgctgtcgtctcacatggatcagaaggatgatcaccaatcctcatccgggaactggtctggcagcagcagtacctgcccatcccagacgagtgagacgataccgcctgcggcatccccccctctgaccgggagctcacattgcgattccgaacttagtttgaatacagcccctcatgccaacgaggatgcttctgtgttcgtcaccgagcagtacaacgaccacctagataaggtaagagggcaccgggctaatagctttactagcacggtggcggaccttctggacgatcccaataactccaacacctcggacagcgagtggaactatctgcaccatcatcatgatgcctcctgccggcaggacttttctcctgagcgcccaaaggcagattcactcgggtgccccagtttcacatctatggctacatacgacagttttctggagaagtcacccagtgataaggcagatacatcgagccacttcagcgttgacaccgagggctattacacatcgatgcacttcgattgtgggcttaagggcaacaagtcgtatgtgtgccattatgctgcgctggggcctgaaaatgggcagggggtcggcgcaagcccgggtctccctgactgtgcctggcaggactatctcgatcataagcgccagggacggccaagtatttccttccggaagcctaaagccaagccaaccccgccaaagcgcagctcttcactccgaaagtctgacggaaatgcagatatatcagagaagaaagagcccaagatcagctccggacagcacttgccccatagcagccgcgagatgaagctgcccttggacttcgccaacacaccctcccgcatggagaatgctaatctccctacaaaacaggagccaagctggatcaaccaatcagagcaaggaatcaaggaaccccagctcgatgctagcgacatccctccttttaaagacgaggtcgcagagtccacacactatgccgacctctggctccttaacgacctaaagactaatgacccataccggagcctgagcaactctagtacagcaaccggtactaccgtcatagaatgcataaaatcacccgagagctctgagtcacaaacatcacagtctgaaagccgggctaccaccccttctctgccttccgtggacaacgaatttaagctcgcatcaccagagaagctggctggtctggccagtcctagttctggttacagcagtcaatccgaaaccccaacatccagctttccgacggcttttttcagcgggccattgagtccaggaggatctaaaagaaagcctaaagtgccagagagaaagagttcactccagcagcccagtctgaaggatggcacaatcagcctctccaaggacctggaactccccataatccctccgactcacctcgacctctccgcgctgcataatgtactgaataagccattccaccatcggcacccacttcatgtgttcacccataataagcagaacactgttggagaaactctgcgatccaatcctcccccttcactggcaataactccaacgattttgaaatcggtgaatcttaggtccatcaacaaatcggaagaggttaagcagaaggaagagaataataccgacttgccctatcttgaagagagcactctgaccaccgcagcactctctccaagtaagatcaggcctcacaccgccaacaagtcggtctctcgccagtatagcaccgaggatactattctcagctttctggatagttcagctgtggaaatgggccctgataaactgcacttggagaaaaacagcacattcgatgttaagaatagatgcgaccccgagacaatcacatccgcgggaagcagcctcttggactcaaacgtgacaaaagatcaggtgagaactgaaacagaacctattccagagaacacccctactaagaattgtgcattccccaccgaagggttccagagggtcagcgccgctaggccaaacgacctcgatggcaagatcatccaatacggacctggcccagacgagaccctcgagcaggtccaaaaggcgccatcagctgggctcgaggaggttgcccagcctgagtccgtggatgtgatcacatctcagtcagactcacccacacgcgcaactgacgtgagtaatcaattcaagcaccagtttgttatgagccgacatcatgacaaggtccctggtacgatcagctacgagagtgagatcacctctgtcaattcctttcctgaaaagtgctcgaaacaagaaaatatcgcttcagggatttctgctaagtcagccagcgataactctaaagcggaggagactcaggggaatgtggacgaagcgagcctcaaggagtccagcccgtctgacgacagcatcatttcaccactgagcgaggatagccaggcggaggcagaaggggtgtttgtcagcccaaataagccacgtacaactgaggacctctttgcggtgatacaccgttcaaaaaggaaggtcctagggaggaaagattccggagacatgtccgtgcgctctaagagtcgagcccctctcagctcctcatcttcatccgctagctcaattacctccccatccagcaacgtcacaacccctaatagccagcgctctcctggacttatctatagaaacgccaaaaagtccaatacgtcaaacgaggagtttaagctgctcctgctaaagaagggctcgagaagcgattcgtcttatcgaatgtcagctactgagatcctcaagtccccaatactccctaaacctcccggtgagcttaccgccgagagcccacagagtaccgacgatgcccaccaggggtcacaaggtgctgaggcattgtcccccctgtctccttgctccccccgagtaaatgccgaaggttttagcagcaagagctttgcgaccagtgccagcgctcgggtcggcagaagccgcgctccacccgctgccagcagctctagatatagtgtccgttgccggctgtataatacccctatgcaggccatttcggagggcgagacagagaacagtgacggctccccacatgatgataggtcctctcagtcttcaaccta

SEQ ID NO: 232014 - DNA, 4425 bp, synthetic construct
  misc_feature 1..4425: note = Description of Artificial Sequence: Synthetic coding sequence
  source 1..4425: mol_type = other DNA
atggcgctggcttgttgtatgcctaagaacgccgctgtgagcaatctcgacatcgaatctaaactctctgtgtactacagagctccatggcaccaacaaagaaatatattcctgccagccactcgtccgccttgtgttgaagaacttcatcgtcatgcgcgacaatccctgcaggccctaaggcgagaacaccgatcaaggtcggatagacgggagcagcgcgcagccgcaccactgagcattgctgccccacctctcccagcgtatccccctgcccatagtcagcggaggagggaattcaaggacagacacttcctgacctttaactcaactcggtcccctagcccaaccgaatgctgtcatatgacaccatggtctcggaagtcgcatccacccgaagatgaagataccgatgttatgctgggccagaggcctaaaaacccaatccataacatcccatccaccttagacaaacagacaaattggtcgaaggctctcccgctgcccacgcccgaagagaaaatgaaacaggatgcccaggttatcagcagctgtataatccccattaatgtcacaggggtggggtttgatcgggaggcctccattcgctgctctctggttcatagccagtccgtattgcaaaggcgaaggaaactcaggcgtaggaaaacgataagcggaatcccaaggcgggtgcagcaggagatcgattcagatgagagccccgtggccagagagaggaacgtaatagtgcatacaaacccggatcccagcaacacagtgaaccggatctcaggcaccagagatagcgaatgccagaccgaggacatattgattgcggcaccatccaggcggagaattagggctcaacgcggacagagcatcgccgcttctctgtcacatagcgctggcaacatcagtgccttggcagacaaaggcgacaccatgttcacaccagctgtaagctcacgcacaagatcacgatctctgccgagagagggcaaccgcggtggtgatgcagagcctaaggtcggagctaaaccaagcgcatacgaagagggcgagtcttttgtcggggatcacgaacggacaccaaacgactttagcgaggccccatcctcacccagcgcccaggaccaccagccaactcttggcctcgcctgctctcagcacctgcatagcccccagcataagctatctgagagggggagaagtagactcagcagaatggccgctgactccggcagttgcgacattagctcaaactccgacacgtttggatcacctatccactgcatctctactgccggtgtcttgctgagttcacacatggaccagaaagacgatcatcagtccagcagtggcaactggtccgggagctcatctacctgcccaagccagacatccgagacgatccctccagccgcttcgcctcctctcactggatccagtcattgcgacagcgagctctccctgaacactgcccctcacgctaacgaagacgcgtctgtgtttgtgacagaacaatataacgatcatctggacaaggtgaggggacatcgagctaactccttcacaagtaccgtagccgatctgcttgacgacccaaacaactcaaacaccagcgactctgaatggaattatctccaccaccaccacgatgcctcttgccgccaggatttctcaccagagcgaccaaaagctgactcgctcggctgtccgagctttaccagcatggcgacatacgatagcttcctcgagaaatcaccttcagacaaagccgacacttccagccacttttccgtggatactgaggggtattatacctccatgcattttgactgtggactgaaaggaaataaatcatatgtctgccactatgccgctctgggacctgagaacggccaaggtgtgggggcatctcctgggctgcctgactgcgcctggcaagactacctggaccataagagacagggccgtcctagtatctccttccgtaagcctaaagccaagcctacgccacccaaacgatcttcttcgctgcgaaagagcgatggaaacgctgatatatctgagaaaaaggaaccgaaaatctcctccgggcagcacctgccccactcttcccgggagatgaaacttcccttggactttgccaatacacccagccggatggagaatgcgaacctgccgaccaagcaggaaccctcttggatcaaccagagcgaacagggcatcaaggagccacagttggatgcaagtgatattcccccattcaaagatgaagtagctgagagtacgcattacgcagacttatggctgttgaacgatcttaagacgaacgatccatataggagcctgagcaattcaagtacagcgactggcactactgtgattgagtgcattaagtctccagagtcttctgagtctcagacctcccaaagcgaatcccgcgcaactacccccagcctgcctagcgtggacaacgaatttaagcttgctagtccggaaaagctggcaggactggcaagtccatcttcaggctatagctcccagagcgagacacctacctcatcctttcctaccgcattcttctctggacctttgtcccctgggggttctaaacgtaagccaaaagtgcctgagaggaagtcctctttacaacagccaagcctgaaggacggaactatttctctttcaaaggacctggaactgccaattattccccctactcacctggacctgagtgctctccacaacgttcttaacaaacctttccaccataggcaccccctgcatgtgttcactcacaataagcaaaatacagttggggagactctccgctccaacccacctcccagcctagcaatcactccaactatactgaaaagcgtgaacctccggagcatcaacaagtcagaggaagtaaagcagaaggaagaaaacaacaccgacctcccttacctcgaagagagcacactgactacagccgctctctccccgtctaaaatacggcctcacacggcaaacaagagcgtgtctaggcagtatagtacagaggataccattctgtcttttctggactcgagtgccgtggagatgggacctgacaagctacatctggagaaaaactcaacgtttgatgtgaagaaccggtgtgaccctgagactatcacaagtgccggatcatccctacttgatagcaatgtcacaaaagaccaggtgagaaccgaaactgagccaatcccagagaatacccctaccaagaactgtgcttttccgacagagggctttcaacgggtttctgcagctcggcctaatgacttagatggaaaaataatccagtacggcccaggtccagacgagacacttgaacaagtccaaaaggcaccttccgcaggtctggaggaggtggcacagccagaaagtgtcgatgtcattacctcacagagcgacagtccaactagagccacggatgtgagtaatcagttcaaacaccagtttgtaatgtctcggcaccatgacaaggtgccaggcaccattagttacgagtctgagatcacaagcgtgaactcctttccagaaaaatgcagcaagcaagaaaatatcgctagcggtatcagtgctaaatctgccagcgacaatagcaaggctgaggaaacccagggtaatgttgatgaggcatccctcaaggagtccagtcctagtgacgattccatcattagccccctgagtgaagactcccaggcggaagcagagggtgtgttcgtgagcccgaacaagccacgaaccaccgaagatttgttcgccgtcatacacaggtcaaaacgaaaggtgttaggtaggaaagattcaggtgatatgtccgttcgttcaaagtcacgggcacccctgtcatcctccagtagtagtgctagtagcattacctcacctagttcaaacgtgaccactccaaattcccagaggagcccaggactgatttataggaatgcaaaaaagagcaatacgagcaacgaggagttcaagctgttgttgctgaagaagggcagcagatctgactcttcctaccgaatgtccgccacggagatcctaaaaagtccgatcctgcctaaaccaccaggtgagctcaccgctgagtcgccacagtcgactgacgacgcccatcaaggcagtcagggggcagaagctctgtccccccttagtccatgctctcctcgagtgaacgccgaaggttttagcagtaaatcattcgcaacatctgccagcgccagggtggggagaagccgcgctccaccagccgcatcctcgagccggtacagcgtccgatgccgcctatacaatacacctatgcaggcaatttctgagggggaaaccgaaaattcagatggttccccccatgatgaccgctctagtcagtccagtacttag

SEQ ID NO: 232015 - DNA, 255 bp, synthetic construct
  misc_feature 1..255: note = Description of Artificial Sequence: Synthetic coding sequence
  source 1..255: mol_type = other DNA
cccgagcttcaagtttgcgtattttgtcgaaacaacaaggaggccatggcactatacacgactcacatcttaaagggacctgatgggcgtgtgctctgccccgtgctccggcgttacacatgcccactgtgcggagcgagcggcgacaatgcacacaccataaaatactgcccccttagcaaggtcccccctcctccagctcgccctcccccaaggagcgcacgggacggtccgcctggaaaaaaactcagatag

SEQ ID NO: 232016 - DNA, 879 bp, synthetic construct
  misc_feature 1..879: note = Description of Artificial Sequence: Synthetic coding sequence
  source 1..879: mol_type = other DNA
atggaggcatttccctgggctcccagaagcccgaggcgtgggagggctccacctcctatggcccttgtgccaagtgctaggtatgtgagtgcaccgggtccagcccatcctcagccgttctcttcttggaatgactacctgggcctggctacattgatcactaaagctgtcgacggggaacccagattcgggtgcgctagaggagggaacggaggcggtggctcccctccctcttcctctagctcatcgtgttgctctccccacacaggagccggacccggagccctggggcctgccctcgggccacccgattacgatgaagatgatgacgacgactctgatgagccaggctctcgtggcaggtatctcggctctgcactcgagcttagagcgttagaactctgtgcagggcctgccgaagcaggtctgctggaggagagatttgcggagttaagtccctttgccggtagggctgccgcagtgctgctggggtgcgcccctgctgccgcagccgctgccacaacgacctctgaagccaccccgagggaggaaagggcacctgcctgggccgctgaacccaggctccacgctgcatcaggagctgcagctgcacgactgttaaagcctgagctgcaggtatgcgtattctgccgcaataataaagaagctatggcactgtacacaacccatattctgaaaggacccgacggacgcgtcctttgtcccgtcctgcgcagatacacctgccccctgtgcggcgcttctggagataatgcccatacaatcaagtactgtcccctttccaaagtgccaccacctccagctcgtcctcctcctcgttcggcgagggacggtcctcctggcaagaagctgaggtag

SEQ ID NO: 232017 - DNA, 3456 bp, synthetic construct
  misc_feature 1..3456: note = Description of Artificial Sequence: Synthetic coding sequence
  source 1..3456: mol_type = other DNA
atgctgagacgcgtgacagtcgctgctgtttgcgcaacgcggagaaaactttgtgaggcaggcagggagctggcagccctatggggaatcgagacaaggggcagatgcgaagacagtgcggcagctcgaccttttcccatactggccatgccaggtaggaacaaggctaagtctacctgcagctgccctgatttgcaaccaaacggacaagaccttggtgaaaacagtcgcgtggctcgactgggcgcagatgaaagcgaagaggaaggacgacggggatccctctcaaacgccggagacccggagatagtcaagtcaccctccgaccccaagcagtacagatatattaagctccagaacggcctacaggccttactgatatccgatttgtcaaacatggaaggcaagactggaaacacgacagacgatgaggaggaagaggaggtcgaagaagaagaagaagacgacgacgaggacagtggtgccgaaattgaagatgacgatgaagaaggcttcgacgatgaagacgagtttgatgacgagcacgacgatgatttggacacggaggacaatgaactggaagaactggaagagcgggcagaggccaggaagaagacgacagagaagcaatctgccgcagcactgtgcgttggcgtcggatcctttgccgatcctgatgacctgcctggcctggcgcactttctggaacatatggtcttcatgggtagtctcaagtacccggatgaaaacgggtttgatgcattcttaaaaaagcacgggggtagtgataatgccagcacagattgtgagcgtacggttttccagttcgacgttcagcgcaaatactttaaagaggccctagacaggtgggcccaatttttcatccacccgctgatgatcagggatgccattgacagagaggtggaagccgtggatagtgaataccagctggcaagaccctctgatgctaatcggaaagagatgcttttcgggtccctggctaggcctgggcatcccatgggtaagtttttctggggaaatgccgaaactctcaagcacgagcccagaaaaaataatatcgatacgcacgcaagattacgcgagttctggatgagatactactcctcccattacatgacactcgtggtgcagagcaaggaaacgctagatactctggagaagtgggtgaccgagatcttctcccagattccaaacaacggcctcccaagacctaacttcggccacctgacagatccatttgacactcccgcattcaacaaattatatcgcgtggtgcctattagaaagatccatgccctgactataacctgggcgcttcccccacaacagcagcactacagagtgaaaccactgcactacatttcctggcttgtgggtcacgaaggcaagggatccattcttagttttttaagaaagaaatgttgggcgctggcactttttgggggtaacggagaaaccggcttcgagcagaatagcacgtacagcgtcttcagtatcagtatcacccttactgacgaaggctacgaacacttttatgaggtggcctacacagtgtttcagtatttgaaaatgctgcagaagctgggtcccgagaagaggatctttgaggagattaggaaaattgaagataacgagttccactaccaggaacagacggacccggtcgaatatgtggagaatatgtgtgagaatatgcagctctacccactacaggacattctgacaggcgaccagctgctgttcgagtacaaacccgaggtgattggagaggctttgaaccagctcgtaccacagaaggccaatttagtacttctgtccggagctaacgagggcaagtgcgatctcaaggagaaatggtttggtacccagtattccatcgaggatatagaaaacagctgggccgaactgtggaactccaactttgagctcaatccagatctgcatcttcccgcagagaacaagtatatagccacagattttacccttaaagctttcgactgtcccgaaaccgaataccccgttaagattgttaatacacctcagggctgcctgtggtacaaaaaagataacaaattcaagattccaaaagcttacataagattccacttaattagccccctgattcagaagtcggccgcaaatgtagtgctgtttgacatctttgtcaacatcctgacccacaacctggctgagccagcgtatgaagcagacgtagcccagctcgagtataagttggtcgctggagagcatggcttaattattcgtgtgaaagggtttaatcataagttaccacttttgtttcaactgattattgactatttagccgaatttaacagcaccccagccgttttcacaatgatcactgagcagctgaagaaaacatattttaatatactgattaaacccgaaacactggctaaggatgtcagacttctgatcctggaatacgctagatggagcatgatcgataagtatcaagccctcatggacggcctcagtctcgagtcgctgttgtcctttgtcaaggagtttaagagtcagctatttgttgaaggactcgtacagggaaatgtgacaagtacggaaagcatggactttctgaagtacgtagtcgataaacttaatttcaagcccctggagcaagaaatgcccgtccagtttcaagtggtggagttaccatcaggacaccacctctgtaaagttaaagccctgaataaaggggacgccaacagcgaagttacagtttattaccagagcggaaccaggtcactccgggaatatacactgatggagctgctggttatgcacatggaggagccatgtttcgactttctgaggaccaagcaaacattgggctatcatgtgtaccccacatgtcgcaacactagtggcattctgggcttcagcgtcacagtcggaacacaagctacgaaatacaactctgaagtagtcgataagaaaatcgaggaatttcttagctccttcgaagagaagattgaaaatctgacagaagaggccttcaacacgcaggtaacagcccttatcaagctgaaagagtgcgaggatacacacctgggcgaagaggtggacagaaactggaacgaggtggtcacacagcagtacctttttgatcggctggcgcatgagatcgaggctctcaaaagtttctccaagagcgacttagtgaactggttcaaagcccatagaggacccggatctaagatgcttagtgtccatgtagtgggctacgggaagtatgagctggaggaggacgggacccctagcagtgaggatagtaattctagctgcgaagtgatgcagcttacttacctgcccacatccccgctgctggccgattgcatcatcccgattacggacattagagctttcacgacaacgctaaaccttctgccgtatcacaagatagtgaagtag

SEQ ID NO: 232018 - DNA, 3660 bp, synthetic construct
  misc_feature 1..3660: note = Description of Artificial Sequence: Synthetic coding sequence
  source 1..3660: mol_type = other DNA
atgctacgaagggtcacagtcgcagctgtgtgcgcaaccaggcgtaaactttgcgaagctgggcgtgaactggcagccctgtggggcattgagacaagaggtaggtgtgaggatagcgcggcagctcgccctttcccaatcctagcgatgccaggtcgcaataaggcaaaatcaacttgcagctgcccagacctgcagcccaacgggcaggatctcggagaaaactccagagtggcgagactaggcgcagatgagtctgaggaagaaggccgtagaggctccctgtcaaatgcaggggatccagaaatcgtcaagtcacccagcgatcctaaacaatatcgctatatcaagctgcagaatggcttgcaagcactactgatcagtgatctgagtaatatggagggcaagacaggcaacacaacagatgacgaggaggaagaggaagttgaggaggaggaggaggacgatgatgaagacagtggcgctgagatcgaagacgatgacgaagaggggtttgacgacgaggacgaatttgatgatgagcacgatgacgacctggataccgaagataatgaacttgaggaactggaggagagggccgaagccaggaagaagaccacagagaagcaacaactgcaaagtctgtttctcctgtggtccaagctgactgaccgtctttggtttaagagcacatatagcaagatgtcctcaacccttctcgtagagacaagaaatctgtatggtgtcgtcggcgcagaatcacgctctgcgccagtacaacatcttgcaggctggcaggcagaggaacagcagggcgaaaccgacacggtgctctcagccgctgccttgtgcgtgggagtgggatctttcgccgaccctgatgatctgcccggactggcacattttcttgagcatatggtctttatgggaagtttgaagtatccggatgaaaacgggttcgacgcgttcctcaaaaagcacgggggtagcgataatgcaagcacggactgtgaacggacagtgttccagtttgacgtccagcgtaagtattttaaggaagccctggacagatgggcacagttcttcatccaccctctcatgatcagggatgccatcgaccgagaggtcgaagctgttgacagtgaataccagctcgctaggccatctgacgccaacaggaaagaaatgctgttcggtagtctggcaaggccgggacaccccatgggcaagtttttttggggcaacgctgagaccctcaaacacgagcccaggaaaaacaatattgacactcatgccaggctccgcgagttctggatgagatattatagtagtcactatatgaccctggttgttcagagcaaagaaactctggacacgctcgagaagtgggtcacggaaattttttcacagatcccaaacaacggccttccacgacctaatttcggccaccttacagaccctttcgacactccagcttttaataagctgtatcgcgtcgtgcccattcgaaagattcacgctttgactattacctgggccctgccgcctcaacagcaacactacagggtgaagcccttgcattatatatcatggctcgtaggtcacgaggggaagggctctatccttagtttcctgaggaaaaaatgttgggcccttgccctgtttggcggtaatggtgaaactggctttgagcaaaatagcacgtacagtgtgttttccatttctatcacactgaccgatgaggggtatgagcatttttacgaagtagcttacacagtttttcagtacctaaaaatgctgcagaagcttggcccagagaaacggatctttgaggagatccgcaagatcgaggacaacgagtttcattatcaggaacagacagacccggtggagtacgtggagaatatgtgcgagaacatgcagctctacccattgcaagacattttgaccggggaccagcttctgttcgagtacaaaccagaggttattggggaggccctcaaccagctcgtgccccagaaggcgaacctggttctcctgtcaggcgctaacgaaggaaagtgcgacttgaaagagaagtggttcgggacccagtactcaattgaagatatcgaaaatagctgggctgagctctggaactctaatttcgagttaaatcctgaccttcacttaccggcagagaacaaatacatcgctaccgacttcaccctgaaagcttttgactgcccagagactgaataccctgtgaagatcgtgaatacacctcaagggtgcctttggtacaaaaaagacaacaagttcaagattcctaaggcctacattagatttcacctgatttctcctctgatccaaaaaagcgccgcaaatgtggttttatttgacatctttgtaaacatcttgacccacaacttagccgagcctgcttatgaggccgacgtggcccagctcgagtataaactcgtagccggagagcatggtctcataattagggtgaaagggtttaatcacaagttgcccttattattccaattgatcatcgactacctggcagaatttaacagtacccccgcagtgtttacgatgatcactgaacagttgaagaagacatacttcaacattctgatcaagccagaaacattagccaaagacgtgcggctgctaatcctggaatacgcaagatggagcatgatcgacaaataccaggcactcatggatgggctatccctggagtctctattgtctttcgttaaagagttcaagtcccagctatttgtggaaggcctcgtccaaggtaacgtgacaagcaccgagagcatggactttctgaaatacgtggtcgataagttgaatttcaaacccctcgagcaggaaatgcctgtgcagtttcaggtggtggagctgcccagtggccaccacttatgcaaagttaaagcgttgaacaagggtgatgccaattccgaagtcacagtatattatcagtcaggcacccggagcctgcgggagtatactttgatggagctgctggtgatgcacatggaggagccttgtttcgacttccttagaactaaacagactctgggctaccatgtctacccaacctgcaggaatacctccgggatcttgggatttagtgtgacagtcgggacccaggccacaaaatataacagtgaagtagtagacaaaaagattgaggagtttttgagctcattcgaagagaagattgaaaacctgaccgaggaggccttcaatacccaggtaaccgctctgattaagttgaaggaatgcgaagacacacacctgggagaggaggtagacaggaattggaacgaggtggtgactcagcaatacctctttgatcgccttgcacatgaaattgaggcactgaagtcttttagtaaatcagaccttgtaaattggtttaaggcacatagaggacctggaagtaaaatgctgtctgttcatgtggtaggttacggcaaatatgagttagaagaggatggtaccccttcttcggaagactccaactcaagctgtgaggtgatgcagctgacgtacctgcctaccagccccctgctggcagactgcatcatccctataactgacatcagggcctttaccaccacccttaatctgttgccctaccacaaaatcgtgaaatag

SEQ ID NO: 232019 - DNA, 1662 bp, synthetic construct
  misc_feature 1..1662: note = Description of Artificial Sequence: Synthetic coding sequence
  source 1..1662: mol_type = other DNA
atgcttcagaaacttggacccgagaagcgaatctttgaggaaataagaaaaatcgaagacaacgaattccactaccaggaacagactgaccccgtggaatacgtggaaaatatgtgtgaaaacatgcaactttaccccctccaggacatcctgaccggcgatcaactgctgttcgaatataagcccgaagtaataggggaagcattaaatcaactggtcccgcaaaaagctaatctggtcctcctcagtggagccaatgagggaaagtgcgatctcaaggagaaatggtttgggactcaatattcaatcgaagacattgaaaatagttgggcagaactctggaactcaaatttcgagctcaacccggacctccacctcccggctgaaaacaagtacatcgcatatatacgctttcaccttatttcccccctgattcagaaatcagctgcaaatgtggtgctttttgatatatttgtcaatatcctgacccacaacctcgccgagcccgcttatgaggccgacgtggcccagttggagtataagcttgtcgccggagaacacggactgatcatcagggtgaagggtttcaaccataaactgcctctgctctttcagctgatcatcgactatctagccgaatttaatagcactcctgcggtgttcaccatgatcactgagcagctaaaaaagacgtatttcaatatcctaattaagcccgagaccctcgcaaaggatgtgagactgctgattctagagtatgctcggtggagcatgatcgataaataccaagccttaatggatgggctatcccttgagagcctgctaagttttgtgaaggagtttaaaagtcagctcttcgtggaaggcctcgtccagggaaatgtcacaagcactgaaagtatggacttcctgaagtatgtggttgataaactgaacttcaaacccttggagcaggagatgccagtgcagtttcaagtagtcgaactcccatccgggcaccacctgtgcaaggtcaaggccttaaacaagggcgacgctaacagcgaagtgacagtttattaccaatccggaaccagatcgttgcgggagtatacgttaatggagctcttggtcatgcatatggaagaaccctgtttcgactttttgaggaccaaacagactcttggcagcgaggtggtggataaaaagattgaagaatttctgtcctcattcgaagaaaaaatcgagaacctcaccgaggaagcttttaacacccaggtgactgctttaataaagttgaaagagtgtgaagatacacacctcggcgaggaagtcgaccggaactggaatgaggtcgtcacacagcagtacctctttgaccggctggcacatgagatcgaagcactcaaaagtttcagtaaaagcgatcttgtgaactggtttaaagcgcaccgaggacctggttcgaaaatgctgtcagtgcatgtggtcggctatggcaagtatgagctggaggaagacggcaccccatcctctgaggactccaactcctcttgcgaagtcatgcaactgacctatctaccgacctcaccactgctggcggattgcattatccctatcacagacatccgtgcctttacgaccactcttaatttgctgccctatcacaagattgtcaaatag

SEQ ID NO: 232020 - DNA, 1617 bp, synthetic construct
  misc_feature 1..1617: note = Description of Artificial Sequence: Synthetic coding sequence
  source 1..1617: mol_type = other DNA
tgaaaaattgaggacaacgaattccactaccaggaacagaccgacccggtcgagtatgttgagaacatgtgtgaaaacatgcaactctatcccctgcaagacatcctaactggagaccagttactttttgaatacaagcctgaggtcatcggagaagccctgaatcagcttgtgccgcagaaagcaaacttagtgctattatctggggcaaacgaaggcaaatgtgacttgaaagagaaatggtttggcacccagtactctatcgaagacatcgagaacagctgggcagagttatggaactccaattttgaactcaaccccgatctgcacttgccggcagagaataaatatatagcttacatacgttttcacctcatcagtcctcttatccaaaaatctgccgcaaacgtagtcctgtttgacatctttgtgaacatcctgacgcataatctggcagagcccgcttatgaggctgatgtcgctcagctcgagtacaagttggtcgccggagagcacggcctaattatacgcgtgaaaggttttaaccacaagctgccccttctcttccagttgattatcgactatctggccgaatttaacagcactcccgcagtatttaccatgatcaccgagcaactgaaaaagacatacttcaacatcctaataaagcctgagacattggccaaagacgttcggttactgattctggaatatgctcgttggtccatgatcgacaaataccaggcgctcatggatggactgtccctcgagagtctcctgtctttcgtgaaggagtttaagtcacagcttttcgtggagggactcgtgcaagggaacgtgacctctacagaatccatggatttcctcaagtacgttgtggacaaattaaacttcaagccgttggaacaggagatgccagttcagttccaggtggtggagctccccagtggacatcatttgtgcaaagtgaaggccctcaataaaggggacgcgaattcggaggtcaccgtttattaccaatccggaacgagaagccttagagaatacaccctgatggagctgctggttatgcatatggaggaaccctgcttcgatttcctgaggaccaagcagactctgggatccgaggtagtcgacaagaaaatcgaggaatttctgagcagttttgaagagaagatcgagaaccttacagaggaggctttcaatactcaagtgacggcgctcataaagctaaaggagtgtgaggatacccacttgggagaagaggtggatcgcaactggaatgaagttgtgacccagcaatatctgttcgacagactcgcccacgagatcgaagccttgaagtcattcagcaagtccgacctggtgaactggttcaaggcccatcgaggcccaggcagcaaaatgctgtctgtacatgttgttggctatggcaagtacgagctggaggaggatggcactccttccagcgaggactctaacagcagctgcgaggtgatgcagctgacatatctccccacctctccactgcttgctgactgcataatccccatcaccgatattcgcgcttttacaactaccttgaaccttctcccataccacaagatcgttaagtag

SEQ ID NO: 232021 - DNA, 3264 bp, synthetic construct
  misc_feature 1..3264: note = Description of Artificial Sequence: Synthetic coding sequence
  source 1..3264: mol_type = other DNA
atggagggtaaaacaggcaacactaccgacgatgaggaggaggaagaagtcgaggaggaggaggaagacgacgatgaggactccggggcagagattgaggacgacgacgaagaagggtttgatgacgaggacgagtttgacgacgaacacgatgatgatctcgacacagaggacaacgagcttgaggaactcgaggagagggccgaagcaaggaagaagaccactgaaaagcaacagctgcagagtctcttcctgctgtggtctaaattgaccgacagactttggttcaaaagcacttatagcaagatgagttccactctattggtggagacacggaacctttacggagtggtgggggcagagtctaggagcgccccagtgcagcacttagctggctggcaggctgaggagcagcagggcgagactgatacagtgctgagcgccgctgctctgtgcgtgggcgtggggagctttgccgacccagacgaccttcctggcctggctcactttctggagcacatggtgttcatgggaagtctgaagtaccccgacgagaatggatttgatgcattcctgaagaagcacgggggaagcgataacgcctcgactgactgcgagcgaaccgtgttccagttcgacgttcagagaaagtattttaaggaggccttggatcgatgggcacaattttttattcatcccctgatgatcagagacgcaatagatcgagaggtagaagccgtagattccgagtaccaattagccaggccaagtgatgctaacagaaaagagatgttgttcggatccctggccagacctgggcaccccatgggtaagtttttctggggaaatgcagaaacactcaaacacgagccccgtaagaataacatcgatacacatgcacggttaagagagttctggatgcgctactattcgtcacactacatgaccctagtggtacagtcgaaggagactctggataccctggagaagtgggtgacagaaattttcagccagattcccaacaacgggctaccaagaccaaatttcggacacctaacagatccattcgacactccggcatttaacaaactttaccgtgtcgttccaatccgtaaaatccatgccctcaccattacatgggctcttcccccacagcagcaacactacagggtgaagcctctgcactacatctcctggttagttggtcacgagggcaaaggtagcatcctatcttttttaaggaaaaaatgttgggcccttgcgctgtttggcggtaatggggaaaccggcttcgaacagaactcaacgtatagtgtgttttccatctcaatcacactcaccgatgagggatatgaacatttttatgaggtggcttacaccgtctttcaatatcttaaaatgttgcagaaactgggacccgagaaacgaatttttgaggagatacgtaaaatcgaagacaatgagttccattaccaggagcagactgatcctgtcgaatatgtggagaacatgtgcgaaaatatgcaactgtacccactccaggatatcctaacaggcgatcagctgttatttgagtacaaaccagaggtcattggagaggcactgaatcagctcgtcccgcagaaggcaaacctggtgttgctttcaggggcaaatgaaggaaaatgtgacctaaaagagaagtggttcggcactcagtactctatcgaggacatcgagaattcttgggccgaactttggaatagcaattttgaactgaatcccgacctgcacctgcctgctgagaataaatacatcgccacagactttaccttgaaagcctttgattgccctgagacagaataccccgtaaagattgtaaatactcctcaggggtgtttgtggtacaaaaaagacaacaaattcaaaattccaaaggcttacattaggttccatcttatcagccctctgattcagaagagtgccgcaaatgttgttctgttcgacatcttcgtgaatatattaactcacaatcttgctgaacctgcctacgaggctgacgtagcccagctggaatataagctagtcgccggagaacacgggctgatcattcgagtcaaaggtttcaaccacaaactcccattactgttccagctcatcatcgactacctggccgagtttaactccacgccagcagtctttactatgataactgaacagctgaaaaagacatacttcaatatcttgattaagcccgagacactcgccaaggatgtgcgcttgctcatcttggagtacgctaggtggtccatgattgataagtatcaggccctgatggacggcctgagcctcgagagtctgttaagctttgtgaaggagttcaagtctcagctttttgttgagggtcttgtccaggggaacgtgaccagtaccgagagcatggactttctgaaatatgtggtggacaaactgaattttaagccactcgagcaggaaatgccagtgcagttccaggtggtcgagctaccctcggggcaccatttgtgcaaagtgaaggccctgaacaagggtgacgccaactccgaggttaccgtgtactaccaatctgggacacggagtctaagagaatatacgttgatggagctgctggtcatgcacatggaggaaccatgctttgactttctgcggactaagcaaaccctgggataccacgtgtatcccacctgcaggaatacatctggtatcttggggttttccgtgactgtcgggacgcaagcaactaagtataacagcgaagtggtggataaaaagatcgaagaattcctttccagttttgaggagaaaatcgaaaacctgactgaggaagcctttaacacccaggttacagccctaattaaattaaaggagtgcgaggacacacatttaggagaggaagtggacaggaattggaacgaagtggtgacccagcaatatctgttcgatcgactggctcacgaaatagaggctctgaagagctttagtaaatcagatctcgtgaactggttcaaagcgcaccggggacctgggtcaaagatgctctctgtgcatgtcgtaggatacgggaagtatgagctggaggaggacggaacaccatccagtgaggattctaatagctcatgtgaggtgatgcagctcacatatctccccacgagccctttgttggccgactgcatcataccaatcacagacatcagggcatttacaacaacattgaatctgctgccttaccacaagatcgtgaagtag

SEQ ID NO: 232022 - DNA, 2244 bp, synthetic construct
  misc_feature 1..2244: note = Description of Artificial Sequence: Synthetic coding sequence
  source 1..2244: mol_type = other DNA
atggagggtaagaccggtaataccaccgatgatgaagaggaagaggaggttgaagaggaggaagaggacgacgatgaggacagcggtgctgaaatagaggacgatgatgaggaagggttcgacgatgaagatgagttcgatgatgagcacgacgatgatcttgatactgaggacaatgagctcgaagagttagaagagagggcggaagccagaaagaaaactacagagaagcagagtgccgcagccttatgcgtgggggtggggagctttgcagaccccgatgacctgcctggcctcgcgcatttcttggagcacatggtgtttatgggatctttgaaatacccggatgagaacggttttgatgcgttcctcaagaaacatggtggatctgataacgctagtacggattgcgaacgcacagttttccagttcgatgtgcaaagaaagtactttaaagaagccctggacaggtgggcacagtttttcatccaccctctgatgattcgggacgccattgacagagaggttgaagccgtagatagcgagtatcagctggctagaccgagcgacgcaaaccgaaaggaaatgttgtttgggtcattggctaggcccggacacccaatggggaaattcttctggggtaatgccgagaccctgaaacacgaacctcgcaaaaacaatatcgatacccacgcgagactccgtgagttttggatgcgatactactctagccattatatgacactggtggttcaaagtaaggagaccttagatactctggaaaagtgggtgacagagattttcagccagattccaaacaatggcctgccacgccctaattttggtcatctgaccgacccttttgatacaccggcttttaacaaactgtacagggtggtccccatcaggaagattcacgccctgaccattacatgggccctgcccccacagcagcagcactatagagtgaagccactccactacatctcttggttggttggccacgagggtaagggttcaatcctttctttccttagaaagaaatgctgggccctggctctgttcgggggtaatggagaaaccggatttgaacaaaattctacgtattcagttttttccattagcataactctgaccgacgagggctacgaacatttttacgaagtggcttacaccgtgtttcaatacctgaaaatgctccagaaattagggcctgagaagagaatatttgaggagattcgcaaaattgaggataatgaattccattaccaggaacagaccgaccctgtggaatatgtggaaaatatgtgtgagaatatgcagttgtaccctctgcaggacatactaaccggtgaccagctgttgtttgaatataaacccgaggtgatcggggaggccctgaaccagttagtgccgcagaaagccaatctcgtgctgctttctggtgcgaacgaaggcaaatgtgatctgaaagagaaatggtttgggacgcagtattcgatcgaagatattgaaaactcttgggccgaattgtggaattcaaatttcgaactcaaccctgacctgcacctgcctgccgaaaataaatatatcgccacagattttaccttgaaagccttcgactgccctgaaaccgaatatcccgtgaagatcgtgaataccccccagggttgcctgtggtataaaaaagacaataaatttaaaattcccaaggcttacatccgttttcacctcatctcccctttgattcagaaatccgctgccaatgtggttctgtttgatatattcgttaacattctcacgcacaaccttgctgagcctgcatacgaggcggatgtggctcagttagagtataaactcgtggctggggaacatggactcattatcagggtgaagggttttaatcacaaactgccactgttgtttcagcttattatagactatttggcagaatttaacagtacccctgcggtgttcacaatgattaccgagcagctgaagaagacctactttaatatcctaattaaacccgaaaccttggcaaaggacgtgcgattgttgatcctggagtacgccagatggtccatgattgacaaatatcaggcactcatggacggtttgagtttggaaagtctcctctcattcgtgaaggaattcaagtcacaattgtttgttgagggcctggtccaaggtaatgtcaccagcacagtactttgtcagtgggctcaggactcggagacttag

SEQ ID NO: 232023 - DNA, 3447 bp, synthetic construct
  misc_feature 1..3447: note = Description of Artificial Sequence: Synthetic coding sequence
  source 1..3447: mol_type = other DNA
atgctccgtagagtcaccgttgctgccgtttgtgctacacgaagaaagctgtgcgaagccggtcgagaactggctgcgctgtggggaatcgagacaaggggcagatgcgaggacagtgccgcagctagaccctttccgattctcgcaatgcccggaaggaataaggcaaagagcacatgctcctgccctgacctacaacctaatggccaggatctcggcgagaactcgcgcgtcgccaggctaggcgctgatgagagcgaagaagagggtcgtaggggaagcctttccaatgctggtgacccggaaatcgtcaagtcacctagtgacccaaagcagtaccgatatataaagctgcagaatggactccaggcccttctcatctcagacttatcaaatatggaagggaagaccggaaacaccaccgatgatgaggaagaagaggaagtggaggaggaagaggaggatgatgatgaggactccggagctgagatcgaggatgacgatgaagagggcttcgacgacgaggacgagttcgatgatgaacacgatgacgacctcgacaccgaggacaatgaactggaggagctagaagagagggcagaggcacggaaaaagaccaccgagaagcaaagtgctgcagccctgtgcgtcggagttgggtcatttgctgaccctgacgacctgccagggttagctcacttccttgaacatatggtgttcatgggttccttaaagtacccagatgagaacggatttgatgcatttctcaaaaagcacggcggaagcgataacgccagcactgattgcgagaggacggtgttccagttcgatgtgcaacggaaatacttcaaggaagccttggatcgctgggcccagttctttattcaccctcttatgattagggacgccatcgatagagaggttgaggcagtggactccgaataccaactggctcgtccatctgatgccaatcgaaaggaaatgctgtttggcagcctcgctcgacccggtcatccaatgggcaagttcttctggggcaacgcggagactttgaagcacgaacctcgaaagaacaacattgatactcacgcaagattacgggagttctggatgagatattatagttctcactacatgaccctggtggtacaaagtaaggagacacttgatactctggaaaagtgggttacagaaatattttctcaaatacctaacaacggcctgcctcgtcctaattttggccacctgacggatccatttgatacacctgcctttaataagttgtaccgggtggtaccaattcgcaagatccatgcactgactataacctgggccctcccacctcagcagcagcactatcgggtgaagcctctgcactacatctcttggcttgttggacatgagggtaaggggtctatactatccttcctacgtaagaagtgctgggcactggccctctttggaggcaacggtgaaaccggcttcgaacagaattcaacatactcagtgttttctatttccatcactctgacagacgaaggctacgagcatttctatgaagtcgcctacacggtcttccagtatcttaagatgctgcaaaaactcggccctgaaaaacggatcttcgaggaaattcggaaaatcgaagacaatgagtttcactaccaggagcagacagatccagtggaatacgtggaaaatatgtgtgagaacatgcagctctatccacttcaggatatcctcacaggagatcagttgttgtttgagtacaagcctgaggtaataggtgaggcactgaaccaactggtgccccagaaggcgaatctagtcctgttgtccggcgcaaatgaggggaagtgtgatctcaaagaaaagtggttcggcacacagtattccattgaagacatcgagaatagctgggcagagctttggaacagcaatttcgagctaaaccccgatctccatctcccggcagagaataaatatattgctacggacttcactttgaaggcgttcgactgtcctgagaccgagtatcctgtgaagatagtcaacacccctcaggggtgcctgtggtataaaaaggataacaagtttaagatccctaaagcttatattcggttccaccttatttcacctctgatacagaagtcagcggctaatgtcgtgctgtttgatatattcgtcaacatcctgacacataatctcgccgaacccgcttatgaggcagacgtggcacaacttgagtacaagctggtagcaggcgaacatgggctcataatccgcgtcaagggctttaatcacaagttgcccctgttattccaactgatcatcgattacctcgccgagttcaattcgactcccgcagtattcacaatgattaccgagcaactgaaaaaaacatacttcaatatcctcatcaaaccagaaaccctggcaaaggacgtgcgactgctcatcttagaatacgctaggtggtccatgatcgataagtaccaggctctaatggatgggctgtcactggaatctcttttgtcctttgtgaaagaatttaaatcccagttgttcgtggagggtttggtgcaagggaatgtaacttctactgaatctatggattttctgaagtacgtggtcgataagctaaatttcaagcctctggaacaagagatgcccgtccagttccaggtggtcgaactgccctccgggcaccatctgtgcaaagtcaaggccctcaacaagggggatgcaaactccgaggtcacagtttattaccagagcggcactaggtctttacgagagtacaccctcatggagctactggtcatgcacatggaggaaccctgctttgattttttgcgcactaagcagacactgggatatcacgtctatcctacttgcaggaacacttcaggtatattgggcttcagcgtgactgtcggcacacaggccacaaaatataatagtgaagttgtcgacaaaaagatcgaggaatttctgtcctcatttgaggagaagattgagaacctcaccgaggaggccttcaacacccaggttactgccctgattaagctcaaggagtgcgaggatacacatttgggagaagaggtggataggaattggaatgaggtggttacacagcagtacctgtttgatagacttgctcatgagatcgaagcgctcaagagtttctccaagagtgacctcgttaactggtttaaagcacatagaggtcccggaagcaagatgctgtccgtgcatgtagttggctacggcaagtatgagctcgaggaagacgggaccccttcctctgaggattctaatagtagttgcgaggtgatgcagctcacatacttgcctacttcccctctcctggctattgtctcttctcctctgctgatttccggcctgtcacagcagcactcgacattctccccaactatcaagtag

SEQ ID NO: 232024 - DNA, 1587 bp, synthetic construct
  misc_feature 1..1587: note = Description of Artificial Sequence: Synthetic coding sequence
  source 1..1587: mol_type = other DNA
atgggagccgcagccagtagacgtagagccctgcgatctgaggccatgtcctcagtagctgctaaggtgcgcgcagcacgggcttttggggagtatctttcccagtcacatcctgaaaacaggaatggggctgaccacctactggcagatgcgtattcaggccatgatgggagcccggaaatgcagcccgctcctcaaaacaaacgccgactgtcattggttagtaatggctgttatgagggaagcctgtccgaggaaccttctatcagaaaacccgcaggcgaagggcctcaaccgagagtctacaccattagtggcgaaccagcccttctacctagtccagaagcagaggccatcgagctggctgtggtcaaagggaggaggcaaagacatccccaccaccactcccagcctctgagagccagcccaggcggttctcgagaggatgtgagccgaccatgccagtcctgggcgggaagccgccagggcagtaaggagtgtcctggctgcgctcaattggctcctggtccaactcctcgggctttcggtctggatcagccacccctcccagagacctcggggagaagaaaaaagcttgaaaggatgtatagcgtggatcgagtgtctgatgatatccccatcaggacttggttcccaaaggagaatttgttttcattccagacagcgacaacaacaatgcaggccgtttttagaggatacgctgaacggaagcgtaggaagcgtgaaaacgacagtgcaagcgtgatccagagaaacttcaggaagcacctcagaatggtgggaagtagacgggtcaaggctcagaccttcgcggagagacgggagcggtccttttctcggagctggtccgaccctacccccatgaaggccgatacttcccatgacagtcgcgattcttctgatctccagtccagccattgtaccctcgacgaggctttcgaggatctagactgggacaccgaaaagggcctggaagcagttgcctgcgacactgaaggctttgtgcctcccaaagtcatgctcatctccagtaaggtgcctaaggccgagtatatccccactatcattcgcagggacgatcctagcattattccaatcttgtacgaccacgagcacgccacattcgaagatatcctggaggaaattgaacgcaaactgaacgtctaccacaagggtgctaagatctggaagatgctcatcttctgccaggggggaccaggccatctttaccttttgaaaaacaaagtggcgacctttgcgaaggtggaaaaagaggaagatatgatccatttctggaaaaggctctcacgcctcatgtctaaggtgaacccggaacccaatgtcattcacataatggggtgttatattctcggtaaccccaatggcgagaagttgtttcagaatttgaggacactgatgaccccgtacagagtgacattcgaaagccccctggaactttctgcgcagggcaaacagatgatagagacttacttcgacttccgattatatcgtttgtggaaatccaggcagcattccaaactcctggattttgacgatgttctttag

SEQ ID NO: 232025 - DNA, 984 bp, synthetic construct
  misc_feature 1..984: note = Description of Artificial Sequence: Synthetic coding sequence
  source 1..984: mol_type = other DNA
atgtacagcgtggaccgagtgtctgacgacatcccaattcgcacttggtttccaaaggagaacctcttctccttccagaccgccacaacaaccatgcaggcagtgtttcggggttatgccgaaaggaagcggagaaagcgggagaacgacagtgccagcgtcattcaaagaaacttccgaaagcatctgagaatggtgggaagcagaagggtgaaagctcaaacatttgcggaacggagagagagatctttttctaggtcctggagtgatcctacccctatgaaggctgataccagccatgattcacgtgactcatcagatctgcagtctagtcattgtactctcgatgaagcctttgaggacctagattgggacactgagaaaggattagaggcagtggcctgtgacacagaggggttcgtcccgcctaaggttatgctcataagctcaaaggtgccaaaagccgagtacatcccaacaatcattcggcgtgatgaccctagcattatcccaatactttatgaccacgaacatgcgacctttgaagatattctcgaggagattgaaaggaaacttaacgtgtaccacaagggggctaagatctggaagatgcttatcttttgccagggcggaccgggtcatctgtatctcttaaaaaataaggtggccacattcgcaaaggtagagaaggaagaagatatgatccatttctggaaacgcttgtcccgtctgatgtcgaaggtgaatccggagccgaatgtgatccatatcatggggtgctacatcctgggcaaccctaacggggagaagctgttccagaatctgagaactcttatgactccctaccgcgtgacctttgagagccccttggagctctccgcccaagggaaacagatgatcgaaacctattttgatttcaggctttacaggctgtggaaaagccggcagcattcaaagttactagattttgatgatgtgctgtag

SEQ ID NO: 232026 - DNA, 438 bp, synthetic construct
  misc_feature 1..438: note = Description of Artificial Sequence: Synthetic coding sequence
  source 1..438: mol_type = other DNA
atggtgggctcccggcgagtgaaggcccagacattcgctgagcgcagggagcgctctttttctaggagctggtctgatcctacacccatgaaggcagatacaagtcacgattctcgcgactcgtctgatttacagtctagtcattgcactctggacgaggcgttcgaggaccttgactgggatactgagaagggtctggaggcagtggcgtgtgacacggaaggatttgtgccacctaaggttatgctgatctcctcgaaggtccccaaggcagaatacatccccactataatccgcagagatgacccaagtattatacccattctgtacgtgtctccagccccaggtctgcctcctacagacgccctattgagaccacatcccggaccagcccctgcccctcaggtcccccgtgttctctggcgttgctggttgtag

SEQ ID NO: 232027 - DNA, 1587 bp, synthetic construct
  misc_feature 1..1587: note = Description of Artificial Sequence: Synthetic coding sequence
  source 1..1587: mol_type = other DNA
atgggggctgccgcatctcgtcgtcgggctctaagatccgaagcgatgagcagtgttgcggcaaaagttcgggcagcccgagcatttggcgagtacctttcccagtcccaccccgagaatcgcaatggggctgatcacctcttagccgacgcttattctgggcacgacggctcccccgaaatgcagcccgcacctcagaacaagcggagactgagcctcgtttccaacggttgttacgaagggagcttaagtgaggagcctagcatcagaaaaccggcaggggagggtcctcagccaagggtgtacaccatctctggggagcctgccctgctccccagtcccgaagctgaagccatagaactcgcagtggtgaaggggaggcggcagagacaccctcatcatcactctcaaccactgcgcgctagtccgggtggctctagggaggacgtatctcggccatgtcagtcctgggcagggagccgccagggatctaaggaatgtccaggctgtgcccagctggctccagggcctacaccccgtgcattcggactggaccaaccgcctcttcctgaaacttccggaaggcgcaagaagctggaaagaatgtactccgttgaccgcgtatctgatgacatcccgattcgcacctggttcccgaaggagaatttgttcagctttcagacagcaaccacaacaatgcaagcagtattccggggatacgcggaacggaagcggagaaaacgcgagaatgatagcgcgagcgtcattcaaaggaactttagaaagcacctacgtatggtgggctcacggagagtgaaggcccagaccttcgccgaaagacgcgagagaagtttctctagaagttggtctgaccctacgcctatgaaggctgatacaagccacgacagtagagactcgtctgatctgcaatccagccactgtactctcgatgaggcctttgaggatttggactgggatacagagaaaggcctggaggcagtggcttgcgacactgaaggcttcgttcccccaaaggtcatgctgatctccagtaaagtccctaaggctgagtatatccccactataatccgtagggacgaccctagtatcattcctatactgtatgatcatgaacacgctacattcgaagatatccttgaggagatcgagcgcaagctgaatgtttaccataagggtgcgaaaatttggaaaatgttgatattttgccaaggcggacccggacatctgtacctcctgaagaataaggtggccactttcgccaaggtggagaaggaagaagacatgatccacttttggaaaagactgtctaggctgatgtccaaggtgaacccagagcctaatgtcatacacatcatgggctgctacattttgggtaacccaaacggggagaaactctttcagaatcttaggaccctcatgactccatatcgcgttacatttgagtcacccctcgagctgtctgctcaggggaagcagatgatcgagacgtacttcgactttcggctctaccgtctatggaagagccggcagcactctaagttgcttgattttgacgacgtcctttag

SEQ ID NO: 232028 - DNA, 1503 bp, synthetic construct
  misc_feature 1..1503: note = Description of Artificial Sequence: Synthetic coding sequence
  source 1..1503: mol_type = other DNA
atgggcgctgcagcaagtaggcgcagagccttgagatccgaagccatgtcttccgtagccgctaaggtacgcgctgcacgggctttcggggaatacctcagccaatcacatccagagaatcgaaatggagcagaccatctgctggcagacgcctacagtggacatgacggatctccagagatgcaaccggcacctcagaacaagcgtagactctccctggtttctaacgggtgttacgagggtagtttatccgaagagcctagcatccgcaagccggctggtgaggggccacagcctcgagtgtataccatcagcggtgagcctgccctattgccatcccctgaggcagaagctatcgaactggctgtggttaaaggccgtcgtcaacgtcacccgcatcatcatagccagcccctgcgggctagccccggtggaagcagagaagacgtctcacgtccctgtcaatcttgggctgggtcccgtcagggatcaaaagagtgtccaggatgtgctcagctggccccagggcctaccccgagagcttttggcctcgaccagccaccactccccgagactagtggcagaagaaagaaactggaaaggatgtatagcgtcgacagagtctctgatgacatacccattcgaacatggtttcccaaggagaatttgttctccttccagactgcaacaacgacgatgcaggccatttctgtatttagggggtacgcagagcgtaaaaggcgaaagagagagaacgatagtgcttctgtaatacaacggaatttccggaaacacctgaggatggtgggcagtcgcagggtgaaggctcaaagctctgacctgcagtcctcgcattgtacccttgatgaggcattcgaggatctggactgggacacagagaaggggctcgaggccgtcgcatgcgacaccgagggctttgtgccgcctaaggtgatgctcatctcttcaaaggtaccaaaggcagagtacatccctaccattatcaggagagatgatccctccattatcccgatactctatgatcacgagcacgcaaccttcgaggacattctcgaggaaattgaaagaaagttaaacgtgtaccacaagggagccaagatttggaaaatgttgatattctgtcagggaggacccggacatctctatctgttgaagaataaagtggccacctttgctaaggtagagaaagaggaggacatgatacatttctggaagaggttatctcgccttatgtccaaggttaaccctgaacccaacgtgattcatatcatgggctgttacattttgggaaatcccaacggagagaaattgttccagaatctgcgtacgctgatgactccctatcgcgtgaccttcgaatcccccctcgagctcagcgcacagggaaagcagatgattgagacgtactttgacttcagactgtaccggctgtggaaatcccgccaacactccaaactgctcgatttcgatgatgtgctctag

SEQ ID NO: 232029 - DNA, 1518 bp, synthetic construct
  misc_feature 1..1518: note = Description of Artificial Sequence: Synthetic coding sequence
  source 1..1518: mol_type = other DNA
atgggagccgctgcaagtagaagacgggctctcaggtcagaagcgatgtcaagtgtggcagccaaggtgagggctgctagagcttttggggaatacctctcccagagccaccctgagaataggaatggcgctgaccatctgctggcggatgcttactctggccacgacgggagccccgagatgcagcccgcaccgcaaaataagcgcagactgagtttggtcagtaatggatgctacgaaggaagcctctctgaagaacccagtattcgcaagccagccggtgaaggcccacaacccagggtctataccattagtggcgaacctgccctcctcccgagcccagaggccgaagcgatagagctcgcagtggtgaaaggcagacgacaacgacaccctcatcatcattcacagccactgagggccagtcctgggggatcacgggaagacgtgagccgcccatgccagagctgggctggctccaggcagggcagcaaggagtgtcccggttgtgcccagctcgcacctggaccaactccccgtgctttcggactggatcaacctcccttaccagagaccagcggacgtagaaagaagctggagcgtatgtacagcgtggatcgcgtgtctgacgacatccctatacgaacatggttcccaaaggagaaccttttctcgtttcaaacagcaacgactaccatgcaggccaattttcggaaacacttgcgtatggtcgggtctaggcgggtgaaagcccagacctttgctgaacgacgggaacggagtttcagccgctcctggagcgacccaacccccatgaaagcggacaccagccacgatagccgtgatagcagtgacctgcagagctcccactgcactctggatgaagccttcgaagatctggactgggatacagagaaaggattagaggcagtggcttgcgacacggaaggattcgtaccgcctaaagtcatgctgatctcctctaaggtcccgaaggccgagtacattccaacaattatcaggagggatgatccctccatcattccaattctgtacgaccatgaacacgctactttcgaggacatcctggaggaaattgaacgtaaacttaacgtgtaccacaagggggctaaaatatggaagatgctcatcttctgtcagggtggacccggtcacctgtacctcctgaaaaataaggtagcaacctttgccaaggtggaaaaggaggaggacatgattcacttctggaagcggctctcccgtctaatgtctaaggtgaacccggagccaaacgtaatacatatcatgggctgctacattctagggaatccaaatggcgaaaaacttttccagaacttaagaactttgatgacaccctatcgtgtgaccttcgagagtccactggagctgtcagcgcagggtaagcagatgattgaaacatatttcgacttccgcctgtacagactgtggaagtctaggcagcactcgaagctcctggactttgacgacgttctgtag

SEQ ID NO: 232030 - DNA, 1593 bp, synthetic construct
  misc_feature 1..1593: note = Description of Artificial Sequence: Synthetic coding sequence
  source 1..1593: mol_type = other DNA
atgggcgctgccgcttcacgcagacgtgcactccgcagtgaggccatgagctctgtcgctgcaaaagtacgggctgcccgtgcatttggggagtatttgtcacagagccacccggagaataggaacggggctgatcacctacttgccgacgcttattcggggcatgacggctcccccgagatgcagcccgctccacagaacaagcgtcgcctgtcccttgtgtctaacggctgctatgagggcagtctctctgaagaacctagtatcaggaaacccgcaggggagggcccacagcccagagtatacacgatttcgggggagccagccttactcccatctccggaggcagaggctattgagctggcggtcgtaaagggcagaaggcaacgccacccacatcaccactcacagccattgcgggcaagtcctggtggctcacgtgaggacgttagccgtccctgccagtcttgggcagggagcagacagggaagcaaggagtgtcccggatgcgcccagctggctccgggacccactcctagagcttttggcctggatcaaccccctctgcctgaaacttccggacggaggaagaaattggaacggatgtactctgttgaccgcgtgtcggatgatatccctatccgtacctggttcccgaaagaaaacttgttctcattccagaccgcgacaacaacaatgcaagctattagcgttttccgtggttatgccgaacgaaagcgccgtaagcgcgagaacgactccgccagtgtcatccagcgcaatttccggaagcatctcagaatggtgggatctaggagagtgaaggcccagacgtttgcagagagaagagaaaggtccttttcccgatcatggtctgatccgactccgatgaaagcggatacttcacacgactcacgtgactcatctgatttgcagtcgtcgcattgcacgctagatgaggcctttgaggacctggactgggacacagaaaaaggcctggaagctgtggcatgcgacactgagggatttgtccctccaaaggttatgctgatctcttcgaaggtgcccaaggcggagtacattccaactattatccggcgagacgacccctctattatcccgattctctatgatcacgagcacgctacattcgaggacatcctcgaggagatcgagcgcaagcttaacgtgtatcacaaaggagccaagatatggaagatgcttatattttgtcagggcggaccaggccatctctacctgctcaaaaacaaagtcgctacctttgctaaagtcgaaaaggaggaagacatgatacatttctggaaacgactctcccgcttaatgagcaaggtgaacccagagcctaatgtgatccacattatgggctgctatatcctagggaatcccaatggggaaaagctatttcaaaacctgaggactcttatgactccatatagagtgacttttgaaagtccgctggagttgagtgcccagggtaaacagatgatcgaaacctatttcgatttccgtctgtatagactctggaagagccgacagcacagcaagctacttgatttcgacgatgtgctgtag

SEQ ID NO: 232031 - DNA, 585 bp, synthetic construct
  misc_feature 1..585: note = Description of Artificial Sequence: Synthetic coding sequence
  source 1..585: mol_type = other DNA
atgggactcggtcccctgagtagctcgttgtcaccccagctaatcagttccaaggtgcccaaagcagaatacattccaacgataatcagaagggatgatccctcaatcattcccatactgtacgaccacgaacacgcaaccttcgaggacatcctggaggagatcgagcgaaaactgaatgtgtaccataaaggtgctaagatatggaagatgctgattttttgtcagggcggaccaggccatctgtatttactgaagaacaaggtggccacgtttgctaaagtggaaaaagaagaagatatgatacatttctggaagcgcctgtcacgcttgatgagtaaggtcaatcctgagcctaatgtgatccatataatggggtgttatatcctgggaaaccccaatggggaaaaactttttcagaatttaagaacactgatgaccccttatagggtcacattcgaaagtcctctcgaactttcggcacagggcaagcagatgatcgagacctactttgatttcagactttataggctgtggaagtcacgccagcattcgaagttgctggactttgacgatgtgctgtag

SEQ ID NO: 232032 - DNA, 1524 bp, synthetic construct
  misc_feature 1..1524: note = Description of Artificial Sequence: Synthetic coding sequence
  source 1..1524: mol_type = other DNA
atgggagcagcagccagccggcgtcgagcactgagaagtgaggctatgagctctgtcgccgcaaaggtgagggctgcacgtgcattcggtgagtacctgtcccaaagccatcctgaaaatagaaacggtgccgatcacttgctggctgacgcctatagtgggcatgatggctcccctgagatgcagcctgcaccccagaacaagcgcagactgtcactggtgtctaatgggtgctacgaaggctccctctctgaggagccttccattcggaaaccagcaggcgaaggaccacagccgagagtgtataccatttcaggggaacccgctttgttgccaagcccggaggccgaagccattgaactggctgtcgtcaagggaaggcgccaacggcatccacaccatcattcccagccacttcgcgcaagcccagggggtagccgggaagatgtatcacggccatgtcagagctgggcgggatcaagacaagggtctaaagaatgtcccggatgcgctcagctggctcctggacccacccctcgggctttcgggctcgaccagcctccattaccagagacttccggcaggagaaaaaaactggaacgcatgtactccgtcgatcgcgtgagtgacgacatccccattcgaacatggtttccgaaggaaaatttgttttccttccagacagccactaccaccatgcaggccgtggggaattttagaaaacatctcagaatggttggcagtaggcgggtcaaggctcaaaccttcgccgagcgccgtgagcggtcattctcgcgaagctggagcgatccaacccccatgaaggcagatacaagccacgattctcgagattcttccgatctgcagtcctcccactgcacactggatgaggcctttgaagatctggattgggatactgagaaaggtctggaagccgtggcatgtgacaccgaaggctttgtgccaccaaaggttatgcttattagttcaaaagtgcccaaagccgagtacatacccacaattatccggagagacgatcctagcatcattccaattctttacgaccacgagcacgccacattcgaggatatacttgaggaaatagaacggaaactcaatgtttaccacaagggagccaaaatctggaagatgttaatcttttgccagggtggtcccggacatctgtatctgttgaaaaacaaggtagcgacattcgcgaaagtcgaaaaagaagaggacatgatccatttctggaagcggctgtcaagactgatgagcaaggttaacccagagcccaacgttatccacatcatggggtgttacatcctaggcaaccccaacggcgaaaagctctttcaaaacttgcgcacactgatgaccccttatcgcgttacattcgagtctccgttggagctcagcgcacaaggtaaacagatgatcgagacttattttgacttccggctgtacagactctggaagtctaggcagcattctaagctgctcgacttcgacgacgtgctgtag

SEQ ID NO: 232033 - DNA, 1524 bp, synthetic construct
  misc_feature 1..1524: note = Description of Artificial Sequence: Synthetic coding sequence
  source 1..1524: mol_type = other DNA
atgggcgcagccgctagccgaagaagagccctgcgcagtgaagccatgagctcagtggccgctaaggtccgggcagccagagccttcggggagtatttgagtcagtcccaccctgaaaaccgcaatggtgcagaccatctcctggccgacgcctactctggtcatgacgggtccccagaaatgcagccagccccacagaataagcgacgcctgagtctggtttcaaatggatgctatgagggcagcctgagtgaggagccatccattcgcaagcccgctggtgaggggcctcaaccaagagtgtacactatctccggcgaacctgctttacttccatcccctgaggcggaggcaatcgagctggccgtggtgaaagggcgaaggcagcgtcacccccaccaccacagtcagcccctccgggcatctcctggcggaagccgggaagacgtttcccggccatgtcagagctgggctgggtcacgccagggcagtaaggaatgtccaggctgcgcgcagctggcccctggacccacccctagagcctttggacttgatcagccgcctctgccagagacatccgggaggagaaaaaagctggagaggatgtactctgtggacagagtttctgacgatattccaatccgcacgtggtttccgaaagaaaatctgtttagtttccagacagctacaaccaccatgcaggcgattagcaacttcaggaaacatctgcgtatggttggctcccggagggttaaggctcagacttttgctgaaaggagggagcgcagcttttctcgatcttggtcagaccctaccccgatgaaggcggacaccagccacgactcacgcgatagctctgaccttcagagttcacattgtaccttggacgaggcatttgaggacctggactgggatacagagaaaggtcttgaggctgtggcctgcgatacagaaggcttcgtacctcccaaagttatgctcattagctctaaggtccccaaagctgaatacataccaacaatcattcggagggacgatcctagtataatcccgattttgtacgaccatgagcatgccacctttgaggacatactggaggagatcgagcgcaaactcaacgtgtaccacaagggagcaaaaatctggaagatgttgatcttttgccaaggtggtccagggcacctttacctgttaaagaacaaggtggctacatttgctaaggtcgaaaaggaggaggatatgatacacttctggaaacgcctgagcaggctgatgagtaaagtaaatccggaaccaaatgtgattcacattatgggttgttatatcttagggaatcctaatggcgaaaagctgttccagaacctgaggaccttaatgacgccataccgagtcactttcgagtcccccctggagctcagtgcccaagggaaacaaatgatcgaaacgtatttcgattttaggttgtacagactttggaagagccgtcagcatagcaagctgcttgacttcgacgacgttctgtag

SEQ ID NO: 232034 - DNA, 984 bp, synthetic construct
  misc_feature 1..984: note = Description of Artificial Sequence: Synthetic coding sequence
  source 1..984: mol_type = other DNA
atgcagttgggacggaggcttgacccagagcgccaggcactccacttgtgtagcggcgtagaaggcgaaccatggaaggcagttgccggacgggctttgggcggtatctgtctgtgggtcgggggaggagcacggtctcagggggaacactggcttcccacacctaagggtaatttccggaaacatttgaggatggtgggtagcagacgcgtcaaggcgcagaccttcgctgagagaagagaaagaagtttcagtcgatcttggagcgatcctacaccaatgaaggcagacacgtcacacgactcacgcgactccagtgacctgcagagctcgcattgtaccctggacgaagcctttgaggatttggattgggacacagaaaagggcctggaagccgtcgcctgcgacacggagggcttcgtcccaccaaaggttatgcttatcagtagcaaggtgcctaaggccgagtacattcctacaattatccgcagagatgacccctccatcatacccatcctgtacgatcacgagcacgctacctttgaggacattttggaagaaatagaacgaaaactgaatgtttaccataagggtgctaagatttggaagatgctgattttctgccagggaggcccagggcacctctatctgctcaaaaacaaagttgctacctttgctaaagtggaaaaggaagaggatatgatccacttttggaagcggctatctcggctcatgtcaaaggtgaaccctgaacccaacgtcatccatatcatgggatgctatatcctggggaacccaaacggagaaaagcttttccagaatctgaggacgctgatgacaccttatcgggtgacatttgagagtcccctcgagttgtccgcccaggggaagcagatgatcgaaacgtatttcgatttccgcctgtacagactgtggaagtctcgacaacactccaagctgttggacttcgatgacgtgttgtag

SEQ ID NO: 232035 - DNA, 648 bp, synthetic construct
  misc_feature 1..648: note = Description of Artificial Sequence: Synthetic coding sequence
  source 1..648: mol_type = other DNA
atgccaggggaggccactgagactgtgcctgctaccgaacaggaactcccccagcctcaggctgagaccggctctggcacggagagcgatagcgatgagtcagtgcctgaattggaagagcaggacagcactcaggctactacacaacaagcccagctggctgccgcagctgagatcgacgaggagccggtttccaaagccaaacagtcccgatcagaaaagaaggcaagaaaggccatgtctaaattgggactgagacaagtgactggcgtgacacgcgtgactattaggaaaagtaagaatattctgttcgttatcacaaagcctgatgtatataaaagccccgcaagcgacacctacatcgtgtttggagaggcaaaaatcgaggatctgtctcagcaagcgcagctcgccgctgcggagaagtttaaggttcaaggagaagcggtgtcgaatattcaggagaacacccagactcccactgtacaagaagagtctgaagaagaggaggtggacgagactggagtagaggttaaggatatagagctggtaatgtcgcaagccaatgtctctagagctaaggccgtgcgtgcgctcaagaacaatagcaatgatatcgtgaatgcaatcatggaactgaccatgtag

SEQ ID NO: 232036 - DNA, 648 bp, synthetic construct
  misc_feature 1..648: note = Description of Artificial Sequence: Synthetic coding sequence
  source 1..648: mol_type = other DNA
atgcctggcgaagccacagagactgtgcccgctaccgagcaggaacttcctcaaccgcaggccgaaaccgggtcagggacagaaagcgacagcgatgagagcgtgccagaactagaggaacaagatagcacgcaagccacaacgcaacaggcacagctggctgccgctgctgagatcgacgaagaacctgtgtcaaaggctaaacaaagtcgctctgagaaaaaagcacgcaaggctatgagcaagcttggactgaggcaggtgactggggttactcgcgtgacgattcggaaaagcaagaatattctattcgtgataaccaagcctgatgtctataagagtcctgccagtgatacttatatagtattcggggaggccaaaatcgaagaccttagtcagcaggcccagctggccgctgctgagaagtttaaggtccaaggtgaggccgtgtctaacatccaagaaaacacccagaccccgactgtccaggaggagtcagaagaagaggaggtcgatgaaacgggtgtggaagtcaaggacatcgaactggtgatgtctcaggctaatgtgtcaagggctaaagccgtcagagctctgaagaataattccaacgacattgtgaatgcgattatggagctaactatgtag

SEQ ID NO: 232037 - DNA, 6236 bp, synthetic construct
  misc_feature 1..6236: note = Description of Artificial Sequence: Synthetic coding sequence
  source 1..6236: mol_type = other DNA
atgccaggcgaggccactgaaacggtgcctgccacagaacaggagctcccccaaccccaggcggagacagctgtgcttccgatgagctccgctctctctgttactgccgcattgggacaacctgggcctaccctgcccccaccatgcagccccgctccccagcagtgtcccctcagtgcggcaaatcaagcgagcccattcccttcccctagtaccatcgcctccacgcccctagaggtaccgttcccccagtcttcctctggaaccgcattacccctcggcactgcaccagaggcaccaaccttcttgccaaacctgattggcccacccatcagccccgcagccctcgctttagcaagcccgatgatcgcacccacacttaagggaacccctagttcatcagccccactggctttggtcgcattagcgcctcatagcgtccagaagagcagtgcctttccacctaaccttttaacctcccccccttccgtcgcagtcgccgagagtggctctgttattacactctccgcccctattgcaccctccgagcctaaaacaaatctgaataaggtgccctctgaggtggtccctaacccgaagggcactccttcccctccctgcattgtcagtacggtcccctatcactgtgttacgcctatggcaagtattcagagcggcgtcgcatcactcccgcagacaacgccaactactaccttagctatcgcctcccctcaggtgaaggatacaaccatctcctccgtactaattagcccgcagaatccaggttcgctttcgttgaaaggaccggtgagcccgccagcggctctgagcctcagcacacaatctctccctgttgttactagctctcaaaaaacggccggaccaaatacaccacccgatttcccaatctcccttggcagccatttggctcctcttcaccagagtagtttcggctcagtgcagctgcttggccagaccggtccatccgctctaagcgaccccactgtcaagaccatctcagtggaccactcatctacaggggctagctacccatcccaaagatcagttatccccccactgccctcccgcaatgaggtggtgcccgctaccgttgccgcttttccagtggtcgccccttcagtggataagggtccttctacaatcagctcaatcacctgcagcccttcaggaagtttaaatgtcgccacatccttcagcctcagccctacaacatcacttatcttgaagtctagtcccaatgccacctatcattatccactggtggcccagatgcccgtatcatcagtcggaactacgcctctcgtggtcactaacccctgtactatagccgctgccccaaccacaacgttcgaagtggccacctgcgtcagtcctcctatgagctctggccctatctctaatattgagccaacaagtccggcagctttggtaatggctccagtggcaccaaaggagccgagtactcaggtagccactactctgcgcattcctgtctcgcccccactaccagacccggaagacctgaagaacctgccatcgtccgtcttagtgaaattccccacacaaaaggacctgcagactgtacccgcttctctggagggcgctccattcagcccagcccaggccggtttaacaactaagaaggacccaaccgtgctgcctctggtacaggccgcacctaagaattctccctcgttccagagcacaagctcatcacctgagatccccctgagcccagaagccacactggcaaagaagagtttgggagagcccctgccaattggcaaacccgcatctagcatgaccagtcctctgggcgttaactcttcagcatctgtcatcaagactgacagctacgccggtcccgacagtgcaggaccactcctgaagtcttctctgatcactccgactgtggctgcttttccgctcgaaagtgcggaccctgctggggtcgcccctactacagctaaaggcactagcacatatacaacaaccgctagtccctttctggaagggactgtgagcctggccccaaagaaccaccccgtcaaagagggaacattgaccacactcccactggtccccaccgcctcggaaaattgtccagttgctccttcacctcagaatacatgtgctcccctagccacattggtgctggccccagagattcccaagtctgtcccttcaccttctttgccacccgctggtacccctcccggtaccaagaaagtggatggaatctctcacacaagtgccttagcgccagtggcgtcatcacctaaagaatgcccaacagaggatagtggagcttctgccacagccagtagcaagggcaccctcacgtacctagcagactctccgtctccgctgggggtgagcgtctcccctcagacaaaaaggccacccactaaaaaggggtccgcgggacctgacactcctattggaaatctgagctcccctgtctcccccgttgaggcttcgttccttcctgagaacagcttgtctttccagggatctaaggatagcccagcgacaacgcattcgcctacgcctccatcccccaaaggggcacctacaccctctgcagtaactcccttgtcgccaaagggtgtgacactcccccctaaagaaactccgaccccatccgttgtgaacctcccctttcctaaagaaggcccagccacccctgccccaaagcaggccccagctctcagtatgacaagttcatctccgaaaaaggccagagcaacacccgcacccaagggtatcccagcatctccatccccaaagggcgctcccacgccacccgctgctactcccccaagcccaaaagggggtccggctacaccctcccctaagtgggcacctactcccccagcagctacccctccatcccctaaaggcggtccagccacaccgagccccaaaggggctcctacaccccctgccgctaccccgccatctccaaagggaggcccagctacccctagtccgaagggggcaccaacccctcctgcagtgactcccccttctcccaagggcagccctgcggcaaccccattccccaagggcgctagtacgccccctgcagcaacacctcccagccctaaaggctccccagccgctacgccgttacctaagggcgcacctaccactcctgccgctaccctgccttcccctaaggggggacctgccacaccttcactgaaaggggctccgactcctccagccgctacaccaccatccccgaagggaggaccagcgacaccaagcccgaagggggctcccatgcctccagccgcaacccccccatccccaaaagggggattggctacccctcctcacaagggcgctccaactaccccagctgccaccccacccagcccgaagggaggactcgccaccccccctccaaaaggagccccaacgaccccagctgccacaccaccgtcacccaagggtggactggccacaccgccaccgaagggcgctcctacaacaccagctgccaccccccctagccctaaaggcggtctcgcaaccccctctccaaaaggagcacccacaacgccagcggcaactcctccttccccaaagggcggtttagccaccccaagccccaaaggtgcaccaactacaccggctgctacgcctccgagccccaagggagggctggcaactccttctcccaaaggtgcacctacgacccccgcagctacaccccctagcccaaagggcggacctgcaaccccacccccaaaaggcgctcctacgccacctgccgctacacccccttcactgaaggggggtctggcgaccccaccacataaaggagctcctaatccagctgtggtcacaccccctagccctaaaggagggcctgccacctcaccaccaaagggcgcacctactccccctgccgcaacaccccctagcccaaaggggtccccagggacacctccacccaaaggggctcctaccccacccgctgtgacaccgccatctccgaaaggcactcctacattgccagccacgacgccttcctccaaggggggtccaacgacaccgagctcaaaggagggccctaccccacccgcagcaactccttctcataagggagggccagctatgacaccaccctccccaaagcggggtccagccatcccatcccctaagggagacccgactagccccgcagtgatacctctctcccccaagaaagctccagccaccccagtcacccgtgagggggctgccacccccagcaagggtgacttgacacctcctgctgtcacgcccgtcagcttgaagaaagctcctgcaactagcgctcccaagggcggaccagccaccccctcctcaaagggggatcccacactacctgcggtgactccccctagccctaaggaaccacctgctccgaaacaggtggctacaagcagctcacccaagaaggctcctgccacccctgcaccaatgggagctccaacactgcctgccgttattcctagctctcctaaagaggtgcccgctaccccaagcagtcgtagggatcccattgcacctaccgccacactactgagcaagaaaacccccgctaccctggctcccaaagaagccctcatcccacccgctatgaccgtcccctctcccaagaagacccccgcaattcccactccaaaggaggccccagcgactccatcctcaaaagaagcctcaagcccaccagcagtgaccccaagcacatacaaaggcgctccttctccgaaggagttgttgatcccccctgctgtgaccagtccatctcccaaagaggcaccaacgccccctgcggtgacgcctccgtctcctgagaaaggcccagctacacccgcaccaaaaggtacgccaacatcacccccagtcacgccctcatctctgaaggatagtcccacaagccccgcatctgtcacgtgcaagatgggggcaactgtgccacaagcaagtaagggactgccagcaaagaagggcccaacagccctgaaggaagtactggtcgctcctgcaccggagagtactcctattatcactgcacccacccggaagggcccacaaaccaagaagtcgagcgctactagccccccaatatgtccggatccgtccgcaaaaaacggctctaagggaccacttagcacagtagctcctgcccctctcttgccagtacaaaaggactcaagcaagacagccaagggcaaggacgccagccattcgcccaaaggccctctggcgccaccagagagcaaagccagtacccccctcactgccgctgcttttgagaaggtgctccctaagcccgaatccgcttcagtaagcgcagcccctagcccacctgtgtccctccctcttgccccttcccctgttcctacccttcctccaaaacagcagtttctcccctcatctcccggattggtcctggaatcaccgtctaagccactggctccagcagatgaggatgagctactaccattaattccacctgagcctatctctgggggagtccccttccagtctgtgctggtcaatatgcccacccctaaatcagcgggtataccagtacccactccatccgctaagcagcctgtaactaagaataacaagggctcgggaacagaatctgatagcgacgaatcagtgcccgagcttgaggaacaggatagtactcaggcaactacccagcaggcccagttagccgcagctgctgagattgacgaagaacctgtatccaaggcaaaacaatccagatccgaaaagaaggcccgtaaagccatgtctaagctgggattgaggcaggtcacaggcgtgacaagagtaactatacgtaagagcaaaaacatcctcttcgttattacgaaacctgacgtctacaaatcccccgctagtgatacttatatcgtgttcggcgaggccaagatagaagaccttagtcaacaggcccagctcgcagcagcagagaagttcaaagtgcagggcgaggccgtttcgaatatccaagaaaacacccagactcccacagtccaggaggaatcagaagaagaggaagtggatgagaccggtgttgaagttaaggatattgagttggtgatgtcccaagctaacgtgtcaagagccaaggccgtgcgggctcttaagaacaactccaatgatatcgttaatgccatcatggaattaaccatgta

SEQ ID NO: 232038 - DNA, 648 bp, synthetic construct
  misc_feature 1..648: note = Description of Artificial Sequence: Synthetic coding sequence
  source 1..648: mol_type = other DNA
atgccaggcgaagctactgagaccgttcctgctactgaacaagaactgccacaacctcaagctgagaccggctcaggtacagaatctgattctgacgaatcggtgcctgagctggaggaacaggattccactcaggccacgacccaacaggcccagctggcagcagccgctgaaatcgacgaagaacccgtaagcaaggcaaagcaatcccggtcagagaagaaggccaggaaagcgatgagtaaacttggcctgcggcaggtaaccggggttactagagtaaccatcaggaagtcgaaaaacattctgttcgtgatcaccaaacctgacgtgtataagagcccagcttcagacacgtacattgtcttcggggaagccaaaatcgaagatctgtcccagcaggcacagctggctgcggcagagaaattcaaggtgcagggagaggccgtcagtaacattcaagagaacactcaaaccccaaccgttcaggaggaatcagaggaggaagaggtggacgagaccggggttgaagtgaaagacatcgagctggtgatgtcacaagccaatgtgagtcgagccaaggctgtgcgggctctgaagaacaattccaacgacatcgtcaatgccataatggagttgactatgtag

SEQ ID NO: 232039 - DNA, 21 bp, synthetic construct
  misc_feature 1..21: note = Description of Artificial Sequence: Synthetic coding sequence
  source 1..21: mol_type = other DNA
atgcctggggaagccacgtag

SEQ ID NO: 232040 - DNA, 597 bp, synthetic construct
  misc_feature 1..597: note = Description of Artificial Sequence: Synthetic coding sequence
  source 1..597: mol_type = other DNA
atgcccggagaggcgactgagacagtgccagccacggaacaggaactgccgcagcctcaggccgaaacaggatccggaactgaaagcgattccgatgaaagtgtgcctgagttggaagagcaggacagcacacaggcgacgacccagcaggcccagttggccgctgccgctgagatagatgaggaacctgtgtctaaagctaagcaaagtcgttcggagaaaaaggctagaaaagctatgagtaagctgggtctcaggcaagttaccggggttactagggtcacgattagaaagagcaaaaacatactgttcgtgattaccaaaccggacgtgtacaaatctccggcatctgacacttacatcgtgttcggagaggcaaaaattgaagacctatcccaacaggcccagctcgcggctgctgaaaagttcaaggtgcagggagaagccgtgagtaacattcaggaaaacactcagacccccaccgtgcaagaggagagcgaggaagaagaggttgatgagacaggtgtcgaagtgaaagatattgagttagtgatgagtcaggccaacgtaagcagggcgaaggccgtccgagcctag

SEQ ID NO: 232041 - DNA, 381 bp, synthetic construct
  misc_feature 1..381: note = Description of Artificial Sequence: Synthetic coding sequence
  source 1..381: mol_type = other DNA
atgcctggtgaagctacggaaaccgtgccagcaacagagcaggagttgccacagcctcaagccgaaaccggcagcggtacagagagcgattcggatgagtccgtccccgagctggaagagcaggattccacacaggcgacaacccagcaggcccagttagctgccgcagctgaaatcgacgaagagcctgtctccaaagctaaacagtctcgtagtgagaagaaggcccgtaaagcaatgagcaagttggggctgaggcaagtgacaggtgtgacacgggtcactatccgaaagagtaagaacatcttatttgtaattacaaagccagatgtgtataagtctccagcctctgatacatatatagtattcggggaagcctag

SEQ ID NO: 232042 - DNA, 648 bp, synthetic construct
  misc_feature 1..648: note = Description of Artificial Sequence: Synthetic coding sequence
  source 1..648: mol_type = other DNA
atgcccggagaggccaccgaaaccgttcccgctaccgagcaggaactgccccaacctcaagcggagactgggagcgggacagaatctgattctgatgagagcgtgcctgagctcgaggaacaggatagcacacaggccacaactcagcaggctcaattagccgcagcagcagagattgatgaggagcctgtgtcaaaggccaaacaaagccgttcagagaagaaagcacgcaaggcaatgtctaaactgggcctcaggcaggtgaccggtgtcacccgggtgactatacgtaaaagtaaaaacattctgtttgtgataactaaacccgacgtgtataagtcccctgcatccgacacttatatagtgttcggcgaggctaaaattgaggatctgagtcagcaagcccagctcgcagctgccgaaaagttcaaggtacagggtgaggccgtatcgaacatccaggaaaacacccaaacccctacagtccaggaagagtctgaggaggaggaagtggacgaaaccggcgtggaagtgaaagatattgaacttgtgatgagtcaggcaaacgtgtcaagggcaaaggccgtccgagccttgaaaaataactctaatgacattgtcaatgctatcatggaactgacaatgtag

SEQ ID NO: 232043 - DNA, 2778 bp, synthetic construct
  misc_feature 1..2778: note = Description of Artificial Sequence: Synthetic coding sequence
  source 1..2778: mol_type = other DNA
atgcccggagaggccactgagaccgtcccagcaactgagcaggaactgccgcaacctcaggccgagactgcagtgctccccatgagcagtgctcttagcgtcacagcagccctcggccagcctggaccaactctacctcctccatgttcacccgctccccaacagtgccctttgtccgcagccaaccaggcctcacctttcccgtcacctagcacaattgctagcaccccgctcgaggtgcccttcccacagagctcttccgggacagctttacctttggggacggcgcctgaagctcctacgttcctacctaatttgataggccctccgattagcccagcagccctcgccctcgcttcacccatgattgccccaaccctaaaaggaaccccctcctccagtgcgcctctggctctggtggccctggcacctcattccgtgcagaagtcctcagcttttcctcccaatcttctaacctccccccctagtgtggccgttgctgagtcagggagcgtcattacactcagtgcccctatcgcacctagcgaaccaaaaacgaatttaaataaggtgccctccgaggtcgtaccaaatccaaaaggtactccaagccctccgtgcatcgtgtccacagtgccctaccattgcgtgaccccaatggcttctattcagtccggggtcgctagcctgccccagacaacaccaacgacaacacttgcgattgccagtcctcaagtgaaggatacgaccatatcaagcgtcctgataagcccccagaatcccggtagcctgagtcttaaggggccagtctcaccccctgctgccctcagcctcagcactcagagccttcctgtggtgaccagcagccagaagaccgctgggcctaacacacccccagatttccctattagcctcggcagccatctagcccctcttcaccagagttcttttgggagcgtgcagctcctcggtcagaccggtccatccgctctctcagatcctacagtcaagacaatcagcgtcgaccattctagcacaggcgcttcctaccccagtcagcgcagcgtcatcccccctctgccttctcgaaatgaggttgtaccagccaccgtggcagccttcccagttgtggctcctagtgtcgataagggcccatctactatctcttctatcacctgtagtcctagcggatcgcttaacgtggcgacttctttctcattgagtcccaccacttcactcatcctgaagtcatcccccaacgctacttaccattaccccttggttgctcagatgccagtttcaagtgttggcacgaccccacttgtcgtcactaacccatgtaccatagccgcagctcctacaactacctttgaggtggctacgtgtgtgagcccgcctatgtcgtctggacctatcagcaatatcgagcctacctctccagcagcgctcgtcatggctcccgtcgccccaaaggaacccagtacccaagtcgccacaactctgaggatacccgtgagtcccccactccccgatccagaggacttgaagaatctgccttcttccgtcctggtcaaattcccaacccagaaggacctgcagactgtgcctgcgtccttagaaggcgcaccattttcgccagctcaggctggcctgacgactaagaaagacccaacagtgcttccgctcgtgcaggccgctcctaagaatagcccaagttttcagagtacaagctctagtccagagattccactaagcccagaagcaacgctcgccaaaaagtctctgggtgaacctctgccaatcgttgcagcttttccactagagagcgccgacccagcaggggtggcacctacaactgctaaggcagcggcatttgaaaaggtcctgccaaagcccgagagcgcctctgtatcggcggcaccatccccacccgtgagcctgcctctggccccatctcctgtacccacgttgcccccaaaacagcagtttctgcccagctctcccggacttgtactggagtcacccagcaaacccttggcccctgccgatgaggacgagctattgcccttgattcccccagagcctattagcggaggcgtcccttttcaatcagtgctcgtcaatatgcccacccctaagtcagccggaattccagtacccacacctagcgctaaacagcccgtcactaaaaataataaaggtagtgggaccgagagcgacagcgacgaatcagtgcctgagcttgaagagcaggactccacacaggccaccacacagcaggctcaactggctgcagcagcagaaattgacgaagagcctgtgtccaaggcgaagcagtccagatccgaaaagaaagccaggaaggccatgtccaagttgggcctgcggcaagtcacaggggttacccgggtgacaatccggaaaagtaagaatatcctcttcgtaatcaccaaacccgatgtttataaaagccccgcaagcgatacgtatattgtgtttggtgaggctaagatcgaggacttgagtcaacaggcacagcttgccgcagcagagaagtttaaggtgcagggggaggccgtctccaatattcaagagaacactcagactccaaccgtgcaggaggagtctgaagaggaagaggtcgacgagaccggggtcgaggtaaaggacatcgaattggtgatgtcccaagcgaacgtttctagggctaaagcagtgagggccctgaagaacaactcaaacgacattgtcaacgccataatggagctgactatgtag

SEQ ID NO: 232044 - DNA, 306 bp, synthetic construct
  misc_feature 1..306: note = Description of Artificial Sequence: Synthetic coding sequence
  source 1..306: mol_type = other DNA
atgccactggaagacgaggttgtgccacctcaggtgctgtcagaacccaatgaggaagcgggagcagccttgagtcccctcccggaagtccccccatggacaggcgaagtctcccctgcccagcgggatgggggagctctcggcagaggcccttgggacagctccgatcgctccgctttgcttaaaagtaagctgcgcgctctactgaccgcacccaggtctctaagaaggtcttcatgttttggcggtcgcatggatcgcattggagcacaatcaggcctggggtgtaatagctttcggtattag

SEQ ID NO: 232045 - DNA, 456 bp, synthetic construct
  misc_feature 1..456: note = Description of Artificial Sequence: Synthetic coding sequence
  source 1..456: mol_type = other DNA
atgtcatcgtttagcaccacaactgttagctttctgctgcttcttgcgtttcagctcttggggcaaactcgtgccaatcctatgtataacgcggtgtcaaacgccgatcttatggattttaagaatctgctcgaccacctggaggaaaaaatgcctctcgaagatgaggtggtgccccctcaagtgctgagcgagccgaatgaagaagcgggtgccgctttgtcgccactccctgaagtaccaccctggacgggggaggtgtcgccagcccagcgagacggaggggctctcggacgaggtccatgggactcttccgataggagcgctctgctaaagtccaagctgagggcgctactgaccgcaccccgaagccttcggagatcgtcctgttttggaggccgtatggacaggatcggcgcacaaagcgggctcggctgtaactccttccggtactag

SEQ ID NO: 232046 - DNA, 768 bp, synthetic construct
  misc_feature 1..768: note = Description of Artificial Sequence: Synthetic coding sequence
  source 1..768: mol_type = other DNA
atggagcagtatgcaaataacctagaagagttagtcgaagagcggacacaggcataccttgaggagaagcgtaaggccgaagccttgctctaccaaatcctccctcactccgtggccgagcagcttaagcgaggggagaccgttcaggccgaagcattcgatagcgtaaccatctacttttcagatatcgtgggttttaccgccttgtcagctgagtcaacgccaatgcaagtcgttacattactgaacgacctgtatacttgctttgacgccgtgatcgacaatttcgatgtgtacaaggtggagacgatcggagacgcttatatggtggtaagtggcctgccagtacgcaatgggcgattacatgcatgcgaggtagccaggatggccttggctctgctggacgcagttagatccttcagaataaggcatcggcctcaagaacagctgcggctgcgcatcggtatccacacagggccagtatgcgccggagtggtggggctgaagatgcctcgatactgtctgttcggtgacaccgttaataccgcctctaggatggagtccaacggagaagccctgaaaattcatttaagttctgagaccaaggctgttcttgaggagttcggagggttcgaactcgaactgaggggagacgttgaaatgaaggtggagggcgaggcctctgccctacctactttttggggaccccgaggatcatacccgtcccaggcggcaaatgctacccctattccgaaagccctgatttag

SEQ ID NO: 232047 - DNA, 3186 bp, synthetic construct
  misc_feature 1..3186: note = Description of Artificial Sequence: Synthetic coding sequence
  source 1..3186: mol_type = other DNA
atgccagggcctagaagaccagccggttctcgccttaggctgcttctgctgcttctgctgcctccactcctgttgctgttgagaggctctcacgctggtaatctgactgtggcagtcgtcctcccactcgccaacaccagctatccctggtcttgggcaagagtcggtccagcagtggagctggcgctcgctcaagtcaaagcgaggcctgacctgttgccaggttggaccgttcgaacagtgttaggttcctcagagaacgctctaggcgtgtgttcggacaccgcagctcccctggccgctgtcgatctgaaatgggagcacaatccagctgtgtttcttggccctggttgtgtgtacgccgctgctcccgttggccgattcacagctcattggagagtgcctctgctcacagctggtgccccagcccttggctttggggttaaagacgaatatgcactgacgaccagagccggtccctcgtatgcaaaacttggtgatttcgttgcagcattgcacaggaggttgggatgggaaaggcaggccctgatgctctacgcctaccgcccaggagatgaggagcactgtttcttcctagtggaaggtctgttcatgcgagtaagagaccggctgaatattacggtggaccacctcgagttcgcagaagatgacctgtctcactataccagattactccgcacaatgcctcgtaaaggtcgggtcatttacatttgttcatctcctgatgcatttagaacactaatgctcctggctctggaagcaggcctgtgcggggaggactacgtgttttttcacctggatatttttggacagtctctgcagggcggacaaggaccggctcctcggcgaccttgggagcgcggagacggccaggatgtgtccgcaaggcaagcttttcaagctgcgaagatcatcacatataaggatcctgataacccagagtatttagagtttctgaaacagctgaaacatttggcttacgaacagttcaattttaccatggaagatggcctagtgaatactatccccgcttcgttccatgacggcctgctcttatatatccaggcagtaaccgagactctggcccatggaggcactgttacagatggagaaaacattactcaacgcatgtggaaccgttctttccagggagtcacaggctatctcaagatcgactcaagtggagatcgcgaaacagacttctccctctgggatatggatcccgagaacggcgcatttagagttgtactgaattacaatggcactagtcaggagctcgttgcggtttcaggaagaaagttaaattggcctttgggataccctcctcctgacatcccaaagtgtggctttgacaacgaagaccctgcatgtaatcaggatcacctttccactctggaggtactggctctggtcggcagcctgagtttgttaggcatcctcattgtgtcctttttcatataccgcaagatgcagttagaaaaggagcttgcctcagagttatggcgcgtgagatgggaagatgtggagccctccagtctcgagcggcacctgagaagcgccggaagcaggttgacgctcagcgggaggggctcaaattacggtagtttgctgaccactgagggccaattccaagtctttgcaaaaactgcatactataaaggaaatctcgtggcagtcaagagagtgaaccgaaagcggatcgagctgaccaggaaagtgctgttcgaattaaagcacatgcgggacgttcaaaatgagcatttgactaggttcgtcggcgcatgcactgatcccccaaatatctgtatccttacagagtattgtcccagaggtagcctccaggacatcctggaaaacgagagcatcactttagattggatgtttcggtactctctgaccaacgacatcgtcaagggcatgctctttctgcacaatggagctatttgcagtcacggcaacctgaagagtagtaactgtgtcgtggacggaaggttcgtcctgaagattactgattacgggctcgaaagttttagagacttggaccctgagcaagggcatacagtttacgctaaaaagctgtggaccgccccagagctcctgcggatggcctccccaccggttcggggttcacaggccggagatgtgtacagtttcggcattatccttcaggagattgctctgcggagcggcgtgtttcatgtagaaggattggacctgagcccaaaagagattattgagagggtgacccgcggtgagcagccacctttccgacccagcctggcccttcaatcccatttggaggaattggggctcctcatgcagagatgttgggcagaggacccacaggagcggcctccctttcaacagattcggctcaccctgcgtaagttcaacagggaaaattctagcaacatcctggacaatctcctatcccgcatggaacagtacgccaacaacctagaagagttagtggaagagcggactcaggcctacctcgaagagaaacggaaggccgaggccctgctctaccagatcctgcctcattccgtggcagagcagctcaagcgaggggagacagtccaggccgaggcattcgactctgtgaccatttattttagcgatatcgtgggatttactgcgctctcagccgagtcaactcctatgcaggttgtcacacttcttaatgatctgtacacttgcttcgatgcagttattgataattttgatgtgtataaggttgaaacaattggcgatgcttacatggttgtgtcgggcctgcccgttagaaatggccgtctgcacgcttgcgaagttgctcgcatggcattagccctcctcgacgcagtgagatcttttcgaatcagacatcgtccccaagaacaactgcggctgcgtataggaatacacacaggcccagtgtgcgcaggagtggtaggcctcaaaatgccgcgttattgtctcttcggagatacagtgaataccgcttctaggatggagtccaacggagaagcgcttaagatacatttgagttcagagacaaaagcggtgctggaggagtttggcggattcgagcttgaactgcggggagacgtggaaatgaaagggaaagggaaggtcagaacctactggcttctcggcgagagaggttcctccaccaggggatag

SEQ ID NO: 232048 - DNA, 1623 bp, synthetic construct
  misc_feature 1..1623: note = Description of Artificial Sequence: Synthetic coding sequence
  source 1..1623: mol_type = other DNA
aaaatgcagctggagaaggaactcgcctccgaattgtggagagttagatgggaggacgtagaaccttcaagtctggagcggcatctccgatctgcaggctcacggttgacactgtcgggacggggtagcaattacggctccttgctgactactgaggggcaatttcaggtttttgcaaagacagcctactacaagatgagagatgtccagaacgaacacctaacacgatttgtgggcgcttgcactgatccaccaaatatttgtatcctcaccgaatactgtccaagaggctctctgcaggacatcctggagaatgagagtatcactctggattggatgtttagatactctttaactaatgatattgtgaaggggatgctgttcttgcacaacggggcaatatgcagccacggaaacctcaaatcatccaattgcgtggttgatggccgtttcgtgttaaaaattactgattatggattggaatcctttcgggatttggacccagaacagggtcacacagtgtacgccaagaaactgtggacagcccctgaactgctacggatggccagcccaccagtgcgtggcagccaagctggagacgtgtactctttcggtatcattctgcaggagattgctctccggtcgggcgtcttccatgtggaagggctggacttgtcacccaaagagattatcgagagagtgactcgtggtgagcagccgccttttaggccatcacttgctctgcaatcgcacttagaagagctggggcttctaatgcagcggtgttgggcagaagaccctcaagagagacccccattccagcagattcggctgacgctcaggaagtttaaccgggaaaacagcagtaacattttggataaccttttatcaagaatggagcagtatgctaacaacttggaggagcttgttgaagagagaacacaggcatacctggaagaaaaaaggaaggccgaggcccttttatatcaaatcctgccgcacagcgttgcggagcagctcaagagaggcgaaacggttcaggcagaggcttttgacagtgtgacaatctacttcagcgacattgtgggcttcacagcactgtccgcagagagcacccctatgcaggtcgtgaccctgcttaatgacctttacacttgtttcgatgcagtgattgataatttcgatgtgtataaggtggaaactattggagatgcgtacatggtggtgtctgggctgcctgtccgaaatggacgtctacacgcgtgtgaagttgccagaatggcgctggcgcttctggatgctgtacggagcttcagaattaggcacagaccacaggagcagctacgtctccgaataggtatccacacaggacccgtatgtgccggagtggtcggcttgaaaatgccccgttattgcttgttcggcgataccgtcaacaccgcttcacgaatggagagcaacggcgaggctctgaagatacacctctcgagcgagactaaagcagttctcgaggagttcgggggattcgagctggaattgaggggggacgtggagatgaagggaaaggggaaggtgagaacatactggctgctgggggaaagggggtcatcgaccaggggttag

SEQ ID NO: 232049 - DNA, 3144 bp, synthetic construct
  misc_feature 1..3144: note = Description of Artificial Sequence: Synthetic coding sequence
  source 1..3144: mol_type = other DNA
atggcactgccatcactcttgcttctggtggcagcccttgcgggaggggtcaggcctcccggtgcaaggaaccttactctggctgtggtgctaccagagcataatttatcatacgcatgggcttggcctcgggtgggaccagcagtggcattagctgtggaggccctggggcgtgctttaccggttgatctcagattcgtgtcgtccgagctcgagggagcctgcagcgagtatctggcacccctgtccgccgtggatctcaagttgtaccacgaccctgatcttctcctgggcccagggtgcgtgtatccagccgcatcagttgcccgatttgcatcgcattggcgcctgccactgctcaccgccggagctgtggccagcggtttctctgccaagaacgaccattaccgaactcttgtgaggactggcccaagcgcaccgaagttgggagaattcgtggttactttacatgggcatttcaactggacagcaagggctgcgctgttgtatctggacgcaagaactgacgacagaccgcactattttaccattgagggagtctttgaggctttgcaaggttccaatttaagtgtacaacatcaagtgtacgccagggagcctgggggaccagagcaggccacacacttcatccgcgctaatggaagaatcgtgtatatttgtggcccattagaaatgctgcatgaaatactgctgcaggcacagagagaaaacctgacaaacggagactatgtttttttctaccttgacgtgttcggtgaaagcctccgcgcaggccctactcgcgcaacaggaaggccatggcaggacaatagaaccagggaacaggcacaggcattgcgagaagcttttcagaccgtactggtgattacatatcgtgagcccccaaaccctgaatatcaagaatttcaaaacaggctcctcattagagctcgcgaggatttcggcgtggagttaggcccatctctgatgaatttaatagccggttgcttttacgatggcatcttgctctatgccgaggtcctgaatgaaactatacaggaaggtggtaccagggaagatggtcttagaatcgtcgaaaagatgcaaggcagacgctaccacggggtgactggtctcgtcgtgatggataagaacaatgaccgtgagaccgattttgtattgtgggcgatgggagacctcgatagtggagatttccaacctgccgctcattatagtggggctgagaaacaaatctggtggactgggagacccatcccctgggtcaaaggcgctccaccctcggataacccaccatgtgcatttgacctggatgatccatcttgcgataaaacccctctgagtaccctcgccattgttgctctcgggactggcattactttcattatgtttggggtcagttcttttctcatcttcagaaaactaatgctagagaaggaactggcctctatgttatggaggatacggtgggaggaactgcagttcggcaattcggagcggtaccacaaaggggcaggttccagactgaccctctcccttcgcggttcaagttacggtagtttaatgactgcgcatgggaaatatcagatttttgcgaacaccggccacttcaagggtaatgtggtcgctattaaacatgttaataagaaacgtatcgagcttacacgccaggttctgttcgaactcaagcatatgcgggacgtgcagtttaaccatctcactcgtttcataggagcttgtatcgatcctccaaatatctgcatcgtgacggagtactgcccgaggggctcccttcaagacattctggaaaacgactcaataaacctggattggatgttccgttactccctgattaatgatctggtgaaaggcatggcgtttctgcacaatagcatcatttcctctcatgggagcctgaaatcatctaactgtgtggtcgacagtaggtttgtccttaagattacggactatggactggccagctttcgaagcacagccgaacccgacgactctcacgctctgtacgccaagaagctatggaccgctcccgaactgctgagcgggaaccccctgccaaccacagggatgcagaaggctgatgtctacagtttcggaatcattctccaagagattgcgctgcggtccggccctttctaccttgaaggtctggacctgtcacccaaagagattgtgcaaaaagttaggaacggccagcgcccttacttcagacctagcatcgatcggacacagctaaacgaagagttggtgcttctgatggaacgctgctgggcccaggaccctgccgaacgacccgactttgggcagataaaagggttcattaggcgatttaacaaagaaggcggtacttcgattctcgacaatttactcctgaggatggagcagtacgccaacaatttggagaagcttgtggaagagcggacccaggcgtatctagaggagaagagaaaagcagaagctctgctgtaccagattctgcctcactcagtggccgagcagttgaagcggggtgagaccgtgcaggctgaagcgtttgattccgtaacgatctatttttcagatatcgttggctttaccgcactctccgcagaatctactcccatgcaggtggtcactttgttaaacgatctgtacacatgtttcgatgcaattattgacaatttcgatgtttataaagtcgagacaatcggcgatgcttatatggtagtaagcggactgcccggaagaaacgggcagaggcacgcccctgaaatcgccaggatggcattagcacttctcgacgccgtgtcatcctttcggatacgacataggcctcacgatcagcttcgccttagaatcggcgtgcataccgggcctgtgtgtgccggtgttgtcggactgaaaatgcctaggtattgcctctttggagatacagtcaacacagccagtcgaatggaatctaatggccaggctctgaagatccatgtgagctctacgactaaggacgcgttagatgaactgggatgcttccaactcgaactccgcggagatgtcgaaatgaaaggcaaggggaaaatgcggacctattggcttctaggggagcgtaagggccctcctggactgctctag

SEQ ID NO: 232050 - DNA, 1626 bp, synthetic construct
  misc_feature 1..1626: note = Description of Artificial Sequence: Synthetic coding sequence
  source 1..1626: mol_type = other DNA
atgccttcccttttagtattgacctttagtccttgcgtcctgctcgggtgggccttactcgcagggggtacaggagggggaggagtgggcggtggaggcggtggggctgggattggtggaggcaggcaagagcgagaagcactcccaccgcaaaaaatcgaagttttggtgctcctgccccaggacgactcatacctgttcagtttaacccgtgtaagacccgcaattgaatatgctctgcgaagcgtggagggcaacgggacaggcagaagacttctcccgccaggcaccagatttcaggttgcatacgaggacagtgactgcggcaatagagcgctgtttagcctcgttgaccgagtggccgcagcacgaggcgctaaacccgacctgattttaggccctgtgtgtgagtatgccgctgcacccgtggcaaggctggctagtcactgggatctgcctatgttgtctgccggagctctcgccgcaggcttccagcacaaggactcagagtacagccacctgacccgagtggctcccgcatatgcgaagatgggtgagatgatgctggcacttttcagacatcaccattggtcaagggctgccctggtatatagcgacgataaactcgagagaaattgttactttaccctggagggggtgcacgaggttttccaggaagaaggcctccatacgtctatatactcgtttgatgagacaaaggacttggatttggaagatattgttcgaaacatccaagccagcgaaagagtcgtgatcatgtgcgcctcttctgacacaataagatccattatgctggtcgcacacaggcacgggatgacgtccggtgattatgccttctttaacatagaactgtttaatagttctagttatggcgacggctcatggaagcgcggtgataagcacgatttcgaggccaagcaagcatacagttcactgcaaacggtaacactgctgaggacagtcaaaccggaattcgaaaagttcagtatggaggtgaagtcctccgtggaaaaacaggggctgaacatggaggactacgtgaatatgttcgtagaggggtttcacgacgctattctgctctatgttctggcactgcacgaagtattgcgcgctggttattcaaaaaaggacggcggaaagattatccaacagacttggaaccgcacgttcgagggtatcgccggtcaggtgtctattgatgctaatggcgacagatacggcgattttagcgttattgccatgacagatgtcgaggcgggtactcaggaagtaattggcgattacttcggtaaagaggggagatttgaaatgcggcctaatgtcaaatatccttggggaccgctgaagttgaggatagacgaaaacagaatcgtagagcatacaaacagctccccgtgtaaaagctctggagggttggaagaatccgccgtgaccggaatagtggtgggagctctcctgggagccggactgttgatggcattttacttttttagaaaaaaatatcgaatcacaattgaaaggagaactcagcaggaagaaagtaacttgggcaaacaccgcgagttacgagaagacagcatacgctcacacttctctgtcgcttag

SEQ ID NO: 232051 - DNA, 1623 bp, synthetic construct
  misc_feature 1..1623: note = Description of Artificial Sequence: Synthetic coding sequence
  source 1..1623: mol_type = other DNA
atgccaagtctgctggtcctgacattttccccgtgcgtgttattgggctgggcactcctggctggagggacaggaggtggcggagtggggggaggaggcggaggcgctggaatcgggggtggtcgccaggaacgagaggccctgcctccccaaaaaatcgaggtgttggttttactgccacaggatgatagttacctcttctctctcactagggtgcgtccagccattgagtatgctttaagaagtgttgagggcaatgggactggcaggagactactgcctcctggtacaagattccaggtagcatacgaggactctgactgtggcaatcgggctcttttctccctggtggacagagttgctgcagcacggggagccaagccagacctcatcctgggtcccgtgtgcgagtatgctgctgcacccgtcgcccgattagcctcgcattgggatctgcctatgctgagcgccggagccctcgccgctgggttccagcacaaggattctgagtactcccatctaacgcgcgtggcaccagcgtacgctaaaatgggagagatgatgctcgctctgttccggcaccatcactggtcaagggcagcactggtctactccgacgacaagcttgaacgaaattgttattttaccttggaaggagtgcatgaggtctttcaagaggagggccttcatacctccatctacagctttgacgagactaaggatcttgatctggaagacatcgtccgcaacatccaagcctccgagagagtggtgatcatgtgtgcctccagcgacacaattcgtagcattatgttggtcgcccatcgtcatggtatgacatctggagattatgcatttttcaacatcgaactgtttaactccagttcgtatggcgatgggagctggaagcggggtgacaaacacgacttcgaggcaaagcaggcctactcaagcctgcaaacggtgacccttctgaggaccgtcaaaccagagtttgaaaaatttagcatggaagtcaagtcttcagtggagaagcagggcctaaacatggaggactacgtgaacatgttcgtcgagggcttccatgacgctatccttctgtatgtactggcactccatgaagtgctccgtgctggatatagtaaaaaggacgggggaaaaatcatacaacaaacatggaaccgcacgtttgagggtattgccggacaggtgagtatcgatgctaacggagaccgttacggcgatttttcagtgatagcaatgaccgatgttgaagccggaactcaagaggtcatcggagactacttcggtaaggaggggcgattcgagatgcgcccaaacgtcaaatacccctggggacccctgaaactgcgtatagatgagaacaggattgtggagcacacaaactctagcccctgcaaaagttgtggcttagaggaaagcgcagtcacgggtattgtggtgggggctctgctaggagccggtcttctcatggctttttactttttccgcaaaaagtataggataaccatcgaacgcaggacacaacaggaggaaagcaacctgggcaagcatcgcgaattgagagaagacagtattaggtctcatttttcagtcgcctag

SEQ ID NO: 232052 - DNA, 975 bp, synthetic construct
  misc_feature 1..975: note = Description of Artificial Sequence: Synthetic coding sequence
  source 1..975: mol_type = other DNA
atggaaccttctgcacttggtccgtggagcctgttcccagatctggctcctcgcgaccaagagggccaagtgttggcccctcgaagatgcttcagaagagaatgtgggcagaatgagaaagtagtgatcatgtgcgcatcttccgacactatcagatctataatgctggtagctcatcggcatggaatgaccagtggagactacgcattttttaatatcgagctgttcaattcctcatcatacggggacggttcatggaaaaggggggacaaacacgactttgaagcaaagcaggcttattcaagcctacagactgtcacattgctacgcaccgtaaaacctgagtttgaaaagttcagcatggaggtcaaatcaagcgtggaaaagcaaggcctgaacatggaggactacgtgaacatgtttgtagaagggttccatgatgccatcctgttgtatgtactggctctccatgaagtcctgagggctggttattccaagaaagacggcggaaaaataattcagcagacttggaaccgcactttcgagggcatcgccggacaagtttcaatcgacgctaacggtgacagatacggggatttctctgtcattgcaatgacagacgttgaagccggaacgcaggaggtcatcggggactacttcggaaaagaggggaggtttgagatgagacctaacgttaaatatccttggggacccctgaaactgaggattgatgagaatagaattgtcgagcacactaattcgtcaccatgcaaatcatgcgggctcgaggagtccgccgtcactggtattgtagtcggcgcattgctcggggctggtcttttgatggcattttactttttcaggaaaaagtaccggatcacaatcgaaagacggacccagcaagaagaatctaacctgggtaagcacagagaactccgagaggactccatcaggagccacttttcggtcgcctag

SEQ ID NO: 232053 - DNA, 915 bp, synthetic construct
  misc_feature 1..915: note = Description of Artificial Sequence: Synthetic coding sequence
  source 1..915: mol_type = other DNA
atgtcctccacacttcccgcacttctgtgtgtgggactgtgtctgagccagaggatatccgcccaacagcagaccctccccaaaccattcatttgggcagagccccattttatggtacctaaggagaagcaggttactatttgctgtcaggggaattacggagcagtggaatatcagctccactttgagggttcactgttcgctgtagataggcctaaaccccctgagaggatcaataaagttaagttttacatcccggacatgaattcaaggatggccggacagtacagctgtatctacagagtaggtgaactctggagtgagccatccaatcttctcgacctggtggtcaccgaaatgtatgacacacctacgcttagcgttcatcctggaccagaggtgatatccggtgaaaaagtgaccttctactgtcgactcgataccgctactagtatgttcctgctgctgaaagagggcaggtctagtcacgtacagcggggatacggtaaggtgcaggctgagtttcccctgggccctgtgaccactgcccaccgcggtacgtaccgctgttttggcagttacaacaaccatgcatggtctttcccgtctgaaccggtcaagctcctggtgacgggcgatattgagaacacatctctcgctcctgaggatcctacatttccggcagacacatggggaacctacctgcttactacagagacaggcctacagaaggatcatgccctgtgggatcatactgctcagaacctcctccggatgggcctggcctttctggtgttggtggctctggtgtggtttctggtggaggactggttgtcaaggaagcggactcgagaacgcgctagccgcgcatccacctgggaaggtagaagaaggctgaatacacagacgctttag

SEQ ID NO: 232054 - DNA, 864 bp, synthetic construct
  misc_feature 1..864: note = Description of Artificial Sequence: Synthetic coding sequence
  source 1..864: mol_type = other DNA
atgtctagtacactgccagccctcctttgcgtcgggctttgtctttcgcagagaatctccgcacaacagcagaccctgccgaaaccattcatttgggcagaacctcattttatggtccctaaggagaagcaggtgactatctgttgtcaggggaattacggagcggttgaatatcagctccattttgagggctctctgttcgcagtggacaggcccaaaccaccagaacgtatcaataaagttaagttctacatacccgacatgaatagccgaatggctggccaatactcttgcatctatcgtgtgggcgaactgtggtccgagccgtccaacctgctcgatctggtggtgacagaaatgtatgacaccccaacgttgagtgtacatccagggccagaggtgatttctggtgaaaaggtaaccttttactgtagactggatactgccacatccatgtttttattgctgaaagaaggccgtagcagccacgtgcaaagaggctacggaaaagtccaggcagagttccccttaggacccgtgaccacagcccaccgaggaacctacaggtgcttcggaagctacaataatcatgcttggtcattcccaagtgagccggttaaattgctggtcacaggggacatcgagaataccagcctggcccctgaggaccccaccttcccagaccacgcgctgtgggaccatacagcccagaacctacttagaatgggcctggcttttttagtgctagttgccctggtgtggtttttggtcgaagactggctgagcagaaagaggacccgtgagcgagcaagccgcgcttccacctgggagggacgaaggagattgaacacccagacgctgtag

SEQ ID NO: 232055 - DNA, 630 bp, synthetic construct
  misc_feature 1..630: note = Description of Artificial Sequence: Synthetic coding sequence
  source 1..630: mol_type = other DNA
atgagttccacacttccagcccttttatgtgttgggctatgcttaagccagcgaatctcagcccagcaacagatgtatgacacacctaccctgtctgtacacccagggcctgaagtcatctctggcgagaaggtcaccttttactgcaggttggacacggctactagcatgtttttgctactgaaggaaggtagaagctcccacgtccagcgtggatatggcaaagtgcaagcggaattcccactggggcctgtcacaacagcgcatcggggtacctacaggtgctttgggagttacaataatcacgcctggagctttcccagcgagccagtgaagctgttggtcaccggcgacattgaaaatacttcactggctccagaggatcctacgtttcctgcggatacctggggaacttacctgctgaccacagagaccggcctgcagaaggatcatgcactgtgggatcacaccgctcaaaaccttctcaggatgggtcttgcattcctggtgctcgttgctctagtctggtttctcgttgaagattggttaagccggaagcggacgcgagaacgagctagtagggcttctacttgggaaggacgtagaagactgaacacacagaccctttag

SEQ ID NO: 232056 - DNA, 594 bp, synthetic construct
  misc_feature 1..594: note = Description of Artificial Sequence: Synthetic coding sequence
  source 1..594: mol_type = other DNA
atgtcctcgacgctccccgctctgctctgtgttgaaatgtatgacacaccaacactgtcagtccaccccggtcctgaagtcatctctggcgagaaggtgaccttctactgtcggctggacactgccacatctatgtttcttctgctaaaagaagggagaagctctcacgttcagcgaggttatggaaaggtgcaggctgaatttcctctgggtccggtgactacagcgcatcggggaacataccgatgcttcggatcttataataaccacgcttggagctttcctagtgagcccgtgaaactgctcgtaaccggtgatattgaaaacacctctttggctccagaggatcccacctttccagctgacacctggggtacttaccttctgacaaccgaaaccgggctgcagaaagatcacgccctgtgggatcacacagcacagaacttgctccggatgggtttggccttccttgttctagtggccttagtatggttcctcgtcgaagactggctgagtcgaaaacggactagggagcgagccagccgggctagcacatgggagggtcggagacgtctgaatacacagacattgtag

SEQ ID NO: 232057 - DNA, 912 bp, synthetic construct
  misc_feature 1..912: note = Description of Artificial Sequence: Synthetic coding sequence
  source 1..912: mol_type = other DNA
atgtcatcgaccctgcccgctttgctgtgtgtgggtttatgcttatcacaaagaattagcgcccagcagcagacactgccaaagccctttatttgggccgagccacacttcatggtgccaaaggagaagcaggtgactatatgttgtcagggcaattacggcgcagttgaataccagttgcacttcgaagggagcttgttcgccgtcgacagacctaaaccaccagagagaatcaataaggtaaagttttacatccctgacatgaactctaggatggctgggcaatacagctgcatctaccgcgtgggtgagctttggagcgagccatctaacctcctggacctggtggtaactgagatgtacgataccccaacactgtcagtgcatcctggcccagaagtgattagcggcgagaaggttaccttctactgccgtctagatactgcaaccagtatgtttctgctgcttaaagaagggcgatcctcccacgtccagcggggttatgggaaagttcaggccgaattcccactcggtccagtgactaccgcgcacagaggcacctatagatgttttggtagttataacaaccacgcttggagctttccttcagagccggtcaaactcctcgtgacaggggacattgaaaacacctccctcgccccagaagatccaacattcccagacacatggggtacatatctgcttacaacagaaaccggtctccagaaggaccacgccttgtgggatcatacagcccagaacctgctgagaatgggccttgctttcctggttcttgtggccttggtttggtttttagttgaagactggctttcaagaaagcgtacaagggaacgcgcaagccgcgcttcaacctgggagggcaggcgcaggctaaacacccagaccctttag

SEQ ID NO: 232058 - DNA, 777 bp, synthetic construct
  misc_feature 1..777: note = Description of Artificial Sequence: Synthetic coding sequence
  source 1..777: mol_type = other DNA
atggcatggcgtgcattacatccacttctcttgctgctgctcctctttcctgggagtcaggcacaaagcaaagcccaagtgttgcagagcgtggccggtcagacacttacagtcagatgccagtacccccctacaggcagtctctatgagaaaaaaggatggtgcaaggaagcgtctgcattggtatgtatcaggcttgtcacaagttccaagccaagaaccatggcatggacatcccgcttcaccatatgggatgacccggacgccggtttcttcactgtgaccatgactgatcttcgagaggaagattctggtcactactggtgtcgaatctatagaccctcggacaacagcgtgtccaaatctgtccgcttctaccttgtggtaagtcccgcatctgcatccacacaaacctcctggacccctcgcgacttggtgagctctcaaacccagacacagtcttgcgtacctccaactgccggtgccagacaagccccagagtccccttcaacaatccctgtgccttcccagcctcagaactcaaccctcagacccggtccagccgctcccatcgccctggttcccgtgttctgcggcctgctggtcgccaaatctctggtgctgtcggctctcctcgtatggtgggtgctgcgcaatcggcacatgcagcaccagggccgatctctgctgcacccagcccagccaagaccccaggcccacaggcattttccactttcgcatagggcccctgggggaacttatggtggcaagccctag

SEQ ID NO: 232059 - DNA, 813 bp, synthetic construct
  misc_feature 1..813: note = Description of Artificial Sequence: Synthetic coding sequence
  source 1..813: mol_type = other DNA
atggcatggcgggctctccacccactacttctgctgcttctcctgtttcccggatcccaggcacagagtaaggcccaggtgctccagtccgttgccggtcaaaccctaactgtgagatgccagtaccctccaaccggcagtttatacgagaaaaaaggctggtgcaaagaagcctctgcgctggtgtgcatcaggctagtgacctctagtaaacctagaaccatggcttggaccagccgcttcacgatttgggacgaccctgatgcaggcttctttaccgttaccatgacagacttgagggaggaggatagtggacactattggtgtaggatttaccggccttcagacaacagcgttagcaaaagtgtccgcttttatctcgttgtctctccagctagcgcgtccacccaaacaagttggactcccagagacctggtcagctcccagacccagacccagtcgtgcgtcccacccacagcaggggcaaggcaggctcctgagtcaccaagtaccattcctgtgccctcccatcccagctcgcccctgcctgtgcccctgccatcgaggcctcagaattcaactctccgcccagggcctgccgcacctatcgcgttggtgcccgtgttctgcggtctgttagtggctaaatccctcgtactatccgctctcctggtttggtgggtcttgcgtaatagacacatgcagcaccaaggccgatcattattgcacccagctcagccccgacctcaggctcaccgacacttccccctctcccacagagcgcctggcggaacttacggagggaagccttag

SEQ ID NO: 232060 - DNA, 831 bp, synthetic construct
  misc_feature 1..831: note = Description of Artificial Sequence: Synthetic coding sequence
  source 1..831: mol_type = other DNA
atggcctggcgggctctccatcccttattgttattgctgctcctgtttccaggctcacaggcacagagcaaagcacaggtactgcagtctgtcgccggacagaccctgacagtaaggtgtcaatacccaccgaccggaagcctgtacgaaaagaagggctggtgcaaggaagcatccgccctagtgtgcatcaggctggtgacatcctcaaagccacgtactatggcctggacgtccaggttcactatctgggacgatcctgatgcaggcttttttactgtgaccatgaccgatcttcgagaagaagattctgggcactactggtgccggatctacaggccctctgataactctgtttcaaaatcggtccggttctacctggtcgtgagtccagctagcgcgtctacacaaacatcatggacgcctcgcgatttggtctcgtcccagacccagacccagagctgcgtgccgccaacagctggagccaggcaggcaccggagtcccctagcacaatccccgttcccagccaaccccagaacagcacgctgaggcctggcccagccgcacctatcgcgctcgttcccgtgttttgcggactgttggtggccaaatcgctggttctgagcgcgctcctggtgtggtggggagacatttggtggaagaccatgatggaactgagatctctagacacccagaaggctacctgccaccttcagcaagtgaccgaccttccatggacctcggttagctcaccggtcgagcgggaaatcttgtaccatacggtcgcccgtactaagatctccgatgacgatgacgagcacacactgtag

SEQ ID NO: 232061 - DNA, 606 bp, synthetic construct
  misc_feature 1..606: note = Description of Artificial Sequence: Synthetic coding sequence
  source 1..606: mol_type = other DNA
atggcttggatgttgttactgattttaatcatggtgcatcccggatcctgcgccctctgggtaagtcagccccctgaaatcaggactctagagggctcatcggccttcctcccttgttctttcaacgcctcccagggacgactcgctattggttccgtcacctggttcagggatgaggtggtgcctggcaaggaagttcggaatggcactcctgaatttcgagggagactcgcacccctcgcgagctctaggttcctgcatgaccatcaggctgagcttcacattagagacgtccggggtcacgacgcgtcgatttacgtgtgcagggtggaggtgttagggctgggagttggaacgggcaacgggacacggctggtggtggaaaaggagcatccacaattgggagccggtaccgttctgcttctccgtgccggattctacgccgtgtcttttctgtcagtggcagttggcagcacagtgtattatcaggggaagtgccttacgtggaagggcccacgaagacagctgcctgcggtcgtcccagccccactgccacctccatgtggcagctctgcgcacctgttgccccctgtacccggaggttag

SEQ ID NO: 232062 - DNA, 498 bp, synthetic construct
  misc_feature 1..498: note = Description of Artificial Sequence: Synthetic coding sequence
  source 1..498: mol_type = other DNA
atggcctggatgctgctcctgatcctcatcatggttcacccgggtagctgcgccctgtgggtctctcagcctcctgagatcagaaccctagaaggctcttctgcttttctaccttgtagcttcaacgccagccaaggacgtctagccataggctcagtcacctggttccgcgatgaagtggtccccggaaaggaggccgaactccatatcagggacgtgcgcggacatgacgcttccatctacgtgtgtagagtggaggtgctgggcctgggcgtggggaccggaaacggcacacgactggtggtagaaaaggaacatccgcagctgggcgctggaaccgtgctgctgctgcgggcaggcttctacgccgtgagcttcctcagtgtggccgtaggaagcaccgtgtactatcagggaaagtgccactgccacatggggacccactgtcatagcagtgacggccctaggggggtgatccccgaacccagatgtccctag

SEQ ID NO: 232063 - DNA, 573 bp, synthetic construct
  misc_feature 1..573: note = Description of Artificial Sequence: Synthetic coding sequence
  source 1..573: mol_type = other DNA
atggcatggatgctcctcctgatattgattatggtgcatccgggaagctgcgctctatgggtttcccaaccacctgagattcggactctagaggggtcttcagccttcttgccgtgttcttttaacgcatctcaagggagattggctatcggctctgtgacctggttccgagacgaggtggtgcctgggaaggaggtgcgaaacgggactcctgaatttcggggacgactcgcaccactcgcaagctccagatttcttcatgaccaccaggcagagctccacatacgcgatgttcgcggacatgatgccagcatctacgtgtgcagggttgaagtactggggcttggtgttgggacgggcaatgggacgagactcgtcgtagaaaaggagcacccgcagctaggggcaggcaccgtccttctcctgcgtgcgggattttatgccgtctcatttctgtctgtggccgtgggctcaactgtatactatcaggggaaatgtcactgtcacatggggacccattgccactctagcgacggtcctcgcggagtcatcccagagccgaggtgtccatag

SEQ ID NO: 232064 - DNA, 534 bp, synthetic construct
  misc_feature 1..534: note = Description of Artificial Sequence: Synthetic coding sequence
  source 1..534: mol_type = other DNA
atggcctggatgctgctgctgatcctaatcatggtacatcccggttcctgtgccttatgggtatcgcaacctcctgagataagaacacttgagggatcctctgccttcctaccttgtagctttaatgcatctcagggtaggctcgccattgggtctgtcacttggtttcgtgacgaagtggtgccagggaaagaggtgcgtaatggaactcccgaattccggggtcgactggctcctctggcatcaagcagatttctgcatgaccatcaggcagagctgcacattagagatgtgcgagggcacgacgcaagcatctacgtttgtcgcgtggaggtcctcgggctgggcgtgggcacaggcaatggcaccaggctggtggtggagaaagagcatccacagctaggggcaggcaccgtattactgctccgtgcgggtttctatgccgtgtcctttcttagcgtcgctgtaggctctaccgtttattaccagggcaagtacgctaagtcaactcttagcggctttccacagctgtag

SEQ ID NO: 232065 - DNA, 573 bp, synthetic construct
  misc_feature 1..573: note = Description of Artificial Sequence: Synthetic coding sequence
  source 1..573: mol_type = other DNA
atggcttggatgctcttgttaattttgattatggtccacccagggagctgcgcactgtgggtctctcagcctccagagatcagaacactggagggtagctcagcattcctcccgtgtagcttcaacgccagccaaggccgactggcaatcggtagtgttacctggttccgggatgaggtggtccctggtaaggaagtgagaaacggtacccccgaattccgcggtcggctggccccacttgccagctccaggtttctgcacgatcaccaggccgagctgcacatccgggatgtgcgcggacatgacgcctctatttatgtgtgccgtgtcgaagtactgggactgggcgtcggcacaggcaacggtacacggctggtggttgagaaggaacaccctcagcttggcgctggaacggttctgctgctgcgcgcaggcttttacgctgtgtcctttctgtctgtggcagtggggtcaactgtctactaccagggtaaatgtcattgtcacatgggcacgcactgtcacagctccgatggcccaagaggggtgatccccgagccaaggtgcccctag

SEQ ID NO: 232066 - DNA, 606 bp, synthetic construct
  misc_feature 1..606: note = Description of Artificial Sequence: Synthetic coding sequence
  source 1..606: mol_type = other DNA
atggcttggatgctgctgttaatactgatcatggtacaccccggaagctgcgcgttgtgggttagtcagccaccggagattcgaacactggagggatctagtgctttcctgccctgttcatttaatgcgtcacagggtcgattagctattggatccgtcacgtggttcagagatgaggtggttccagggaaggaggtgcgcaatggcacccctgagttcaggggccgtctggcgcctctggcgtcctcccgattcctgcatgatcaccaggcggaattgcacattcgcgacgttagaggacatgatgcttctatctatgtgtgtcgggtggaggtgttaggcctaggcgtggggacaggcaacggtacacgcctagtcgtggagaaggagcacccacagctgggcgctggcactgtactgctgctgagagccggtttttatgctgtgagctttctaagcgttgccgttggtagcacagtgtactaccagggcaagtgtctgacgtggaaagggcctaggaggcagctgcctgctgtggtgccagctcccttgcctccgccttgtgggtcaagtgcccacctgctgcctccggtgccaggtggatag

SEQ ID NO: 232067 - DNA, 534 bp, synthetic construct
  misc_feature 1..534: note = Description of Artificial Sequence: Synthetic coding sequence
  source 1..534: mol_type = other DNA
atggcctggatgttgttgttgatacttattatggtccaccccggaagttgcgccctctgggtcagtcaaccacctgaaattcggacactggagggtagttcagcctttctaccatgctctttcaatgcatcacagggcagactcgctattggatccgtgacctggttcagagatgaagtggtcccaggaaaagaggtaaggaatggtactccggagtttagaggacggttggcaccactggctagctcacgctttttacacgaccaccaggcagaactccacattagggacgttcggggacacgatgcaagcatttacgtttgcagagtagaggtactaggtctgggcgttggcaccggaaacggcacgaggctagtggtggaaaaagagcatcctcagctgggggctggcactgtactgcttctgcgcgctgggttctatgccgtgtcctttctgtccgtcgcggtcggcagcaccgtgtattatcaaggcaaatacgctaaaagcaccctgtctgggtttccacaattatag

SEQ ID NO: 232068 - DNA, 498 bp, synthetic construct
  misc_feature 1..498: note = Description of Artificial Sequence: Synthetic coding sequence
  source 1..498: mol_type = other DNA
atggcctggatgctgctgctgattctgattatggtgcatccgggatcttgtgcgctatgggtgtctcagcctccagagattcgcaccctagaaggcagttcagcattcctcccatgctctttcaatgcctcacagggccgactcgcaatcggctctgtgacttggtttagggatgaggtcgttcctggcaaggaagccgaactccacatcagggacgtgcggggtcacgacgcttcaatttatgtttgtagggtggaagtcctaggattaggcgttggcacagggaacggcacgcgacttgttgtcgaaaaggagcatccccagctcggagccggaacggtcctcctcctgagggccggtttctatgccgtcagctttctgagcgttgctgtcggcagcacagtctactaccagggaaagtgtcactgtcacatgggaacccattgtcatagctcagatggcccacggggtgtgatcccagagccaagatgtccctag

SEQ ID NO: 232069 - DNA, 573 bp, synthetic construct
  misc_feature 1..573: note = Description of Artificial Sequence: Synthetic coding sequence
  source 1..573: mol_type = other DNA
atggcctggatgctcctgcttatcctgattatggtacatcccggaagctgcgctttatgggtgtctcagcctcccgagattaggaccctggaaggaagctctgctttcctgccctgttcgtttaacgcttcccagggccgtttagctataggctcggtcacctggtttcgcgacgaagtggtgcccggaaaagaagttcggaacgggacccccgagttccgtggcagactcgctcctttggcctcttctcgcttcctgcatgatcatcaggccgagctccatattcgtgacgtccgcggtcatgacgcctctatctacgtttgtcgcgtagaggtgttgggccttggcgtcggcacaggcaatggcactcggctggtagtggaaaaggaacacccccagttgggagccggaaccgtgttgctgttaagggctggattctatgcagtttcattcttgtctgtggccgtcgggagcaccgtttactaccagggcaaatgccactgccatatggggacacactgtcacagctccgacggaccacgcggagtgataccagagccaaggtgcccttag

SEQ ID NO: 232070 - DNA, 606 bp, synthetic construct
  misc_feature 1..606: note = Description of Artificial Sequence: Synthetic coding sequence
  source 1..606: mol_type = other DNA
atggcttggatgctgctgctgattctgatcatggtgcaccccggaagttgcgcactgtgggtgagccagccccctgagatcagaaccttagaaggcagctcagccttcctgccttgtagcttcaacgcttcgcagggtcgtcttgctattggatcagtgacctggttccgcgacgaggtagtgcccggaaaagaggtgcgaaatggcacccccgagttccgcggtcggctcgcccctttggccagttcccgctttcttcatgaccaccaggcggagctacacatccgagatgtgcgtggtcatgacgcctcaatttatgtttgtagagtagaagtcctcgggcttggtgtcggcacaggcaacgggacccgactggtggtcgagaaagaacatccacagctgggggcaggcacagtgctgctattaagagccggattctatgctgtgtcctttctgagcgtcgccgtgggatcaaccgtctattaccagggaaagtgtctcacttggaagggccctcggcgtcagctgcctgcagtcgtcccagcacctttgcctcctccgtgcggaagctcggcacacctcttacccccagtccccggaggctag

SEQ ID NO: 232071 - DNA, 573 bp, synthetic construct
  misc_feature 1..573: note = Description of Artificial Sequence: Synthetic coding sequence
  source 1..573: mol_type = other DNA
atggcttggatgctgcttttgatactgataatggtgcatccgggttcctgcgccctgtgggtgtcccagccacctgagattaggactcttgaaggctccagcgccttcctgccttgtagctttaacgcgtcacagggaaggttggccatcggatccgtgacttggtttagagatgaggtggtgcccggtaaagaggtaaggaacgggactcctgaatttcgaggacgtttggccccactggcctcctcgcgctttttgcatgatcaccaggcagaactccatatccgggacgtgagggggcacgatgcctctatctacgtttgccgggtggaagtgctggggctaggggttggtaccggaaatggtacccggttagtagtggaaaaggagcacccacagctgggcgcaggcactgtcttactactgcgggcagggttctatgccgtgtctttcctgtccgtcgcagtgggatctactgtgtactaccaaggaaagtgccattgccatatgggaacccactgccattcctcagacgggccaaggggagtgattcccgaaccgagatgcccatag

SEQ ID NO: 232072 - DNA, 498 bp, synthetic construct
  misc_feature 1..498: note = Description of Artificial Sequence: Synthetic coding sequence
  source 1..498: mol_type = other DNA
atggcgtggatgttattgctcattttgatcatggtacaccctggcagctgcgccctgtgggtgagccagccccctgagattaggaccctcgagggttctagtgcctttctcccctgttctttcaacgcttcccaaggaagactcgccattggatccgtgacctggttcagggacgaggtggtgccagggaaggaagccgagctgcacataagagatgttcgcggacacgatgcgagtatttatgtctgcagggtggaggtgctggggctcggcgtgggcactggcaatggcacccgcctggttgtagagaaggagcacccccaactaggagcagggactgtgctgctgctgagagcaggattctacgccgtgagttttctgtctgttgcagtgggctccacagtgtactaccaagggaaatgccattgccacatgggaacccattgccactccagcgatggccctcggggagttatacctgaaccacggtgcccatag

SEQ ID NO: 232073 - DNA, 498 bp, synthetic construct
  misc_feature 1..498: note = Description of Artificial Sequence: Synthetic coding sequence
  source 1..498: mol_type = other DNA
atggcctggatgctgctcctaattctcattatggtgcatcccggatcatgtgctctgtgggtgtcccaacctccagagattaggacccttgagggaagctcggcattcttgccatgttcttttaacgccagtcagggtcgactggccattggcagtgttacctggtttagagatgaggtagtgccgggaaaggaagcagagcttcacattcgggacgtccggggtcacgatgccagcatttatgtatgccgggtggaggtgctgggcctgggagtgggcaccggtaatgggacaagactagtggttgagaaagaacatccccagttgggagccggtacagtattgctcctgcgggcagggttctacgcggtctcctttctcagtgttgcggtgggatcgaccgtgtactatcagggcaagtgccactgccacatggggactcattgtcactcgagcgatggcccaagaggcgtgatccccgagcccagatgtccatag

SEQ ID NO: 232074 - DNA, 498 bp, synthetic construct
  misc_feature 1..498: note = Description of Artificial Sequence: Synthetic coding sequence
  source 1..498: mol_type = other DNA
atggcctggatgctgttgttgattctgataatggtgcatcctggttcttgcgcgctgtgggtgtcccaacctccggaaatccgaacactcgaggggtctagtgcatttctgccctgttccttcaacgcttcgcaaggaagacttgccattggatccgtgacatggttccgcgacgaagtggtgccaggcaaggaagccgagcttcatatcagggatgtgcgagggcacgatgcttcaatttacgtgtgccgggtggaggtgctgggattgggcgttggcactgggaatggtacaagactggttgttgagaaagagcatcctcagctgggggctggcacagtgttgctgctgcgcgctgggttctacgcggtctcttttctctcagtggcagtcggaagcaccgtatattaccagggaaagtgccactgccacatgggcacacattgtcattcctctgacggacctcgcggagttatccccgagccgcgatgtccctag

SEQ ID NO: 232075 - DNA, 606 bp, synthetic construct
  misc_feature 1..606: note = Description of Artificial Sequence: Synthetic coding sequence
  source 1..606: mol_type = other DNA
atggcttggatgcttctcctcatcctgatcatggtgcacccaggtagttgtgccctatgggtctcccagccacccgaaattagaaccctggagggttcatcggcatttctgccgtgctccttcaatgcatctcagggaaggctcgcaatcgggagcgtaacatggtttagagacgaggttgttcccggaaaggaagtgaggaacgggacaccagagtttcgagggagattagccccactggccagtagccgatttctgcatgaccaccaagccgaattacacattagggacgtgcggggacacgacgcgtccatctacgtttgcagggtcgaggttctgggcctgggtgtgggtaccggaaacggcacccgcttagtcgtagaaaaggaacacccacaattaggagcagggactgtgctactcctgagagcaggtttctacgcagttagttttctgtccgtggctgtggggtccaccgtgtactaccagggaaaatgcctaacctggaaggggccacggaggcagcttccggctgtggtcccagcaccgctgccacccccatgcgggtctagcgctcacttgttgcccccagtgccaggcggatag

SEQ ID NO: 232076 - DNA, 606 bp, synthetic construct
  misc_feature 1..606: note = Description of Artificial Sequence: Synthetic coding sequence
  source 1..606: mol_type = other DNA
atggcatggatgcttctcttaatcctgatcatggtgcacccagggagttgtgctctgtgggtgagtcagccccctgagattcgcacactagagggatcttccgccttccttccctgtagtttcaacgcctcacagggaaggctggctattgggagcgtaacttggttcagagatgaagtcgtcccaggaaaggaagtgagaaacggaactcccgagttccgcggacgccttgccccactagccagctccagattcctccacgaccaccaggcggaactccacatcagagatgttcgcggtcacgacgctagcatttacgtgtgccgggtggaagttctggggctgggtgtaggcaccggaaacggcaccagattggtcgtggagaaggagcatcctcagttaggcgcaggtacggtgttattgttgcgtgccggattttacgcggtgtcttttttgtctgttgcggtgggctcaaccgtctattatcagggcaagtgccttacttggaaaggtcctaggagacagctacccgcagtggtgcccgctccattgccgccaccctgcggctcaagtgcccatctgctgcctcctgtccccggtggttag

SEQ ID NO: 232077 - DNA, 534 bp, synthetic construct
  misc_feature 1..534: note = Description of Artificial Sequence: Synthetic coding sequence
  source 1..534: mol_type = other DNA
atggcgtggatgttgttgctgattttgatcatggttcacccagggtcttgtgccctgtgggtcagccaacccccagaaatccgcacactcgaaggttcatccgctttccttccctgttcatttaatgcctcacaggggagactcgctatcgggagtgtgacctggttccgggacgaagtcgtgcccggtaaagaggtgaggaatggcaccccagagtttagagggagactggctcccctcgcgtcaagtcggttcctgcatgaccaccaggccgagctgcatatccgggatgtgcgcggtcacgacgcctctatctacgtttgcagggtcgaagtactcggtctaggcgtaggaacagggaacggcaccagactggtggtagaaaaggaacatccacaattaggagccggtacagtgcttctgctccgggctggcttttacgcagtgtcctttctgtccgtcgctgtcggctccaccgtctactaccagggcaaatacgccaagagcacactgtccggattcccccagctctag

SEQ ID NO: 232078 - DNA, 534 bp, synthetic construct
  misc_feature 1..534: note = Description of Artificial Sequence: Synthetic coding sequence
  source 1..534: mol_type = other DNA
atggcatggatgcttctgctgattctgattatggtgcatcccggttcatgcgccctgtgggtgagtcagcccccagagattcggactctagaagggtcttcagctttcctgccatgctcttttaacgcgagtcagggcaggttagccataggttcagtgacttggttccgggacgaggtggttccgggaaaagaagtgaggaatggaacaccggagtttcggggtcggctggcacctcttgccagcagccgcttcttgcacgaccaccaggcggagctgcatatcagggacgttcgaggccatgatgcgtcaatatatgtatgtcgggtggaggtcctggggctgggcgtaggaaccggtaacgggacacgcctagtggtagagaaggagcaccctcagctcggggctggcacagtgcttctcctaagggcgggtttttacgccgtgtcatttctttcagtggcggtaggtagtacagtgtattaccagggtaaatatgcaaaatccactctgagcggttttccacaattgtag

SEQ ID NO: 232079 - DNA, 606 bp, synthetic construct
  misc_feature 1..606: note = Description of Artificial Sequence: Synthetic coding sequence
  source 1..606: mol_type = other DNA
atggcatggatgctgctgttaatccttattatggtgcacccaggctcatgcgcactgtgggtaagccaaccaccggagatacgcaccctggaggggagttccgccttcctgccatgcagttttaatgcatctcagggcaggctggctatcggtagcgtgacttggtttcgggacgaagttgttcctgggaaagaagtgcgtaacggcactccggaatttagggggaggctggctccgctggcgtcttccagattcctgcatgaccatcaggcagaattgcacattcgtgatgttcgaggtcacgatgcctccatttacgtgtgtcgcgtggaggttttaggactgggcgtgggcaccggcaatgggacgcgccttgtggtcgagaaggaacatcctcaactaggggctgggaccgttcttttactgcgggcaggattctacgccgtcagcttcctgagcgtggcggtcggatccactgtctactaccagggtaaatgtctgacatggaaaggtccacgcagacaactcccagcagtggttcccgcacctctgcccccaccctgcggttcttccgctcacctgctcccccctgttcccggagggtag

SEQ ID NO: 232080 - DNA, 534 bp, synthetic construct
  misc_feature 1..534: note = Description of Artificial Sequence: Synthetic coding sequence
  source 1..534: mol_type = other DNA
atggcatggatgctgcttctgattctgatcatggttcaccccggtagctgtgctctgtgggtgtctcaaccacccgaaatacgaaccctggaaggttcctctgcatttctcccatgcagcttcaacgctagccagggtaggctcgccattggatctgtgacatggttccgggacgaggttgtgcccggtaaggaagtccggaacggaacccctgagtttcgcggacggttggcccctctggcttcatccagatttctacatgaccatcaggcagaattgcatatccgagacgttagggggcacgacgccagcatctatgtatgcagggtggaagtgctgggactgggggttgggaccggaaacggaacccggctcgtcgttgaaaaggagcacccccagttgggagcgggaaccgtgctgctcctgagagccggtttctacgccgtatcatttctgtctgtcgcagtcgggtctaccgtatactaccagggcaaatatgcaaagtcgacactgtctggcttcccgcagttgtag

SEQ ID NO: 232081 - DNA, 573 bp, synthetic construct
  misc_feature 1..573: note = Description of Artificial Sequence: Synthetic coding sequence
  source 1..573: mol_type = other DNA
atggcctggatgctgctgctgatactgattatggttcaccctggcagttgtgccctatgggtgagccagccgccagagattcgcacactggagggctccagtgcatttctgccgtgttctttcaatgccagccagggcagactggcaatagggtctgtgacgtggtttcgagatgaggtggttccaggcaaagaagttcgaaacggcactccagagttccggggtcggctggccccattagcctcgtcccggttcttacacgaccatcaagccgagctacacatccgggatgtccggggacacgacgcatcaatttatgtgtgcagagtggaggtcttgggactgggggtgggaaccggaaatggcacgcgcctggtcgtagagaaagagcacccccagttgggagcgggtaccgttctgctcctgagggccggattttacgccgtttcgttcttgagcgttgcagtcggctcaacagtgtattaccaagggaaatgccattgccatatggggacccactgccactcaagcgacggccctcggggagtgataccggagccaaggtgtccttag

SEQ ID NO: 232082 - DNA, 606 bp, synthetic construct
  misc_feature 1..606: note = Description of Artificial Sequence: Synthetic coding sequence
  source 1..606: mol_type = other DNA
atggcctggatgttattgctgatcctgatcatggttcatcctggtagttgcgctctctgggtgtctcagcccccagagatccgaaccctggaagggtccagcgcgttcctgccttgctcctttaatgccagccaggggagacttgccattggttccgtgacatggtttcgggatgaagtggttccgggtaaagaagtgaggaacggaacacctgagttccgaggcagacttgcgccactcgcatcttcccgattcctgcatgatcaccaggcggaactgcatattcgcgacgtgcgcggacatgacgcgtccatctatgtgtgtcgcgtggaggttctgggactcggggtggggactgggaacggtacgcgtctcgttgtggagaaagagcatcctcagttgggcgctggcactgttctgctgctccgcgcaggcttttacgccgtcagctttctaagtgtggcagtgggctctaccgtatactatcagggtaagtgcttaacttggaaaggaccacggcgacagctgcccgcagtggtccccgctcccctaccaccgccatgtggatcatcagcccatctactgcctcctgtacctgggggatag

SEQ ID NO: 232083 - DNA, 498 bp, synthetic construct
  misc_feature 1..498: note = Description of Artificial Sequence: Synthetic coding sequence
  source 1..498: mol_type = other DNA
atggcctggatgttgctgctgattctcataatggtgcatcccggaagctgcgctttatgggttagccagccgcctgagatacgaactttggaaggcagctctgctttcctgccgtgttctttcaacgccagccaggggcgactcgctattggcagtgtgacttggttccgcgacgaagtcgtccctgggaaggaggctgaactccacattagagacgtgcgcggacacgatgccagtatttatgtgtgccgcgtggaggtgttgggcctaggtgtgggcacaggcaatggaacaagattggtcgtggaaaaagagcacccacagcttggtgccggaaccgttctcctgctgcgggctggtttttacgccgtgtcgttcctgagtgtggccgtcggctctacagtgtactaccaggggaagtgtcactgccatatgggaacacattgtcattcttcggatggaccacggggagttattccggagcctaggtgcccctag

SEQ ID NO: 232084 - DNA, 534 bp, synthetic construct
  misc_feature 1..534: note = Description of Artificial Sequence: Synthetic coding sequence
  source 1..534: mol_type = other DNA
atggcctggatgctgttattaatcttgatcatggtccatcccggatcttgtgctctttgggtgtcccagccaccggagataaggactctcgaaggcagtagcgccttcttgccttgctcctttaacgcctcccagggcagactggccataggctccgtgacttggttccgcgatgaggtggtgcccggtaaggaagtgcgaaacgggacacccgaatttagagggaggttagctccattggcatcaagtaggttcctgcacgaccatcaggccgaactgcacattagggacgtccggggtcatgacgcttctatttacgtatgcagggttgaagtgctcggcctaggtgtggggactgggaatgggactcgcctcgtggtcgagaaggagcacccgcaactgggtgccggaacagtcctcctgctccgcgctggtttttatgcagtctccttcctcagtgtggcagtgggatccacagtttattatcagggaaaatacgctaagtccaccctgagcggatttccccagctttag

SEQ ID NO: 232085 - DNA, 573 bp, synthetic construct
  misc_feature 1..573: note = Description of Artificial Sequence: Synthetic coding sequence
  source 1..573: mol_type = other DNA
atggcctggatgctcctgttgatcctgattatggtccaccccggatcatgcgctttgtgggtctcacaacctcccgagattagaacgctggagggcagttccgcctttctgccttgctcatttaatgcctcacaaggcaggctggcaataggaagcgtgacctggttcagggatgaggtcgtaccaggcaaagaggtgagaaatggcaccccagaattccgcggacgcctcgctccacttgccagtagtagattcctgcacgaccatcaagccgaactgcatatcagagacgtcaggggccacgacgccagtatttacgtttgccgagtggaagtactaggcctgggtgtgggaacgggtaacggaacaaggctggtggtggaaaaagaacatcctcagttgggcgctggcacggtgttacttttgcgagcagggttttacgctgtgagttttctcagcgtggcagtgggctccactgtctattatcagggcaaatgccattgtcatatggggacacactgccacagcagcgatggccctaggggcgtgatccccgagcctcgctgcccctag

SEQ ID NO: 232086 - DNA, 534 bp, synthetic construct
  misc_feature 1..534: note = Description of Artificial Sequence: Synthetic coding sequence
  source 1..534: mol_type = other DNA
atggcttggatgctgctgcttatcctgattatggtgcatcccggatcatgtgctctctgggtgagccagccaccggagattcggacgttagaaggcagttcagcctttctgccctgctctttcaacgcttcccagggcaggctcgcaataggcagtgttacttggttccgagacgaagtggtgcctggcaaggaggtgcggaatgggacccctgaattccggggaagattggcacctctcgcctcaagccgattcctccacgatcaccaggctgaactgcacatcagagacgtgcgcggtcacgatgcatcaatatacgtgtgcagagtcgaagtgttgggcctgggagtggggactggtaacggaacccggctagtcgtggagaaggagcaccctcagctgggcgcagggacagtgcttttattaagggcgggtttctatgcagtttcttttctctctgtggccgtgggatctacagtctattatcaggggaagtatgctaaatctaccttaagcggatttccacagctctag

SEQ ID NO: 232087 - DNA, 606 bp, synthetic construct
  misc_feature 1..606: note = Description of Artificial Sequence: Synthetic coding sequence
  source 1..606: mol_type = other DNA
atggcatggatgcttctgttaattcttatcatggttcaccctggaagctgcgcgctatgggtttcacaacctcccgagattcgtactctagagggaagttctgccttcttaccttgcagctttaatgctagccaggggaggctggcaatcggatccgtcacatggttccgggatgaagtcgtgccaggcaaggaagtgcgaaacggaacccccgagttccgaggtagactggccccattggcaagctcaagattcctgcatgaccaccaggccgagctgcatatccgcgacgtaaggggtcatgacgcctctatctatgtgtgtcgcgttgaagtgctggggcttggtgtcggcaccggcaatggcacacggcttgtggttgagaaggagcatcctcagctgggtgctggaaccgtacttcttttaagagccggattctatgcagtgtcttttctcagtgtggccgttggatctactgtgtattaccagggcaagtgtctcacgtggaaaggaccaagaaggcagctcccggctgtggtccccgcaccccttcctccaccatgcggctcctctgcacatctgctccccccagtgccaggcggatag

SEQ ID NO: 232088 - DNA, 573 bp, synthetic construct
  misc_feature 1..573: note = Description of Artificial Sequence: Synthetic coding sequence
  source 1..573: mol_type = other DNA
atggcctggatgctgctgttgattctgataatggtgcacccaggttcgtgtgctttgtgggtctctcagcctcctgagatcaggactctagagggtagctcagcctttcttccttgttcatttaacgccagccaggggaggctggccatcggtagcgtgacttggttccgggacgaagtggtgcccggaaaagaggtccgcaatgggacaccagaatttcgcggacgcttggcccctctcgccagttcacgcttcctgcacgaccatcaagcagagcttcacatacgcgatgtcaggggacacgacgcaagcatctatgtatgcagggtggaggtcctcggcctgggtgtcggaactgggaacggtacccgactggtggttgagaaagagcaccctcagctcggagcaggcacagttttgttgttgcgggctggattttacgccgtcagtttcttaagcgtggccgtaggcagcactgtctattaccaaggtaaatgtcactgccatatgggaactcactgccactcatctgatggccctagaggggtgattccagagcctcgctgtccgtag

SEQ ID NO: 232089 - DNA, 498 bp, synthetic construct
  misc_feature 1..498: note = Description of Artificial Sequence: Synthetic coding sequence
  source 1..498: mol_type = other DNA
atggcatggatgctgctgctcattctgatcatggtgcaccctggctcatgtgccctctgggtgtcacagccgcctgaaatcagaactcttgaggggtcctccgccttccttccctgcagcttcaacgccagccagggtagactggcaatcgggagcgttacttggtttcgcgacgaagtcgttcctggaaaagaggcagaactgcacattagagacgtacggggacacgatgcctccatctatgtctgccgcgtggaagtactgggccttggagtaggaacagggaatggaactcggctcgtcgtcgagaaggagcaccctcagttgggagccggaaccgtgcttcttctgcgcgcagggttctacgccgtatcctttctgtccgtcgccgtcggtagcacagtgtattatcaggggaaatgccattgccacatggggactcactgccacagtagtgacgggcctcggggagtcatccccgagccgaggtgtccttag

SEQ ID NO: 232090 - DNA, 498 bp, synthetic construct
  misc_feature 1..498: note = Description of Artificial Sequence: Synthetic coding sequence
  source 1..498: mol_type = other DNA
atggcctggatgctgcttctgattttgattatggtgcacccaggttcatgcgccctctgggttagccagcctccagaaatacgtacgctggagggctcttcggccttcctgccttgctcctttaatgcgagccaggggagactggctatcgggagcgtaacttggttccgcgacgaggtggtccccggtaaagaagcggaactgcatattcgcgatgtccgtggtcatgacgcctctatctatgtatgccgcgtcgaagtgcttggtttgggggtcgggaccgggaacggcacgaggttggtggtcgagaaggaacatccccagcttggggctgggaccgtgctcttgctccgcgctggtttttatgccgtgtcttttctgtcagtagcagtaggatcaaccgtctattatcagggaaagtgccactgccatatggggactcattgccacagttctgacggccctagaggagtgattcctgaacctcggtgcccctag

SEQ ID NO: 232091 - DNA, 534 bp, synthetic construct
  misc_feature 1..534: note = Description of Artificial Sequence: Synthetic coding sequence
  source 1..534: mol_type = other DNA
atggcctggatgctcttactgattcttatcatggtgcatccgggtagctgtgctctttgggtatctcagccacctgaaatccggacactggagggatcatctgccttccttccatgtagtttcaacgcatcccaaggccgactggctatcggctcggtcacctggttccgcgatgaagtggtgcccggaaaggaagtcaggaatggaacccccgagttccgcggtagactggcacccctcgctagctcgcgcttcctccatgatcaccaggctgaactccacattagagatgttcggggacacgacgcttccatatacgtctgcagggtggaagtcctcggacttggggttggcactggtaatgggacgcgcctagtggtggaaaaggagcacccacagttgggcgcaggcacggtactattactgcgagctgggttttatgcggttagcttcctatctgtggctgtgggaagcactgtatattatcagggcaaatacgctaaaagtacccttagcgggttccctcagctgtag

SEQ ID NO: 232092 - DNA, 573 bp, synthetic construct
  misc_feature 1..573: note = Description of Artificial Sequence: Synthetic coding sequence
  source 1..573: mol_type = other DNA
atggcctggatgctgttgctgattctgataatggtgcatcccggatcctgtgctctgtgggtgtcccagccacccgagatcagaaccttggaaggaagttcagctttcttaccctgctccttcaatgcttcgcaggggagattagccatcggatccgttacgtggttccgggacgaggtcgttccaggaaaggaagtaaggaatgggactcccgaatttcggggtagattagcgccactggcaagctctagattcttgcatgatcatcaggccgaacttcatattcgcgatgtccgaggacatgatgcaagcatatatgtatgccgggtggaggtactgggattaggcgtgggcacaggtaacgggactaggttggtcgtcgagaaagagcatcctcagctcggagcaggcaccgtgttgttgctgcgcgcaggattctacgctgtatcattcctctcagtggccgtcgggagcactgtttactatcagggtaagtgtcattgtcacatggggacacattgccattcttctgatggcccaagaggcgtcatccctgagcccaggtgtccatag

SEQ ID NO: 232093 - DNA, 486 bp, synthetic construct
  misc_feature 1..486: note = Description of Artificial Sequence: Synthetic coding sequence
  source 1..486: mol_type = other DNA
atggacgacatatataaggccgctgttgaacaactgaccgaggagcaaaagaacgaattcaaggctgcattcgacattttcgttctcggagccgaggatggatgtatttcgacaaaagaactaggtaaagtcatgcggatgctggggcagaatcccacccctgaggagctacaggagatgattgacgaggtggacgaggatgggagtgggacagtggacttcgatgaattcctggtcatgatggtccggtgcatgaaagatgattccaagggtaagtcagaggaggaactgagcgatctgtttcgtatgttcgataagaacgctgatggatacatcgatttagatgagttgaaaatcatgttgcaggctactggcgaaaccattaccgaagacgatattgaggaactgatgaaggatggagacaaaaacaacgacggacgaattgactacgacgaattcttagagttcatgaagggcgtggagtag

SEQ ID NO: 232094 - DNA, 315 bp, synthetic construct
  misc_feature 1..315: note = Description of Artificial Sequence: Synthetic coding sequence
  source 1..315: mol_type = other DNA
atgggagcccaagatcgacctcagtgtcacttcgacatagaaattaacagggaacctgttggaagaatcatgtttcagctgttttcagatatttgtcccaaaacatgcaagaactttctgtgcctgtgttctggagagaagggcctaggcaagacgacaggaaagaagctgtgctataagggttctaccttccacagggttgtcaaaaattttatgatacagggtggagacttcagcgagggcaatgggaaaggtggcgagtcaatatatggcggttactttaaagagaacgtggtgttctgtaagatgaaatag

SEQ ID NO: 232095 - DNA, 2805 bp, synthetic construct
  misc_feature 1..2805: note = Description of Artificial Sequence: Synthetic coding sequence
  source 1..2805: mol_type = other DNA
atggcagtgcagcctaaagagacgctccaactggagagtgctgccgaggtgggtttcgttaggttctttcagggaatgcctgaaaaacctactacaaccgtgaggctttttgaccgaggcgacttctacactgcccacggagaggacgccctactggcagcgcgtgaagtattcaagacacagggcgtgataaaatatatggggccagccggagcgaaaaatctgcagtccgtggtgctgtcaaagatgaactttgaatcatttgtgaaggatctgctcttggtgcgtcagtaccgagtggaagtttacaagaacagagctgggaacaaggcctctaaagaaaatgattggtaccttgcttacaaagcctcccctggaaatctgtcccaattcgaagatattcttttcggcaataatgacatgtctgcatccattggagtggtcggcgttaaaatgtccgctgtagatggtcagaggcaggtgggggtggggtatgttgatagtatacagcggaagttaggcctgtgcgaatttcctgataatgaccaattttctaacttggaggccctgctgatccaaataggacctaaggagtgcgttctcccaggaggcgaaacagctggggacatgggcaaattgcggcagataatccaaaggggaggaattcttattactgaaaggaagaaggccgacttttctaccaaagatatataccaggacctcaacagactgttgaagggtaagaagggggaacagatgaattcagcagttctccccgagatggagaaccaggtcgcagtgagtagtctctctgccgtaattaagtttctcgagctgctcagcgacgattccaattttggacaattcgagttaacgacttttgatttctcccagtatatgaaactcgatatcgccgcagtccgggcactgaatctattccagggatccgtcgaagacacgacaggttcccaaagcctggccgcactgcttaataaatgtaagactccgcagggccaacgtctcgtcaaccagtggattaaacagccgctgatggacaaaaaccgcattgaggagcggcttaatctggtagaagctttcgtcgaagacgccgaactgaggcagaccctccaggaggatctacttcggcgatttcctgacctaaaccggctggcgaagaaattccagcgtcaggcggctaatctccaggattgctatcgactgtatcagggcattaatcagttgcccaacgtgatccaggcactggaaaagcacgagggaaaacatcagaagctgctcctggctgtattcgtgacacccctgacagacctgagatctgactttagcaagttccaggagatgatagaaacgacattggatatggaccaagtagagaatcacgagttccttgttaaacccagcttcgaccctaacctgagtgagcttcgagaaatcatgaacgatcttgaaaagaagatgcagagcaccctgatcagtgccgctagggacctgggactggaccccggtaagcagattaaactggactcaagcgcccaattcggctactatttcagagttacttgcaaagaagaaaaagtgctgaggaacaacaaaaacttctccactgttgacatccaaaagaacggcgtgaaatttacaaactcaaagcttaccagcttgaatgaagaatacacaaagaataagactgagtatgaggaggctcaggatgccattgtgaaagaaatcgtgaacattagttcaggatacgtggaacccatgcagactcttaacgacgtactagcacagcttgatgcggtggtctcatttgctcatgtctcgaacggcgctccagtcccttacgttcgccctgctatattagagaagggacaggggagaattattctgaaagcctctaggcacgcatgtgttgaagtccaggacgagatcgcatttataccgaatgatgtttatttcgagaaagacaagcagatgtttcacattattactggacctaacatgggcggtaaaagtacctatatcagacagaccggcgttatcgttctgatggcgcagattggatgcttcgtgccttgtgaaagcgccgaagtaagcatcgtggattgtatactggctcgcgtgggcgctggtgactcccagctcaaaggtgtgtccacctttatggcagaaatgctagaaacggcttctatcctgaggtccgcaaccaaagatagtttgatcattattgacgagctcggcaggggcactagtacatacgatggcttcgggctggcttgggctatcagtgagtatatcgctactaaaattggcgctttttgtatgttcgccacgcactttcatgaactcaccgcactggctaaccaaattcccactgtgaacaacctccatgtgaccgccctgacaaccgaggaaaccctcaccatgctgtaccaggtaaaaaaaggtgtgtgtgaccagagttttgggattcatgtggccgagttggccaacttcccaaaacatgtaatcgagtgcgccaagcagaaggcactggaactggaagagttccagtatattggagagagtcagggctatgacattatggaacctgccgcaaagaaatgctatttagagcgggagcaaggggaaaagataatccaagagtttctatccaaagtgaagcagatgcccttcacagagatgagtgaggagaacattactatcaagcttaaacagctcaaggcagaggtaattgcaaagaataattcctttgtaaacgagattatcagccgcataaaggtgaccacgtag

SEQ ID NO: 232096 - DNA, 435 bp, synthetic construct
  misc_feature 1..435: note = Description of Artificial Sequence: Synthetic coding sequence
  source 1..435: mol_type = other DNA
atgaccgaagaggttattgtgattgctaaatgggactacactgcccagcaagaccaagaattggacattaagaagaatgagaggctgtggttgctggacgattccaagacctggtggcgggtgagaaacgccgcaaaccggaccggttacgtccccagcaactatgtggaaagaaagaactccctcaagaagggcagtttggtgaaaaacttgaaagatacattaggactgggcaagacacggaggaaaacctccgccagagatgctagccctacgccatcaacagatgccgagtaccctgctaacggtagcggcgcagatcggatctacgatctgaatatacctgcttttgttaaattcgcgtatgtcgccgaacgggaggacgagctgtccctggtgaagggatcacgggtaaccgtcatggaaaaatgctag

SEQ ID NO: 232097 - DNA, 1143 bp, synthetic construct
  misc_feature 1..1143: note = Description of Artificial Sequence: Synthetic coding sequence
  source 1..1143: mol_type = other DNA
atgacggaggaggtgattgtcatcgctaaatgggactatactgcacagcaggaccaagaactcgacataaagaagaacgaacgattgtggctactcgacgattccaagacctggtggagagtgcggaacgctgctaacaggacggggtacgtcccaagcaattatgtcgaacgaaagaattcactgaaaaagggatctctggttaaaaatctgaaagacaccctcgggctaggcaaaacccgcaggaagacttctgccagggacgccagtcccacccctagtactgacgccgaatatcctgctaatgggagcggcgcagatcgtatatacgacctgaacatccctgcctttgtgaaatttgcatacgtggctgaacgtgaggacgagcttagcctcgtgaaaggttctagggtgacggtgatggagaaatgttctgacggatggtggcgcggatcctataacggtcagattggctggttcccatccaattacgtcctggaggaggtcgacgaggccgctgctgagtctccctctttccttagcctgaggaagggggctagcctctccaatgggcagggtagcagggtgctgcatgtcgtgcagacactctatcccttttccagcgtgacagaagaagaattgaacttcgaaaaaggagagactatggaggtcatcgagaaacccgagaatgatccagagtggtggaaatgtaaaaacgcaagggggcaggttgggctggtgcccaagaactatgttgtagtactgtccgatggtccagctctgcacccagcccacgcgccacagattagctacaccggaccgagcagctccgggagattcgccggaagagaatggtattatggcaacgtgaccaggcatcaagcagaatgcgcactgaacgaaagaggcgtggaaggcgatttcttaatcagagatagtgaatctagcccgtccgatttttccgtgagccttaaggcctcaggcaagaacaaacattttaaggtgcaactggtcgacaatgtgtactgcattggacagcgcaggtttcatacgatggatgagttagtggagcactacaaaaaggcaccaatattcacatccgaacacggggagaagctttatttggtgagggctctacaatag

SEQ ID NO: 232098 - DNA, 333 bp, synthetic construct
  misc_feature 1..333: note = Description of Artificial Sequence: Synthetic coding sequence
  source 1..333: mol_type = other DNA
atgactgaggaggtcatcgtgatagctaagtgggattacactgcacagcaagatcaggaactggacatcaagaaaaacgagagactatggctgttagatgattctaagacgtggtggcgtgtgagaaatgcagctaaccggaccgggtatgtgccttccaactatgtggagcgaaaaaactcacttaaaaagggctctctcgtaaaaaatcttaaggatactctgggtctcggaaagacacgcagaaaaaccagtgccagagacgcttcgccaactccctccactgatgccgagtacccagcaaacggaagtggggcagacaggatctattag

SEQ ID NO: 232099 - DNA, 252 bp, synthetic construct
  misc_feature 1..252: note = Description of Artificial Sequence: Synthetic coding sequence
  source 1..252: mol_type = other DNA
atgacagaggaagtcattgttattgctaagtgggattatacagcgcagcaggaccaagagctcgatattaagaagaatgaaagactctggctgttggacgattctaagacttggtggcgggtccggaacgccgcaaaccgcaccggctatgtgccgagtaattacgtagagaggaaaaatagtctcaaaaaagggtccctggtgaagaatctgaaggatactcttgcccagaggctcctgcgggtgccatag

SEQ ID NO: 232100 - DNA, 252 bp, synthetic construct
  misc_feature 1..252: note = Description of Artificial Sequence: Synthetic coding sequence
  source 1..252: mol_type = other DNA
atgaccgaggaagtgattgtgattgccaaatgggactacaccgctcaacaagaccaggagctcgacatcaaaaagaatgagcgactttggctactggacgatagcaaaacttggtggagagtgcggaacgccgctaaccgaacggggtacgtccccagtaactacgtggaaagaaaaaattctttgaaaaaaggttctctggtgaaaaacctgaaggataccttggctcaaagattgctaagagtgccttag

SEQ ID NO: 232101 - DNA, 2169 bp, synthetic construct
  misc_feature 1..2169: note = Description of Artificial Sequence: Synthetic coding sequence
  source 1..2169: mol_type = other DNA
atgtacagggctttgtatgcattcaggtccgcagagcccaacgccctggcattcgcagccggtgaaacgttcctggtattggaaaggtcatcagcacattggtggctggcggcaagggctaggtcaggggagaccgggtatgtacctcccgcttacctaagaagactgcagggcctcgaacaggatgtactgcaggcaatcgacagagcgatcgaggccgtacacaatacagctatgcgggatgggggaaagtactcgctggaacaacgcggagtcctccagaaactaatccaccaccgcaaggaaaccctatcacgacgtgggccttccgcctcttccgttgcagtgatgacatcaagtacttcagaccatcatctcgacgccgcagccgcaagacagccaaacggtgtgtgccgcgcaggcttcgagcgccagcactcccttccatctagtgagcacctcggggcagatggagggttatatcagatcccactgccgagttcccaaatcccaccacagcccagaagagcagctccgaccaccccccctcctccagtgaaaagacgcgatcgcgaggcacttatggcttccggcagtggagggcacaatacgatgccgtccggaggtaactctgtgagtagtggaagctctgttagtagcacgagtctggacaccctttataccagctctagccccagcgaaccaggatcaagctgcagcccaacacccccaccagtccctcgccgagggacgcacacgaccgtcagtcaggttcagccacctcctagcaaagcatctgcgcctgagccaccagctgaggaggaggtagcaactggcactacatcagcatccgatgacctcgaggccctcggcacactgagccttggcactacagaagagaaagctgctgctgaggctgcagtccccagaaccataggggcagaattgatggaattggttagacgcaataccggtcttagccacgaactttgcagggtggcaataggaattatagtcggccatattcaagccagcgtaccagccagcagtcctgtcatggagcaggtgctgctgagtcttgtagaaggtaaagatctgagcatggcactcccgtcagggcaggtctgtcatgaccagcagcgactagaagtcatcttcgccgacctggcaagacggaaggacgatgcgcagcagagatcgtgggccctgtacgaagatgagggcgtgataagatgctacctcgaagagctgctgcacatcctgactgatgcagatcctgaagtctgcaaaaagatgtgtaagcgtaacgagtttgaatcagtcctcgctctggtggcatactaccaaatggagcaccgcgctagcctgcgactgcttttgttaaaatgcttcggagccatgtgctctctggatgccgctataatctcaacattagtctccagcgtattgccagtcgaactggctcgggacatgcagacggacacccaggatcatcagaagttgtgttacagtgcactgatcctggcgatggtgtttagtatgggcgaagctgtcccttacgcacactatgagcatctggggacgcctttcgcacagttcctcttgaatatagtggaggatggactgcccctggatacgacagagcaattaccagacctgtgtgttaatttgttgttggcgctcaatttacatcttccggcagcagatcagaatgtcatcatggcggcactctctaaacacgctaacgtcaaaattttcagcgagaaattattgctcttgctgaaccggggtgacgaccctgtccgaatcttcaagcatgaaccccaacctcctcattccgttctgaagtttctccaggatgtgttcggttcccccgctacagctgctatcttttatcataccgatatgatggccctaattgatatcactgtacgccacatagcggatctttcaccgggtgacaaactgcgaatggaatatctttcattgatgcatgccattgtgcgaacaaccccatatctccagcacaggcaccgcctgcctgacctgcaagcgatactccgacgcatattgaatgaagaagagactagtccacagtgccagatggaccggatgatcgtgcgagaaatgtgcaaggaattcctcgtactgggcgaggccccatcctag

SEQ ID NO: 232102 - DNA, 2169 bp, synthetic construct
  misc_feature 1..2169: note = Description of Artificial Sequence: Synthetic coding sequence
  source 1..2169: mol_type = other DNA
atgtaccgtgccctatacgcattccgttctgctgagcccaatgctctcgctttcgctgcgggagagacatttctggtcctggaacggagctctgcacattggtggcttgccgcacgggctcgatcaggtgagacgggatacgtgccacctgcataccttagacggttacagggcctagagcaagatgtgttgcaggcgatcgacagagccattgaagccgtgcacaatacagcgatgcgcgacggcggaaaatattcccttgaacagcgaggtgtgctgcagaagctaatacaccaccgcaaagaaacactaagcagacgcggacccagcgcatcttccgtggctgttatgaccagtagtaccagtgatcatcatctggatgctgcggctgctcgacagcctaacggcgtttgcagggccggatttgagcgacagcacagtctgcccagcagtgagcatctaggcgctgacggcggtctgtaccaaatccccctgccctcttcacagatcccccctcaaccacgtagagccgctccaactacgccccctcccccagtcaaaagacgggaccgggaagcgttgatggcctccgggtccggaggtcataatactatgccaagtgggggaaactcagtgtcgagcggtagttctgtcagttccacatcccttgatacgttatatacgtcgagctctccctcagagcctggatcaagttgctctcccacacctcccccagtgccacgcaggggaacacatactactgtctcgcaggtgcagcctccccctagtaaggctagtgcacccgaacccccagctgaggaggaagtggcaacgggtactacatcagcctcagacgacctggaggccctgggcaccctgtctttgggtacaaccgaggagaaggctgccgctgaagccgctgtgccacgaacaattggcgctgagttaatggagttagtcaggcgtaatactgggctgagtcacgaactgtgtcgggtggcaatcggaatcatcgtgggacacatccaggcaagcgtgcccgcatcaagccctgttatggagcaggtgttactcagtttggttgaaggaaaggacctgtccatggccctgcctagcggacaggtctgccacgatcagcagcgcctggaagtcatcttcgccgatctcgccagacgcaaggacgacgcccagcaacggtcctgggccctgtacgaggacgaaggggtcatccggtgttaccttgaagaacttctgcacattctcactgacgcagaccccgaagtctgcaagaagatgtgtaaacgtaacgaatttgagtcagtcctagctctagtcgcctactaccagatggagcatcgagcctccctgcgcctgctgctgctcaagtgcttcggagctatgtgttccctggacgccgctatcattagtactctcgtgagctcggtgcttcccgtggaactggccagagacatgcaaactgatactcaggaccaccagaagctgtgttacagcgcgttaatccttgccatggtgttttcaatgggagaggcggtaccgtatgcacattacgaacatctgggaacgccgtttgcgcagttcctgttgaacatcgtggaagacgggctgcccttagacacaaccgagcaactccctgatctatgtgtcaatctgctgctggccttaaacctccacctgccagccgctgaccagaatgtcatcatggccgcacttagcaaacacgctaacgtaaaaatcttctcagaaaaattgctgcttctgttgaaccgtggtgatgaccccgtccgcatttttaagcacgagccacagccccctcattctgtgctgaagtttctccaagacgtctttggctcacctgccactgccgctattttttatcacacggacatgatggctcttatagacataaccgtccgacacatcgctgacctgtctcctggtgataagggtccgttcggtgccggacagcggccttggcccggtgtgcctcgtctgctagagccagggagcactccaagcagagagccccatcctgtggaacgaagcggcgtgcctgcacttacctctagttgggcttccggatgtccacgtccacttcatccggcattacaattggtgattgacagtgccttcggaggcagaagcgtctag

SEQ ID NO: 232103 - DNA, 2148 bp, synthetic construct
  misc_feature 1..2148: note = Description of Artificial Sequence: Synthetic coding sequence
  source 1..2148: mol_type = other DNA
atgtaccgtgccctgtacgcgttcaggtccgctgagccgaatgccttagcctttgcagccggtgagacctttctggtgctggaaagatcatccgcccactggtggctagctgccagagctcgctccggcgagactgggtacgttccacctgcatatttgcgtcgtttgcaagggttggagcaggatgtgctacaggcgatcgaccgggcaatcgaagccgtgcacaacaccgccatgagagatgggggaaagtacagcctggaacaacgcggtgtcctgcagaagttaattcatcataggaaagagaccctgagtcgtcggggtccatccgcctccagcgttgccgttatgacttcatctacctcggatcaccatctcgatgctgccgcagccaggcaaccgaatggcgtatgtagagccggttttgaaaggcaacacagcctgccaagctccgaacacttgggagccgacggcggattgtaccagatcccccctcagccccgtcgtgctgcccctacgacacccccacctccggtcaagcgacgagatcgtgaggcacttatggcctctgggagcggcggacataacaccatgccgtccgggggtaatagcgttagctccggtagcagtgtttcctcaacctctcttgacaccttatacacaagttcgtcccctagtgaacccggttccagttgcagccccactcctcctcctgtaccgagaagaggaacccacactaccgtgagccaggtacagccacctccttctaaggcatccgcacccgagcctcctgccgaagaagaggtagccaccggaactacatccgcatccgacgatctcgaggctctcggcacgctctcgctggggactacggaagagaaagccgctgccgaagctgccgtgccgagaaccatcggcgctgagctaatggagttggtcagacgaaataccggactttcccacgaactgtgtcgcgtggccataggtataatcgtgggccatatacaggccagcgtgcctgcctcctctcctgtgatggagcaggttcttctttctctggtggaggggaaagatctgtctatggccctcccctccggacaggtctgccatgatcagcaaagacttgaagttatattcgctgaccttgctcgccgaaaagacgacgcacagcagaggagttgggcactgtatgaggacgagggagtcatcagatgctacttagaggaactgctacacatcctcacagatgccgacccagaggtttgtaagaagatgtgcaaaaggaatgagtttgaatccgtactggccctagtagcctactaccaaatggagcaccgagcgagcctgcgactcctgctgctcaagtgctttggagctatgtgttcgctggacgcggctattatatcaactctggtgtctagcgttctgcctgtggagctggcgagagatatgcaaaccgacactcaagaccatcagaaactttgctactccgccctcatcttagcaatggtctttagcatgggcgaggccgtgccctacgctcattatgagcatcttggcaccccattcgcacaattcctgctcaatatcgtcgaggacggcctcccattggacactacagaacagctgcctgatctttgtgtgaaccttctgctcgctctaaatttacatctccctgcagctgatcagaacgtgataatggccgctcttagcaaacatgctaacgtcaagattttctccgagaagctgctcttactgctgaaccgaggggacgatcctgtgcgtattttcaaacatgaacctcaaccaccccactctgtgttaaagtttctacaggacgtttttggaagcccagctacagcggcaattttttaccacaccgacatgatggcattgatcgatatcaccgtgagacacattgcagacttaagccccggagataaactgaggatggagtatctttctctcatgcacgccatcgtgcgaacaaccccttatttgcagcatcgacaccgccttccagatctccaggcaattctgagaagaattctgaacgaagaggagacctccccccagtgtcagatggatcgaatgatagtgcgggagatgtgcaaagaattcctggtattaggcgaggccccttcctag

SEQ ID NO: 232104 - DNA, 3405 bp, synthetic construct
  misc_feature 1..3405: note = Description of Artificial Sequence: Synthetic coding sequence
  source 1..3405: mol_type = other DNA
atgagcagaagtgttctgcagccgtctcaacagaagcttgccgaaaaattaactatattgaacgaccgtggagttggcatgctgacgcgactgtacaatattaagaagcaggggcaggtttggaaagcgtgcggcgaccccaaagcgaaacctagttacctgatagataagaatctggagtctgccgtcaaattcatcgtccgcaaatttcccgctgtggagacacgcaacaataatcaacagttggctcagctccaaaaagagaaatccgagatcctgaagaacttggccctttactattttaccttcgttgatgttatggagttcaaagaccatgtgtgcgaactgctcaacacgatcgacgtctgccaggtgttctttgatattacagttaattttgatcttacaaagaactatctcgacttaattatcacgtacactacactcatgattctactgtcccggattgaggagaggaaagccatcatcggcttatataactacgctcacgagatgactcatggggcaagcgatcgcgagtatcctcggttggggcagatgatagtggactatgaaaacccacttaaaaaaatgatggaggagttcgtgccacactctaaatccctgtccgatgccctaatctcactgcagatggtgtaccccagacggaatctgagcgctgaccagtggcggaacgcccagctccttagcctcatctcggccccaagcacgatgctgaatcccgctcagtctgacactatgccttgcgagtacctctcattggacgcgatggagaagtggataatttttggtttcattctctgccacggcattctaaacaccgatgctaccgcactgaacctttggaagctggcactacagtcatcatcctgtctgtccctatttcgtgacgaagtgttccacattcacaaggctgcagaggatctctttgtcaatattcggggatacaataagagaataaatgacatcagggagtgtaaagaagccgcagtgagccatgctggttccatgcaccgtgaacgccgaaaatttctcaggtcagcactgaaggagctagccacagtgctgagtgaccagccaggcctgttgggtcctaaggccttatttgtgtttatggccctgtccttcgctcgggatgagatcatttggctcttgaggcacgccgacaacatgcctaaaaagagcgccgatgactttatcgataaacatatagcggagctgattttttacatggaagagttacgagcccatgtccgaaagtatgggcctgtcatgcagagatattatgtccagtatctgtctgggtttgatgccgttgtcctgaacgaacttgtgcaaaacctgtccgtgtgtcccgaggatgagtcaatcattatgagtagctttgtgaataccatgacatccctgtcagtaaagcaggttgaggatggggaggtgttcgattttagaggaatgagactcgactggttcaggctgcaggcgtatacttccgtgtcaaaggcaagcctggggctggcagaccaccgcgagctcggtaagatgatgaacactattattttccacaccaaaatggttgacagcctggtagaaatgctggtggaaacctctgatctgtcaatcttctgcttctactcccgagcctttgaaaaaatgttccaacaatgcctggagctcccatcacagtcaagatactcaattgcctttccactgctctgcacccactttatgagctgcactcacgaactgtgtccagaggaacgacaccatattggcgaccgctctctcagtctttgcaacatgtttctggatgagatggccaagcaggcccgaaacctcattactgatatttgcaccgaacagtgtactctctctgaccagttactgccaaagcattgcgcaaagactatcagccaggcagtgaataaaaaatcaaaaaagcagacgggcaaaaagggggagcctgaaagagagaagcccggagtggagagtatgcggaaaaatcgcctggttgtgacaaacctggacaagcttcacaccgccctctccgaactgtgctttagtatcaactacgttcccaatatggttgtgtgggaacacacatttactccgcgtgagtacctaacaagccacctcgaaatccggttcactaaatcaatcgttggaatgaccatgtataatcaggctacgcaggagatcgcgaaaccatctgaactgttgaccagtgtgcgggcttacatgaccgtgttgcaaagcatcgaaaattacgtgcagatcgatataacccgtgtctttaacaatgtgctgctgcagcagacacagcacctcgattcccacggggaacccacaataacatctctctacacaaactggtacctagaaaccttgcttagacaggtttcaaacggacacatcgcctatttccctgcaatgaaagctttcgtgaacctgccaacagagaacgagctgacatttaacgcggaggaatattccgacatctcagaaatgaggtcactgtcagaattgctgggtccatatggcatgaagttcttgtcggagagtcttatgtggcatatttcctctcaggtggccgagctgaagaagctagtggttgagaatgttgacgtcttgactcaaatgaggacaagcttcgataaacctgatcaaatggcggctctgtttaagcggctctcctcagtggactcagtattgaagcggatgacaataatcggtgtaatcctctcctttcggtcacttgcccaggaagccctccgagacgtgctcagttatcatattccgtttctggtgtcttcaattgaggacttcaaagatcacattcctcgggagactgacatgaaggtggccatgaacgtgtacgagctctcaagtgcagcgggtctcccatgcgagattgacccagccctggttgttgcgctctcctctcaaaagtccgagaatatcagtcccgaggaagagtacaagatcgcgtgcctgctgatggtgtttgtagccgtgtcgctgcctacactcgcttctaacgtgatgagccagtactcgcctgccatcgaagggcattgtaataacatccactgcctcgcgaaagccatcaaccaaatcgccgcagcattatttactattcataaggggagtatcgaagacagactaaaagagttcttggcacttgcctcatctagtcttctgaaaattggacaagagacggacaaaaccactacgcggaacagagagtccgtgtatctcctgctcgacatgatcgtgcaggaatcaccatttttgaccatggacctcctagaaagttgtttcccctatgtgctcctgaggaacgcgtaccacgctgtgtataaacagagcgtgacttctagtgcatag

SEQ ID NO: 232105 - DNA, 3387 bp, synthetic construct
  misc_feature 1..3387: note = Description of Artificial Sequence: Synthetic coding sequence
  source 1..3387: mol_type = other DNA
atgtcgcgcagcgtgttgcagccatctcaacagaagctggcagaaaagctcaccattttaaacgacagaggtgtgggcatgcttactcgcctgtacaacatcaaaaaggcatgtggggatcccaaggccaagccatcttatttaattgataaaaatctggagagcgccgtgaagttcatcgttcggaaatttccagccgtggaaacacgcaataacaatcaacagctggctcagctccaaaaagaaaagtccgagattctcaaaaatctagctttgtactatttcaccttcgtggatgtgatggagttcaaagatcacgtttgcgagcttctgaatactattgacgtgtgtcaggtgtttttcgatataactgtgaacttcgacctcacaaagaattatttggacttgatcatcacctataccacgctcatgatccttctgagccgtatcgaggaaagaaaagctatcatcgggctgtacaactatgcgcacgagatgacccatggtgcgtccgatagggagtatccccgactgggccaaatgatcgttgactatgagaaccccctgaagaagatgatggaggaattcgtcccgcattcgaaatccttgtccgatgcgcttatcagcctgcagatggtgtacccgaggaggaacctgagcgccgaccagtggaggaacgcccagcttctgtccttgatttcagcgccatctaccatgctgaacccagcccagtccgacaccatgccctgcgaatatctatccctcgacgctatggagaaatggataatattcggattcattctttgtcatggtatcctcaacaccgatgccaccgcccttaacctctggaagctcgcgttacagtctagcagctgcttatctctgtttagagatgaggtgtttcacattcacaaggcagcggaagatctgtttgtcaacattcggggatacaacaagaggatcaatgacatcagggaatgtaaagaagccgcagtcagccatgcgggatcgatgcatagggagcggcgaaagttcttacggtctgcactcaaagagctggccacagttctcagcgaccagcctggacttctggggcctaaggctctgttcgtttttatggcgctcagttttgccagggatgaaattatctggctcttacggcatgcagataatatgccgaaaaagtccgccgatgattttattgacaagcacatcgctgaactgatcttctacatggaggaactgagggcccatgtaaggaaatacggcccagttatgcagcggtactatgtccagtacctgagcggattcgacgctgtcgtgctcaacgagttagtgcagaacctctccgtctgtcctgaggatgagagcattattatgtcttctttcgtaaacaccatgactagcctgagtgtgaagcaggttgaggacggcgaggtcttcgacttccggggtatgcggctggactggttcagactccaggcatacaccagcgtcagcaaggccagtctcggactcgccgaccacagagagctgggaaagatgatgaatacaatcatcttccatactaagatggtggacagtctggtcgaaatgcttgtggagacaagtgatctgtccatcttctgtttttatagcagggcctttgagaaaatgttccaacagtgcctggaacttcctagccagagcagatactccatcgccttccctctgctctgcacgcattttatgtcgtgcacacatgaattgtgtccggaggagcgacatcacatcggagatagaagtctttccctatgcaatatgttccttgatgagatggcgaaacaggctaggaatctgatcaccgatatctgtaccgaacagtgcacactttcagatcagcttcttcctaaacattgcgcaaagaccatctctcaggccgtgaataagaagagcaagaagcagacagggaaaaaaggagagcctgagcgcgagaaacccggtgtcgaaagcatgcggaaaaaccgcttagttgtgacaaacctggacaagctgcacacagccctgtctgaactctgtttctccatcaactacgtgcccaacatggtggtgtgggagcacacctttacaccgagagagtacctgacctcccatctcgaaatccggtttaccaagagcattgttgggatgaccatgtacaatcaagcaacccaggaaatcgccaagccttcagagctcttgacttctgtccgcgcttacatgactgtgctgcagagcatcgagaactatgtccagatcgatatcacaagagtgttcaataacgtgcttctccagcagacacagcaccttgattcccacggcgagcccactattacctccctgtatactaattggtatctggagaccctactgcgacaggtgtctaatggtcatatcgcctattttccggcaatgaaggcttttgtgaacttacccaccgagaatgagcttaccttcaacgccgaggagtattcggatatcagcgagatgcggtccctgtccgagctgcttggcccttatggcatgaagttcctgtccgagagtcttatgtggcatattagctcccaagtagccgagctgaagaagctggtggtcgagaacgtagacgtacttactcaaatgcggacctccttcgacaaacccgaccagatggccgctctgtttaaaagactgtcctcagtggatagtgtactcaagaggatgactatcatcggagtgattctgtcctttcggagcctggcacaggaggccttgagggatgtgctctcctaccacattcccttcctagttagcagcatcgaagactttaaggaccatatccctcgcgagaccgatatgaaggtggccatgaatgtgtatgaactgtcctccgccgctggtctcccatgtgagattgacccagctctcgtggtggccctgagtagccagaagtctgaaaatatcagccccgaggaggagtataagattgcttgtttacttatggttttcgtggcggtgtcactccccaccctcgctagcaacgtcatgtcccagtactccccagctatcgagggccattgcaataatattcattgcctcgcgaaggccataaaccaaatagcagccgctctttttaccatccataaaggatctattgaggatcgtctaaaggaattcctcgccctggcttcaagttctctgctcaagatcggccaagaaacagacaagactacaaccaggaaccgggaaagcgtttacctcctcctggacatgatcgtgcaggagtcccctttcctgacaatggacctgctggagtcctgctttccctatgtgctgttgcgtaatgcctatcacgccgtgtataaacaaagcgtgacttcctctgcctag

SEQ ID NO: 232106 - DNA, 2649 bp, synthetic construct
  misc_feature 1..2649: note = Description of Artificial Sequence: Synthetic coding sequence
  source 1..2649: mol_type = other DNA
atgccagctctcgcttgcctcaggaggctttgccggcacgtttccccccaggctgtcttattcctgctgttcatcttctgcttattcagtgtgtttatttcagcttactacctgtatggatggaaaaggggattggagccaagcgccgacgcccctgagcctgactgcggcgatcctccacccgtagcccctagccgcctgttgcccctgaaacctgtgcaagccgctacgccatccaggaccgacccactggttttggtctttgttgagtccctgtacagccagttgggccaggaagtagtggcaattctggaatccagccgcttcaagtaccgcactgaaattgcacctggcaagggagatatgcccacactgaccgacaagggccgaggaagatttgcattgattatatacgaaaatattctgaagtacgtgaatctcgacgcctggaaccgggaactcctggacaaatactgtgtggcttacggcgtgggaattattggtttctttaaggcaaatgagaacagcctgcttagcgcccagttaaaagggtttccattgtttctccacagcaacctcggcttaaaggattgttccattaaccccaagtcacccttactctatgtgactcgaccatccgaggtcgagaagggcgtattgccaggagaggattggacagtctttcagagtaatcacagcacatatgaaccagtcctccttgctaagacaagatcaagcgagtctatcccacacctgggagcggatgcagggctacatgcagcgttacacgcaaccgttgtgcaggacctgggcctccacgacggtatacagagagttctctttggaaacaacctcaatttctggcttcacaagttggtgttcgttgacgcagttgctttcctgacaggcaaaagactgtccctgcccctggatcggtacattctggtagacattgatgatatatttgtaggtaaggaaggaacaagaatgaaggttgaggatgtgaaagccctgttcgatactcagaacgaattgagagcgcacattcccaactttacatttaatttaggttattccggcaagtttttccacactgggactaatgccgaagacgctggggatgatctgctgttgagttacgttaaagaattctggtggttcccacacatgtggtcccacatgcagccacatctttttcacaatcagagtgtactagctgagcaaatggctctcaacaagaagttcgcggtcgagcatggaatcccaacggatatggggtatgctgtagcccctcatcattcaggagtctatcctgttcatgtgcagctgtatgaggcctggaagcaggtgtggagtattagagtgacttctacggaggagtaccctcatttgaaacctgcccgataccgcagggggtttatccacaacgggataatggtgttgccaagacaaacttgcggtctttttacacacactattttctacaatgagtacccagggggtagctctgagctagataagattatcaatggaggggaactctttctgacagtgctactgaacccgatctctatctttatgactcatctgagcaactatggcaatgatcgactgggactgtacacatttaaacacctggttagattcttacacagttggacaaacttgagactgcagaccctgccgcctgtccaactggcacagaagtatttccagatcttctccgaggaaaaggaccccctctggcaggacccctgcgaggataaaaggcacaaggatatttggagcaaggagaaaacctgtgacagattcccaaagctgctaattattggtccccagaagaccggaacaacagctctgtatctgtttctggggatgcaccccgacctgtcatccaactacccttcctcagaaaccttcgaagagatccagttctttaatggccacaactaccacaagggaattgattggtacatggagttttttccgattccttcaaacaccacatctgatttctacttcgagaagtcggcgaactatttcgactccgaggtcgccccacgacgagctgccgcacttctgccaaaagccaaggtcttgacaatcctaatcaacccagccgatagggcatactcctggtatcagcaccaaagggcccacgatgatcccgtggccttaaagtacacctttcacgaggttatcactgcgggatctgatgctagcagcaagctgcgggcacttcaaaataggtgcctggtccctggctggtacgctacacatatcgagcgatggctttccgcctatcatgcgaaccagatcctggtgttagatggaaagctgctgcgcacggagcccgctaaggtcatggatatggttcaaaaattcctcggtgttactaataccatcgattaccataagacactggcctttgacccaaaaaagggcttttggtgccagctgctagagggaggtaaaaccaagtgtctcggtaaatccaagggaagaaagtatcccgagatggacttagatagccgggcattcctcaaagattactatcgtgatcacaacatcgagttaagcaagctcctatacaaaatgggtcagaccctgcccacctggctgcgggaagatctgcagaatacgaggtag

SEQ ID NO: 232107 - DNA, 72 bp, synthetic construct
  misc_feature 1..72: note = Description of Artificial Sequence: Synthetic coding sequence
  source 1..72: mol_type = other DNA
atgcctgctcttgcctgccttcgcaggttgtgtcggcacgtatctccgcaagcagtgctgtttctcctctag

SEQ ID NO: 232108 - DNA, 480 bp, synthetic construct
  misc_feature 1..480: note = Description of Artificial Sequence: Synthetic coding sequence
  source 1..480: mol_type = other DNA
atgcctgctctggcttgtctgcgtcgactttgtagacatgtgtcgccccaggcagttctgtttctgctcttcattttttgcttattctccgtctttattagcgcttactacctctacggttggaagcgaggcctggagccttccgctgatgctcccgaacctgactgcggggatcctccaccagtcgctccgagccgactgctgcctctcaagcctgtgcaagcagccaccccatctaggacagatcctctggttctcgtgtttgtcgagtccctgtatagccagctcggccaggaagtggtcgccatccttgaatcctctagattcaagtacaggaccgaaatagccccaggcaaaggcgacatgccgacgctgaccgacaagggtcgcggtaggtttgcgttgatcatctatgagaatatactgaaatatgtcaatctggatgcttggaacagagagctcctggacaagtactgttag

SEQ ID NO: 232109 - DNA, 207 bp, synthetic construct
  misc_feature 1..207: note = Description of Artificial Sequence: Synthetic coding sequence
  source 1..207: mol_type = other DNA
atgccggctcttgcctgtttaaggaggctctgtaggcacgtgagtccacaagccgtcctgttcctgctgttcatcttttgcttgttctctgtgttcatcagcgcctactacctttacggttggaaacgcggactggagccaagtgcggacgccccagaacccgactgtggcgatccccctcctgtcgcaccgtcgaggctgctttag

SEQ ID NO: 232110 - DNA, 2283 bp, synthetic construct
  misc_feature 1..2283: note = Description of Artificial Sequence: Synthetic coding sequence
  source 1..2283: mol_type = other DNA
atgcctactctgacagataatacacacgggcgttatgtgctggtaatctatgagaatctgcttaagtatgtgaacctcgacgcatggagccgggagttgctggacaggtattgcgtcgagtacggggtggggataatcggcttttttcgggctcatgaacatagcttgctctctgcacagctgaaaggctttccactttttttacactccaacctaggactgagagattatcaggtgaaccctagcgctccattactacatctgacccgccctagccgtctggaacctggaccactccctggcgacgactggactatattccaaagtaaccactctacatatgaaccagtcttgctcgccagccttagaccagccgagcctgcagttccgggaccagttctgcggagggctcggttacccacagtggtccaggaccttggtctgcacgatggcattcagagggtgctttttggccacgggttatccttctggctgcataagcttatctttgtcgacgccgtggcttacttgacagggaagcggctgtgcctggatttggatagatatatccttgtggacatcgacgacatcttcgtgggtaaggagggtacccggatgaaagtcgccgacgtcgaagcgctgctgacaacacagaacaagctgagaacactggtcccaaactttacctttaatctggggttctcagggaaattctaccacactggcaccgaagaagaagatgctggcgatgacatgctcttgaagcacagaaaagagttctggtggtttccacacatgtggtctcatatgcagcctcacctgttccataaccgctctgtgctcgctgaccaaatgcgtctgaataaacaatttgcactggagcacgggattccaactgacctcggatacgccgtagcaccacatcacagtggcgtctatcctatccacacccaactttacgaagcatggaagtctgtctggggcattcaagtaaccagcacagaggagtatcctcatctgcggcctgccaggtatcgtcgaggattcatacataacgggataatggtactgccacgccagacctgtggcctgttcacgcacaccatcttttacaacgaatatcccggtggcagccgtgaattagacaggagcatccgaggcggagagctgttcctgaccgtacttttgaacccaatttccatttttatgacccatctgtccaattacggtaacgacaggctcggcctctacacctttgagtccctggtgcggttcttgcaatgctggaccagattgaggctgcagacccttccccctgttcctctagcgcagaagtattttgagctgttcccgcaggaaaggtcgcctctgtggcaaaacccctgcgatgataagagacacaaggacatctggtccaaggagaaaacctgtgataggctccctaagtttctcattgtgggcccacagaagaccggaaccacggccattcatttctttctatccctgcacccagcagtgacatctagtttccctagtcccagtacatttgaggagatacaatttttcaacagcccgaattatcataagggaatcgattggtacatggatttttttcccgtgccaagtaatgcttccaccgacttcctgtttgaaaagtcagccacctacttcgactccgaggtcgtccctaggaggggcgctgcgcttctgcctcgcgctaagattatcaccgtgctcacgaatccagccgatagagcctatagctggtaccaacatcaaagagcccatggagacccagttgcattgaactatactttctaccaggttatcagtgctagctcacagacaccactggccctgcgcagcctgcagaatcgatgtctagtcccagggtactactctacacaccttcagcggtggcttacctattatccatccggccaattattgatcgtggacgggcaggagctgagaacaaacccggcagctagtatggagtccattcaaaaattcctgggaatcacaccatttctgaactacactaggaccttacggttcgacgatgataagggcttctggtgccagggcttggaaggtggtaaaacccgctgtttgggtaggtcaaaagggcgaagataccccgatatggacaccgaatctcgcctgttcctcactgacttcttcagaaaccacaacctggaactttctaagctgctgagtcgactgggtcagcccgtgccttcttggctgcgggaggagctgcagcactctagcctggggtag

SEQ ID NO: 232111 - DNA, 2652 bp, synthetic construct
  misc_feature 1..2652: note = Description of Artificial Sequence: Synthetic coding sequence
  source 1..2652: mol_type = other DNA
atgctacagctctggaaagttgtgcggcctgctcggcagctggagctgcacaggctgatcctactcctcatcgcattcagcctcggctcaatgggctttctggcttactacgttagtacaagcccaaaggctaaggaacctcttccactgcctctcggggactgtagtagcgggggtgcagctgggccaggacccgcacgtcccccagtgccacctcggcctccaagacctcctgagactgctagaacagagcccgtggtgctggtgttcgtggaaagcgcctattctcagctaggccaggaaattgtcgccatattagaatccagtcggttccgttattccactgagctggcgcctggaagaggggacatgcccactctgacagacaatacccacggcaggtatgttctagttatctacgagaatttactcaagtacgtcaaccttgacgcatggtccagagagctcttggacagatactgtgttgaatacggcgtaggcattatcggatttttcagagcgcacgaacattcactcctgagcgctcagttgaagggattcccactgtttctgcacagtaacctcgggctgcgcgactaccaggttaatcctagtgccccactactccacctcactcggccatctaggctagaacccggaccgcttcctggcgatgattggactatcttccagtccaatcacagtacatacgaaccagtgctgcttgcctctctgcgcccagccgaaccagccgtaccagggcctgtactgcgtagagcccgtttgccgacagtggttcaagatctgggactacatgacgggatccagcgagtcttgttcggacatggactttccttctggctgcacaaacttatttttgttgatgccgtggcatatttaacaggtaaaagactttgcctcgacctggacagatatattcttgtggacatcgacgacattttcgttgggaaggaggggacaagaatgaaggtcgccgatgttgaagctctgctcaccacccagaataaactgaggactctggtgcctaacttcacttttaatttggggttctccggcaaattttaccacactggcactgaggaagaggacgccggagacgacatgttgctaaagcaccgcaaggagttttggtggttccctcatatgtggtctcatatgcagccccatttatttcacaaccgctccgttctcgcagatcagatgagactgaacaagcagttcgctctggagcatgggattcccactgacttaggatatgcagtggcccctcaccatagcggggtgtacccaattcacacacagctgtatgaagcatggaaaagcgtctggggcatccaggtgacatctaccgaagagtacccacatctacgacctgcacgctaccggagaggcttcattcataacgggattatggtactgccccgacagacttgtggactcttcactcataccatcttctacaacgaataccccggtggtagcagagagctcgatagaagtattcgcggaggcgagctttttctgacagtgctgttgaatcctatcagcatctttatgacacacctgagcaactacggcaacgacaggcttggcctatatactttcgagtcgctggtgcgttttctgcagtgttggaccagactgagactccagacgctgccccctgtccccctggcccaaaagtatttcgagctcttcccacaggagagatcccctctgtggcagaatccatgcgacgataaaaggcataaggacatctggtctaaggagaagacctgtgatcgacttcccaagttcttaatagtgggaccacagaaaacaggcacaaccgcgatccacttttttctcagtctgcacccagcggtgacatcctcattccctagcccatctacatttgaagagattcaattctttaatagccccaattaccacaaaggaattgattggtatatggatttctttccagttccctctaatgcttctactgattttttgtttgaaaaatctgcgacctacttcgattcagaggtggtgcctaggagaggcgctgccctgctgccccgtgccaagatcatcactgtgcttacgaaccctgctgatcgtgcatattcttggtatcaacaccagagagctcatggtgatcccgtcgccttgaattataccttttaccaagtcatttcagcctcgtctcagacccctctagctctccgaagtctccagaacagatgtttagtccctggatactattccactcacctgcagaggtggctaacatactacccatctgggcagctactgattgtagacggtcaggaactaagaacaaaccccgcagcttccatggagtccattcagaagttcttgggtatcacgccgttcctaaactacacaagaactctcagattcgatgacgacaaagggttctggtgccagggcctggaagggggaaaaacgcggtgcctggggagatccaagggcagacgataccccgacatggacacagaaagccggctcttcctgactgatttcttcaggaaccacaacctggagttaagcaaattgcttagccggctgggccagccagtcccatcctggctcagggaagagttgcaacacagcagtctggggtag

SEQ ID NO: 232112 - DNA, 450 bp, synthetic construct
  misc_feature 1..450: note = Description of Artificial Sequence: Synthetic coding sequence
  source 1..450: mol_type = other DNA
ggcgatcccgtggccctgaactataccttttaccaggtgatcagcgccagttcccagactccattggccctgcgatccctccagaatcgatgcctagtccccggttattactctacgcacttacagcgatggcttacgtactatcccagcgggcagctcttgatcgtcgatggacaggagctgaggaccaatcctgccgctagcatggagagcatccagaagtttcttggaattaccccattcctgaattacacgaggacactccgctttgatgacgataaggggttctggtgtcaaggcctggagggcggaaagacacgatgcctaggcaggtcgaagggcagaaggtatccagacatggacacggaagtgtccaaggcgagaggtaggggcatccctcttcactttcaggatttaatattgtgtccaaccagttatcatttctgctag

SEQ ID NO: 232113 - DNA, 696 bp, synthetic construct
  misc_feature 1..696: note = Description of Artificial Sequence: Synthetic coding sequence
  source 1..696: mol_type = other DNA
atgcgggtgccagtgttcgaagatatcaaggacgaaacagaagaagaaaaaattggagaggaggaaaatgaggaggatcaggtcttctacaagcccgtgatcgaagatcttagtatggaactggccagaaaatgcaccgagctgatcagtgacataagatacaaagaggaattcaagaagtcaaaggacaaatgtacttttgtgacagactccccaatgctgaatcatgtgaagaacattggagcctttattagcgaggccaaatataagggcaccataaaggcggatcttagtaactccctgtacaagcggatgccggctacaatcgattccgtctttgccggagaagttactcagctgcagtctgaggtcgcttataaacagaagcacgatgcagcaaaggggttttcagactacgcccacatgaaagaaccaccagaagtcaaacacgccatggaagtgaataagcatcagtccaatatttcgtaccgaaaagatgtccaggacacacacacgtattcagcagagctggataggccagacatcaagatggctacacaaatttcgaagattatttctaacgcagagtataaaaaaggccagggcatcatgaataaagaacccgcagtgatcgggcgacctgattttgagcacgccgtggaggcaagtaaactttcctcccaggttcgcctgtag

SEQ ID NO: 232114 - DNA, 3045 bp, synthetic construct
  misc_feature 1..3045: note = Description of Artificial Sequence: Synthetic coding sequence
  source 1..3045: mol_type = other DNA
atgcgagttcccgtcttcgaggacataaaggatgagactgaggaggaaaagatcggagaagaggagaatgaggaggatcaggtgttttacaaacccgtgatcgaagatctctctatggaactcgccaggaagtgcacagagctgatcagcgacatacggtacaaggaagagttcaaaaagtctaaagataagtgtacctttgtcacggattcccccatgcttaaccacgttaaaaatattggtgcctttatttcggaggctaaatacaaaggcaccatcaaggcggatcttagtaattccttgtacaaaagaatgcccgctactatcgattctgtctttgccggagaagttactcagctccagtccgaggtcgcctacaaacagaagcacgatgcggcaaaaggattttctgattatgctcacatgaaggaacctccggaagtgaagcacgccatggaggttaataaacaccaatccaatatatcctaccgaaaggatgtgcaggacacacacacatattccgctgagcttgaccgaccggacatcaagatggcgacccagatttctaaaattatcagtaacgccgaatataagaaaggccagggaattatgaataaggaacccgctgtcataggtagacctgattttgagcacgccgtggaggcaagcaaactgtcaagccagatcaaatataaagagaaatttgacaacgagatgaaagacaagaagcatcattacaatccactggagagtgcttctttcaggcagaaccagctcgcagcaacactggcttccaacgtgaaatataagaaggacatccagaacatgcatgaccccgtttcagacctgccaaacctgctgtttttagatcatgtgcttaaggcctcaaagatgctgagcggccgtgagtataaaaaattgttcgaggagaacaagggcatgtatcacttcgacgcagatgccgtcgagcatcttcaccataaaggcaacgccgtgctgcagagccaagtgaaatacaaggaggagtatgaaaagaacaagggcaaaccaatgctggaatttgtcgagacaccctcatatcaggcgtctaaggaggcgcagaaaatgcagagtgagaaggtctataaggaggatttcgaaaaggaaatcaaaggtcgatcctcccttgaccttgataagactcccgagtttctgcacgtcaagtacattacaaacctgctgagagagaaagagtacaagaaggatctagagaatgagattaagggcaaagggatggaactgaattcagaagttctggacatccaacgggctaaacgtgcatccgagatggcgagcgaaaaggaatacaagaaggatctggaatctattattaaggggaagggaatgcaggccggaacagatacattggagatgcagcatgctaaaaaagcagcagaaatagcatctgagaaggactacaagcgggatcttgaaacggagatcaagggcaaggggatgcaagtcagcaccgatacgctcgacgtacagagggccaaaaaggccagtgaaatggcctcacagaaacaatacaagaaggacctggaaaatgaaattaaagggaaggggatgcaggtctctatggatatccccgacatcctgcgggctaaacgcacaagtgagatctacagtcagaggaaatacaaagacgaggctgagaagatgctctcaaactattctaccattgcagacaccccagaaatccagagaatcaagacaacccagcagaacatttcagccgttttttataagaaagaggtgggtgcgggaaccgctgtgaaagatagtcctgaaatcgagcgagtcaagaagaatcagcaaaacataagttctgtaaagtataaggaggagattaaacacgcaacagccatctctgatccccctgagttgaagcgggtgaaagaaaaccagaagaatattagtaacctccaatataaggagcagaactacaaagccacaccggttagtatgacacccgagatcgaaagagtcaggcgtaatcaggaacaactgagtgctgtgaagtacaagggggagctccaaagagggactgctatctccgatccgcctgaactcaagcgcgcaaaggagaatcagaagaatattagtaacgtctattaccgcggacagctcggacgagccactacactttcagtgactccagagatggaaagagtcaaaaagaaccaggagaatatcagcagcgtcaagtacacgcaggaccataaacaaatgaaagggagacccagcctgattctcgatacaccagccatgcgacatgttaaagaggctcagaaccacatttcgatggttaagtaccacgaagactttgaaaagactaaggggagaggctttacccctgtggtggatgatcctgttaccgaacgggttaggaaaaacacccaggtcgtaagcgatgctgcgtacaagggggtacatccgcacattgtagagatggacagaaggccaggtatcattgtcgacctcaaggtatggaggacagatccgggatccattttcgatctcgatccactggaggataatattcaatcccgcagtctgcatatgctatctgaaaaggcaagccactatagacgacactggtcaagatcccatagctccagcacttttggcacaggactcggagatgaccggtctgagatttccgaaatttatccgagctttagttgctgctcggaggtgacacgccctagcgatgaaggagctcctgtgctgcccggagcctatcagcaatcccattctcagggctacggttacatgcaccagacatctgtgtccagcatgcgctcaatgcagcattctcccaacctcagaacctatagagccatgtatgattacagtgcgcaagatgaagacgaggtgtcattccgggacggggactacatagttaacgtgcaacccattgacgatggctggatgtatgggacagtgcagcgtacaggaagaactgggatgctgcccgcaaattatatcgagttcgtgaactag

SEQ ID NO: 232115 - DNA, 711 bp, synthetic construct
  misc_feature 1..711: note = Description of Artificial Sequence: Synthetic coding sequence
  source 1..711: mol_type = other DNA
atgctgcacttctactacgaatggctccacagcggcagtcgtggggcagtgcccaaacccctccactaccctaaacagagtttcacaacagtagcggatacaccagaaaacttacggctgaaacagcaatccgaactacagagccaagttaagtataagagagatttcgaagagtcaaagggtcggggattttccattgttaccgacacaccagagttgcaacggttgaagcggacacaggagcaaatatccaatgtgaaatatcatgaggactttgagaagaccaaggggcgaggtttcacacccgtggtcgacgatcccgtcaccgagcgcgtgcgaaagaatactcaggtggtctcagatgctgcctacaagggtgtgcaccctcacattgtggaaatggacaggaggcccggtataatcgtcgctcccgtgctgcccggtgcctatcaacagtctcattcacaagggtacggctacatgcaccaaacttcagtctcttctatgcgatccatgcaacacagcccaaacctccgtacataccgtgccatgtacgactatagtgcgcaggatgaggacgaggtttccttccgcgatggagactatatcgtaaatgtccaaccaattgatgacggatggatgtacggaactgttcagcggactggtcgaactggcatgctgccagctaactatatagagttcgtaaactag

SEQ ID NO: 232116 - DNA, 813 bp, synthetic construct
  misc_feature 1..813: note = Description of Artificial Sequence: Synthetic coding sequence
  source 1..813: mol_type = other DNA
atgaaccctcagtgtgcacgctgtggtaaggtcgtctatccgacggagaaagtcaattgcctggataagtattggcacaagggatgcttccattgtgaggtgtgcaaaatggctctgaatatgaacaattacaaaggatacgaaaagaagccctattgtaacgctcactaccccaagcagtcctttactaccgtggccgacacacccgagaacttaagattaaagcagcaatccgagttacagagccaggttaagtataagcgcgactttgaggaatccaaagggcgaggattcagcatcgtgacagacacccctgaactccagcggctgaagcgcacccaggagcagatatccaatgtcaagtaccacgaggattttgaaaagacaaagggcagggggttcacaccagtcgttgatgacccggttacagagagggttcggaagaatacccaggtggtatcagacgcggcatacaagggcgtccaccctcacattgtggagatggaccggaggccgggaattatagttgccccagtattaccaggcgcttatcagcagtctcattcacaaggatacggctatatgcaccaaactagcgtaagttcaatgcgatctatgcagcactcccccaatctaagaacatatagggccatgtatgattatagcgcacaggacgaggatgaagtgtccttccgcgacggggattatatcgtcaatgtccagcccattgacgacggctggatgtacggcacagttcagaggactgggcgtacaggtatgcttcctgccaattatattgaattcgtgaattag

SEQ ID NO: 232117 - DNA, 354 bp, synthetic construct
  misc_feature 1..354: note = Description of Artificial Sequence: Synthetic coding sequence
  source 1..354: mol_type = other DNA
atgcggaacaactgtactgctagcttgatgaaagtgttctacaaaccagtgatcgaggacttgtcgatggagctggcccgtaaatgtacggagctcatcagtgacatcaggtacaaggaagaattcaaaaaatccaaagacaaatgtacttttgtgacggattctccgatgctgaaccatgtgaaaaatataggggctttcatatcagaagctaagtacaaaggtaccattaaggctgacttgtccaacagtttatacaagcgaatgcctgccacaatagatagcgtgtttgccggtgaagtaacgcagctgcagtccgaagtggcatacaaacaaaagcacgatgcagcatag

SEQ ID NO: 232118 - DNA, 20009 bp, synthetic construct
  misc_feature 1..20009: note = Description of Artificial Sequence: Synthetic coding sequence
  source 1..20009: mol_type = other DNA
atggccgatgacgaggactatgaggaagtggttgaatattataccgaggaagttgtctacgaggaagtccccggagaaacgatcaccaaaatatacgagacaacgacgacgcgaactagcgactatgagcagtctgaaacatcgaaacccgctctcgcccaacccgcactggcgcagccggcaagtgctaaacctgttgagaggcgcaaggttatccgcaaaaaggtggacccttcaaagtttatgactccatatattgcccactcgcagaaaatgcaggacttattttcaccaaacaagtataaggagaagttcgagaaaaccaagggtcaaccctatgcttccaccacggacacccccgagctacgcagaattaaaaaggttcaagaccagctgtcagaagtcaagtaccgcatggatggagacgtcgctaaaacaatttgccatgtcgatgagaaagccaaagacatcgagcacgccaagaaagtgagccagcaggtgtccaaagtgttgtacaagcagaactgggaggacactaaagataagtatctgcttcctccagatgcacccgaactggtgcaggccgtgaaaaatacagcaatgttctccaagaaattgtatactgaggattgggaggccgataagagtcttttttacccctataatgactctcccgagcttaggagagtggcacaggcccagaaagctctttccgacgtggcttataagaaaggcctcgccgaacaacaagcacagttcacaccgttggcggatcctcccgatatcgaatttgcaaagaaagttactaaccaggtcagcaaacagaaatacaaggaagactatgaaaataagattaagggaaaatggagcgagacaccatgtttcgaagtggcaaatgccagaatgaatgcggataacataagtacacgcaagtatcaagaagactttgagaacatgaaggatcaaatctatttcatgcagactgaaacccctgagtacaagatgaacaagaaggcaggtgtagctgcttctaaagtcaagtacaaggaggattacgagaaaaataagggcaaagctgactataacgtgctcccagcttctgagaacccgcagctgcgacaactgaaggccgctggcgatgcactgtctgataaactttacaaggagaactacgagaaaaccaaagccaaatccatcaactactgtgagaccccaaagttcaagttggacacagtgctccagaatttttcatctgacaagaagtacaaagactcctatctcaaggacattctgggccattacgtcggaagttttgaggacccttatcactctcactgcatgaaggtcacagcacaaaatagtgataaaaactacaaagctgagtatgaagaggaccggggtaaaggtttcttcccacagactatcacccaagaatacgaagccatcaagaagcttgatcagtgtaaagatcacacctacaaggtgcacccagacaaaaccaagttcactcaggtcacggattcccctgtgctgctacaggcccaagtgaatagtaagcagctttcagatcttaactataaggccaagcacgagtcagaaaaatttaagtgtcatattcctccagacacacccgcattcatccagcacaaagtcaatgcctacaacctttcagacaacctgtataaacaagactgggaaaagagcaaggccaagaagtttgatatcaaagtggacgccataccactgctggcagccaaggccaacacaaagaacacctcagacgtcatgtataagaaggattacgaaaaaaataagggaaaaatgatcggagtcctgagtattaatgacgatccaaaaatgttgcactctctgaaggtggctaagaaccagtctgaccgcctgtacaaagagaactatgagaagacgaaagcaaagtctatgaattattgcgagacacccaagtaccaactagacacccagttaaagaacttctctgaggccagatacaaagatttgtatgtgaaggacgttctcgggcattacgtaggctctatggaagatccttaccatacacactgcatgaaagtagctgcacaaaatagtgacaagtcctataaagcagagtatgaggaggataaagggaaatgttatttcccccagacaattacccaggaatacgaagccatcaagaagctggaccagtgtaaggatcatacatataaagtgcatcctgataagactaagttcaccgctgtcacggacagcccagttctgctgcaagcgcaactgaacacaaaacaactttcagacctcaactataaggctaagcacgaaggggagaaattcaagtgccatattcctgccgacgctcctcagttcattcagcaccgggtgaatgcgtacaacctttcggataacgtgtataagcaggactgggagaaatctaaagccaagaaatttgatattaaggtcgacgctatccccttacttgcggctaaagctaacaccaaaaacacctcagacgtaatgtacaagaaagactacgaaaagtccaaaggcaagatgataggagctttgagtattaatgatgaccctaagatgcttcactcactcaagacagcaaagaaccagagcgacagggagtaccgcaaagactatgagaaatctaagaccatctataccgctcccctcgacatgctccaggtgacccaggctaaaaagtctcaggcgattgcctccgacgtcgattataagcacatcctgcacagttattcctatcccccagattctatcaatgtcgatcttgccaaaaaagcttatgccctgcagtccgatgtggagtacaaagcagattacaatagctggatgaagggttgtggttgggtgcctttcggatctttggaaatggagaaggccaaaagggccagtgatatcctcaacgaaaaaaaatatcgtcagcatcccgatactctaaagttcacctcgattgaggatgcccctatcacggttcagagcaagatcaaccaagcacagaggagcgatatcgcatacaaagctaagggggaggaaataattcacaaatacaatctgcctccagacctcccccagttcatccaggccaaggttaatgcatacaacataagtgaaaatatgtacaaggcagacttgaaggacctgagtaagaaggggtatgatcttcggacagatgccattcctatccgagctgccaaagccgctcgtcaggccgcatctgacgtccagtacaaaaaagactatgaaaaagctaagggcaagatggtcgggtttcagtcattgcaggatgatcccaaattggtgcattatatgaatgtggcaaagatccagagcgatagagagtataaaaaggattatgaaaaaacgaagagcaagtacaacacaccccatgatatgttcaacgtcgtggctgctaaaaaagcgcaggatgtcgtgagcaacgtgaattataaacattctctccatcactatacttatctcccagatgcaatggatctcgagctatccaaaaatatgatgcagatccaatcagataacgtatacaaagaagactacaataactggatgaaaggaattggatggatacccatcggttccctcgatgtagaaaaagttaaaaaggccggagatgctctgaatgagaagaagtacaggcagcaccctgatacgctcaagttcacatcaattgtagacagcccagtgatggtccaggccaagcagaacaccaagcaggttagcgacatcctgtacaaggcaaagggggaagacgttaagcacaaatacacaatgagccctgacctgcctcagtttttacaggccaagtgcaacgcatacaacatttcggacgtatgctataaacgggattggtatgacctaatcgccaaggggaacaacgttcttggtgatgcgatccccattacggctgctaaggctagccgcaacatagcctccgactataagtacaaagaggcttatgaaaaatccaaggggaagcacgtgggatttcgctcactccaggacgatcccaaactggtccactacatgaatgtggcaaaacttcagagcgatcgggagtacaagaaaaattacgaaaacaccaagaccagctaccacacaccaggagacatggtcagtattaccgcggctaagatggcacaggatgttgcaactaatgtaaactataagcagccgctgcaccactatacttacttacccgatgccatgtctctcgagcacactagaaacgtgaaccagatccagagcgataatgtgtacaaggatgagtataattcctttctcaaaggaattggatggatacctatcggatccctcgaggtggaaaaagttaagaaggctggggatgccctgaacgagcgaaaatacagacagcaccccgacacagtcaagtttaccagtgtgcctgactccatgggcatggtcctcgcccagcacaatacaaagcagttgtctgatctaaattataaggtggagggtgaaaagctaaagcataaatacactatcgaccccgagcttcctcagtttattcaagctaaggtgaatgccctgaatatgtccgacgctcactataaagccgattggaagaagacaatcgccaagggatatgaccttaggcccgacgccatcccaattgtggccgcaaaatctagcaggaacatcgctagcgattgcaaatataaagaggcctacgaaaaagcgaaaggtaaacaagtggggttcctgtcattgcaggatgatccgaagctcgtgcactacatgaacgtcgccaaaattcagtccgacagggagtacaagaagggatacgaggccagtaaaacaaagtaccacactcctctagatatggtttctgtcaccgcagccaagaagtcacaggaagtagcaacaaacgcaaattacagacaaagttaccatcattacaccctgcttcctgatgcactcaatgtggagcactcgcgcaatgctatgcagatacagagtgacaacctgtacaaatcggattttacgaactggatgaaagggatagggtgggtccccatcgagtcactcgaggtggaaaaagccaaaaaggctggagagattctgagcgagaagaagtataggcagcacccagagaaactcaagttcacctatgccatggacaccatggaacaagccttaaacaagagcaacaagcttaatatggataagcggttatataccgagaaatggaacaaggacaaaactactatccacgtgatgccagacacgccggatattctgctgagccgagtgaaccagattaccatgtctgacaagctgtataaggcgggttgggaggaggagaagaaaaagggatatgacttaaggccagacgcgatcgctattaaagccgcacgcgcaagcagggacatcgcttccgactacaaatacaagaaggcttatgagcaggccaagggtaaacacattggatttcgttctttggaagacgaccctaaactcgtccacttcatgcaagttgctaagatgcagagcgatcgtgagtataagaagggctatgagaagagtaagacctccttccatacccccgtggacatgctaagcgtggttgcggcaaaaaagtctcaggaggtcgcaaccaacgccaattaccgtaacgtcattcacacttacaacatgctgcctgatgctatgtccttcgagctggccaagaacatgatgcaaattcagagcgacaatcagtataaggcggactatgccgactttatgaagggtataggttggctgcctttgggctctctcgaagctgaaaagaataagaaggccatggagatcatatccgagaaaaaatacaggcagcatccagacaccctgaagtatagcacactgatggactctatgaacatggtgctcgcccagaacaatgccaagattatgaacgagcatctttataaacaggcttgggaggccgataaaacgaaagtacacattatgcctgacatccctcagattattctggccaaggctaacgcgattaatatgtctgataaactctacaagttgtctttagaagagagcaaaaaaaaggggtacgacctccgtcctgacgcgatccctatcaaggctgcgaaggcgtcacgtgatattgcgtcagattacaagtacaaatacaactacgaaaaaggcaaaggcaaaatggtgggatttcgatcactggaggacgaccccaaactcgttcactctatgcaggtagccaaaatgcagagcgatcgggagtataaaaaaaattacgagaatactaaaacttcgtaccacaccccagctgacatgttgtctgttactgctgcaaaggatgcccaagctaacatcaccaacaccaattacaaacacctaatccacaagtacatccttctgccggacgcaatgaatatcgaactaactcggaacatgaaccggatccagagtgataatgagtacaagcaggattacaatgagtggtataaaggattggggtggtcaccagccggttctctggaggtcgagaaggcgaaaaaggcgacggaatacgcttcagatcagaaatataggcagcatccttcaaattttcagtttaagaagctgacagattcgatggatatggtgctggcaaaacagaacgcgcacacgatgaacaaacatctttatactatcgattggaacaaagataagaccaagattcatgttatgcccgacacaccagatattctgcaggccaagcagaaccagacactatattcccagaagctttacaaactaggatgggaggaagccctgaagaaaggttacgatctgccagtcgatgctatctctgtgcaactggctaaagcatccagggacatcgccagcgactacaagtataaacagggctaccggaaacagctaggccaccacgttggtttcaggtcactccaggatgaccccaagctggtcctgtccatgaatgtggccaagatgcagagtgagagggagtacaagaaagactttgaaaagtggaagacgaagttttcttcccccgtcgatatgctgggcgtggtgcttgccaagaagtgccaggagctcgtttctgacgttgactacaagaattatctgcatcagtggacatgcctgccggatcagaacgacgtggtgcaggctaagaaagtatacgaactgcaatctgaaaatctttataaatctgatctcgaatggctgaggggcataggctggtccccactgggaagtctggaagcggagaaaaacaaaagagccagcgagatcatctccgagaaaaagtacagacaaccccctgacagaaataagttcacaagcatcccagacgctatggatatagtgcttgctaaaactaacgccaagaatagaagtgatcgcctgtaccgcgaggcttgggataaggataagactcagattcatattatgcccgacaccccggatattgtcctggctaaggccaatctaatcaatacgagcgataagttgtacagaatgggatacgaggagctgaagagaaaaggctatgaccttcccgtcgacgccatacctatcaaagcggcaaaggccagcagagagattgcttcagagtacaaatacaaggaaggcttccggaaacagctgggtcatcatataggggcacggaatatcgaagatgatcctaagatgatgtggtcaatgcacgtggccaagatacagtcagatcgggagtacaaaaaggactttgagaaatggaaaaccaaatttagttcacccgttgacatgttgggcgtggttcttgcgaaaaagtgccagactctggtgtctgatgtagactataaaaattacttacaccagtggacatgcttacccgatcagtccgacgtcatccatgccagacaggcgtatgacttgcagtccgataacttgtataaatcagatctgcagtggcttaaagggattgggtggatgacaagcggcagtctggaggatgaaaagaacaaaagagctacacagattttaagcgaccacgtctatcgtcagcatcccgaccagtttaaattctctagcctcatggacagcatacccatggtcctcgccaaaaacaatgcaatcaccatgaaccacagactatatacagaagcgtgggacaaagacaaaacaactgtacacatcatgcccgacacacctgaggtgcttctggccaagcagaataaggtcaactacagtgagaaactttacaagctgggattggaggaggctaaacgaaagggctacgacatgagagtggacgctatcccaatcaaggcggcaaaggcatctagagatatagcctctgagttcaagtataaggagggatacagaaaacagctgggacatcacatcggcgctagggcaattcgtgatgatccaaaaatgatgtggtcaatgcacgtggctaagattcagtctgatagagagtacaagaaggactttgagaaatggaaaaccaaatttagctccccagtggacatgctcggggtggtgctcgccaagaaatgccagactcttgtttcggatgtggactataaaaattatcttcaccaatggacctgtttgcccgatcagtctgacgttattcacgccaggcaagcttatgacttgcagtcagacaacatgtacaaaagtgacctccagtggatgagaggcattggctgggtcagtataggctccctcgacgtagagaaatgcaaaagggcaacagaaatcctttccgacaagatctatagacagccaccggacagattcaagtttactagcgtcacagattccctcgaacaggtactggctaagaataacgcaatcacaatgaacaaacgcctgtacacggaagcctgggataaagacaaaacccagatccacatcatgccagatacccccgaaattatgcttgcccgacagaataagattaattacagcgagaccctctacaagctagccaacgaagaagcgaagaaaaaaggctacgacctgagaagcgacgccattcctattgtggcagcaaaggcgtcaagggacgtcatcagtgattacaagtacaaggatggataccgcaagcagctgggacaccacatcggcgcacggaacatcgaggacgaccccaagatgatgtggtccatgcacgtggcaaaaattcaatctgatagagaatacaaaaaagacttcgagaagtggaagactaagtttagtagcccggtggacatgctgggggtcgtactagcaaaaaaatgtcagacactagtgtccgacgtcgattataaaaactacctccacgaatggacttgtctgccagaccagaacgacgtgattcatgcgcgacaggcatacgacctgcagtctgacaacatttacaaaagcgatctccagtggctccgaggcatcgggtgggtccccattgggagcatggatgtggtcaaatgtaaacgagcagcggaaatattgtccgataatatctacagacagccccctgacaagcttaagtttacaagtgtgacagatagccttgagcaagtattggctaagaataacgcactgaacatgaacaaaaggctctacactgaagcctgggataaggataagactcaggtgcatatcatgcccgatactcctgaaatcatgctcgccagacagaataaaatcaattattcagaaagcctgtatcgccaggccatggaggaagccaagaaagagggctatgatcttcggagcgacgcgatcccgatcgttgcagccaaagcaagccgggatattgcttctgactacaaatacaaagaggcttatcgcaagcagctgggccaccatattggtgccagggctgttcacgatgatcccaagatcatgtggtctctgcacattgcaaaagtgcaatctgacagagaatataaaaaagacttcgaaaagtataagacgagatacagctcaccagtggatatgctcggcatcgtgttggctaagaaatgccagaccttggtttcagatgtggattacaagcatcccttacatgagtggatctgccttcccgatcagaatgatattatccacgctcgcaaggcctacgacctccagtctgataacctgtataaaagcgatctcgaatggatgaaaggcattggatgggtgccgattgacagcctggaggtcgtgcgagccaagagagccggagaactgctaagtgatacaatttaccgacagaggccagaaacactgaagtttacgtctattacagacacccctgagcaggtgctcgccaagaacaatgccttgaatatgaataaaaggttgtataccgaggcctgggacaatgacaagaagacgattcacgttatgccggacactcctgaaatcatgctcgccaagttgaacaggatcaactactcagacaaattgtacaagttagccctggaagagtccaaaaaagagggttacgatttacgccttgacgcaatcccgatccaggctgccaaggcttcgagggacattgcaagcgactacaagtataaggagggttacaggaaacagctgggccaccacattggcgctcggaatattaaagatgaccctaagatgatgtggagcattcacgtggccaaaatacagtccgaccgagagtacaagaaagagttcgaaaaatggaaaaccaaattctccagtcctgttgatatgctcggtgtcgtgctcgccaaaaagtgccagatcctagtttcagacatagattacaagcatcctctgcacgagtggacgtgcctgcctgaccagaatgacgtaatccaggctcgtaaggcctacgatctacagagtgatgctatctataagtctgacctggagtggttgcggggaatcggctgggttcccatcggttccgtggaggtagaaaaagtcaaacgcgcaggtgaaatcctgtctgatagaaagtaccgacagccagccgatcagctgaagttcacttgtatcacggacacaccagaaatcgtgcttgccaaaaataatgctcttacaatgagcaagcacttgtatacagaggcatgggatgccgacaaaaccagcatccacgttatgcctgatacccccgatattctgttggctaaaagtaactccgccaatatcagtcagaagctttataccaagggctgggacgagtccaaaatgaaggattatgacctccgagcagatgctatttccatcaagagtgccaaggcctcccgagatatagcttcagactataagtacaaagaagcttatgagaagcagaagggacatcatatcggagcccagagcatcgaggatgaccccaaaataatgtgtgcaatccacgccggtaagattcagtctgaaagggagtataagaaggagttccaaaaatggaaaactaagttttcctcccctgtcgacatgctaagtattctgctggcgaaaaagtgtcagacgcttgtcacagatatagattacaggaactacctgcacgagtggacatgcatgccggaccagaatgatatcatacaagccaagaaagcctacgaccttcaatccgatgcactatacaaggccgacttagagtggttgaggggcatagggtggatgccacagggatcacccgaagtacttagagtgaaaaatgcacagaacatattttgtgacagcgtttatcggacacccgtggtgaacctgaaatacaccagcatcgtggacacccccgaagtcgtccttgcaaagagtaatgccgagaatataagcatccccaaatacagagaggtgtgggataaagataagacatccatacatataatgcctgacacccctgaaatcaacctggcgagggcaaacgccttgaatgtgagcaataagttgtaccgggagggctgggacgagatgaaagctggatgtgacgtgcgactcgatgccattcctatccaggcagcaaaggcatcccgagaaattgcatctgactataaatataaattagatcacgagaaacagaagggtcactacgtaggcactctgacagccagagacgataacaaaataagatgggcacttatagccgacaagttgcaaaatgaacgcgagtaccggctcgattgggcgaagtggaaggccaaaatccagagtcctgttgatatgctgagcattctgcatagcaaaaattcccaggctcttgtgtctgacatggactacagaaattatctgcatcagtggacttgcatgcccgaccaaaacgatgtgatacaggcaaagaaggcctacgaactgcagtctgataatgtctacaaggccgacctggagtggcttaggggaattggctggatgcccaatgactccgttagcgtgaaccacgcgaagcacgcagccgacatcttcagtgaaaaaaagtaccgcactaaaatcgagaccttaaattttacccctgtggatgaccgggtcgactatgttacagccaagcaatcaggcgagattcttgatgacatcaaataccgtaaggactggaacgctacgaaaagcaaatacacattgactgaaacgcctctactccataccgcccaggaggcagccaggatccttgaccagtacctctacaaggagggctgggagcgccagaaggcaactggttacattctccctcccgatgctgtacctttcgtgcacgcccaccactgtaatgacgttcagagcgaacttaagtacaaagccgagcatgtgaaacagaaaggacattacgtgggtgttccaacaatgcgtgacgatcccaaactggtctggtttgagcatgcaggccaaattcagaacgagagactctataaggaggactaccacaaaactaaggctaaaatcaatatcccagctgatatggtgagcgtgctggctgctaaacagggtcagaccctggtcagcgatatcgattataggaattacctccatcagtggatgtgtcaccccgaccaaaacgatgttattcaggcgcgaaaggcctacgacctgcagtctgacaatgtgtatcgtgcagaccttgagtggcttagaggtatcggatggattcctctggacagcgttgatcatgtcagggtaaccaagaaccaggagatgatgtcccagattaaatataagaagaatgctttagagaattaccccaactttagatccgtggtagaccccccagaaatcgttttagctaaaataaactccgtgaaccagtccgacgtcaaatacaaggagacttttaacaaggcaaagggaaagtatactttctctcctgacactccccacatcagccacagtaaagacatgggcaagctgtacagcactatactgtataaaggtgcctgggagggcacaaaggcctatggctataccctggatgaaaggtacattcccatcgtcggggctaaacatgctgatctcgtgaatagcgagttaaagtataaggaaacttatgagaagcagaaggggcactatttggctggcaaagttataggtgaatttcctggtgtcgtccattgcttggacttccagaaaatgaggtcagcactgaactatcgaaaacattatgaggacacgaaggccaatgtgcatatcccaaatgatatgatgaaccacgtccttgccaagagatgccagtacatactcagcgatctggaataccgccactacttccatcagtggacatcacttcttgaggaacctaacgtcatacgggttaggaacgctcaggagatcctcagtgataatgtgtacaaagatgaccttaactggctcaaaggaattggctgttacgtgtgggatacccctcagattctccacgcaaagaagtcctacgacctgcagagccagctacagtacacggccgctggtaaagagaatcttcagaattacaatctggtcactgacaccccattatacgtgactgctgtgcaatccggaatcaacgcctccgaggtgaagtacaaggaaaactatcaccaaatcaaagataagtatacaacagtgctggaaactgttgattacgacagaacccggaatctgaagaatctctattctagtaatctatacaaggaggcctgggatcgggtaaaggcaacctcatacattctgccctcttcaaccctgtcactgactcacgccaaaaatcagaaacacctcgcgtcccacatcaaataccgggaggaatacgaaaagttcaaagctctctacacactccctaggtctgtcgatgatgaccccaacaccgcgaggtgtctgcgggttggtaagttgaatattgatcggctctatcgatccgtctatgaaaaaaacaaaatgaaaatccacattgttccagacatggtggagatggtgacagcaaaagacagccagaaaaaggtgtcggagatcgactacaggcttcggctgcatgaatggatctgtcatcccgatctgcaggtgaacgatcatgttcggaaggtaactgaccagatcagtgacattgtatacaaggacgatctcaattggcttaaagggatcggatgttatgtttgggacactcccgagattcttcacgccaagcatgcgtacgatcttcgggacgacatcaagtacaaggcccacatgttgaagactcggaatgattacaagctggtcacagatacgcccgtgtatgtgcaggcagtgaaatccggcaagcagctaagcgacgccgtgtaccactacgactacgtgcactccgtgaggggcaaagttgccccaaccacaaagacggtagacctggacagggccctgcatgcctataagttgcagagctctaatctctacaagacctctctacgaactttgcccactggctacaggcttccaggcgatacaccacactttaagcacataaaggatacaagatatatgtcctcgtatttcaagtataaggaagcttacgagcatacaaaagcatacggctacacactaggacctaaggacgtccccttcgttcacgtacgccgagtcaacaacgtgacgagtgaaaggctctaccgcgagctgtatcacaaacttaaagataaaatccataccaccccagacacacccgagattagacaggtgaaaaaaactcaggaagccgtgagcgagcttatatataagagcgatttctttaaaatgcagggccatatgataagccttccctacacccctcaagtgatccattgtaggtacgtgggggatattacttccgacataaaatacaaagaggacttacaggtgctcaaaggcttcggttgctttttgtacgacacccccgacatggtgcgcagcaggcacctgcggaaactatggagcaattacttgtacacagacaaggctaggaagatgagagataagtataaggtggtgctcgacacgccggaatatcgcaaggtgcaggagcttaaaacgcatctgtcagagctagtgtacagggccgctgggaagaaacagaaaagtattttcacttccgtcccggatacacccgacctgctacgcgcaaagcgtgggcagaaactgcagtcacaatacctctatgtggagttggcgaccaaagaacgtccccaccaccacgcagggaatcagaccactgcactgaagcacgctaaggacgtgaaagacatggtttcagagaagaagtataaaattcagtacgagaagatgaaagacaaatacactccggtgccagatactcccatcctgatacgcgcaaaaagggcctattggaatgcgtcggacctgcgctacaaagaaacttttcagaagaccaaaggcaaatatcatacagtgaaagatgcactcgatatcgtgtaccaccggaaagtcactgatgacatttctaaaattaaatacaaggaaaactatatgtcccagctaggcatttggcgctccattcccgaccgacctgagcactttcatcatagagcggtcactgatacggtcagtgacgttaagtataaggaggacctcacatggctgaaggggattggatgctatgcttacgatacacccgacttcaccttagctgaaaaaaataaaaccctgtatagcaagtacaaatataaagaagttttcgagcgcacaaagtctgatttcaaatacgttgcagacagccctatcaacagacactttaagtatgccacgcaactgatgaatgagaagaaatatcgtgcggattacgaacagagaaaagataagtatcacctggtggtcgacgaaccacgccatctgctggcaaagaccgctggcgaccagatctctcaaatcaagtatcggaagaattacgaaaagagtaaggacaagttcaccagcatcgttgacacacccgaacacctaagaacaaccaaagtaaacaagcagatcagcgacatactctataagttggagtacaacaaagcgaagccacgcggatatactaccattcacgacacccccatgcttttacatgtacgaaaagtcaaggacgaagtgtccgacctaaaatacaaggaggtgtaccaacggaacaaaagtaattgcaccattgagcccgacgctgtgcacataaaggcagccaaggacgcttacaaggttaatactaatttggactacaagaagcagtatgaagctaacaaagcccactggaagtggacacccgacaggcccgacttcctgcaggccgctaagtcttcactgcagcagtcggattttgaatacaaactggaccgcgagttccttaagggctgcaagctgagcgtgaccgacgataagaatactgtgctggccctgcggaataccttgatcgagtctgatctgaagtataaggagaagcatgtgaaggaacgagggacatgccacgctgttccggacacacctcaaattttgctagccaagaccgtaagcaatctggtgtcagaaaacaaatataaagaccacgtgaagaaacacctcgcacaaggaagttacaccacgcttccggagacgagggacaccgttcatgtgaaggaggtcacaaagcacgtcagcgacaccaactataagaagaaatttgttaaagaaaaagggaagagcaattattccataatgctggagccccctgaagtgaagcacgcaatggaggtcgctaagaagcagtccgatgttgcttaccggaaggacgccaaggaaaacctgcactacacaaccgtggctgatcggccagacatcaaaaaagccacgcaagctgccaagcaggcatccgaggtcgagtaccgagccaagcataggaaagagggttcacacggtctgagcatgctggggcgtcctgatatcgaaatggccaagaaggcggctaagttgagctcccaagtgaaatatagggaaaattttgataaggaaaaaggaaaaacacccaaatataaccccaaggactcccagttgtacaaagtcatgaaggacgcgaataacttggcaagcgaggtcaagtataaagcggacttaaaaaagctccacaagcctgtgaccgatatgaaagaatccctgatcatgaaccatgtactgaatacgtctcagctggccagttcataccagtacaagaaaaaatatgagaagagcaagggccattaccataccatcccagacaaccttgaacagctgcaccttaaagaggctaccgagctgcaatcgattgtgaaatacaaggagaaatacgaaaaggagcgtggaaagccaatgctggatttcgagacacctacctatattaccgcgaaagagagtcaacagatgcagtcgggaaaggagtatagaaaagattacgaagagagtattaagggacgaaatctgaccggcctggaggtgactccggctctgttacacgtgaaatatgccacgaaaattgcatccgaaaaggagtaccgcaaggatttggaggaatctatccgtggaaagggcctcactgagatggaagacaccccagacatgttgagagctaagaacgcgacacagatactcaacgagaaggagtacaaaagagatttagaactggaggtgaagggtagaggcctgaacgctatggcgaatgagaccccagatttcatgcgggctcgcaatgcgaccgacattgcgtctcaaataaagtataaacaaagtgccgagatggagaaggcaaacttcacatcagtagtcgacacaccggaaataattcatgcacagcaagtgaaaaacctaagtagtcagaagaagtacaaggaggacgctgaaaagtccatgagctattatgaaactgtcctcgacaccccagaaattcaacgcgtgcgcgagaatcaaaaaaattttagcctgttacagtatcaatgtgacctgaagaacagcaaggggaagatcaccgtggtccaggacacaccagagattctgcgggtgaaggaaaatcagaaaaacttctccagcgtcctgtacaaagaggacgtatctcccggaactgcaataggaaagactccagagatgatgcgtgtgaaacaaacccaggatcatatttcctctgttaagtacaaggaggctatcggacaaggcacccccatcccggatctcccagaagtgaagcgtgtgaaagaaactcagaaacacatctcttcagttatgtataaggagaacctcggcacaggcatccccaccacggtgactcccgagatcgaacgcgtgaagagaaatcaggagaacttttcctcagtgttatataaggagaatctcggcaagggcattcccactcccatcacacctgagatggaacgagtgaagcgcaaccaggagaacttttcctcagttctgtataaagagaatatgggaaaggggactccactggctgtcacccccgagatggaaagagttaaacacaatcaggagaacatcagctcagtgctctataaagagaacgttggaaaagcaactgccactcctgtcacccccgagatgcaacgggttaagcgcaaccaggaaaatatatcaagcgtgctttacaaggaaaaccttggaaaagctactcctaccccttttacacctgagatggagcgcgtgaaacggaatcaggagaacttttcaagtgtcctgtacaaagagaatatgaggaaggccacccccacccccgtgactccagagatggagcgtgcaaaacggaaccaggagaacattagcagtgtgctctacagcgatagcttccgcaaacagattcagggtaaggcagcctacgttctggacacgccggagatgcggagggtccgtgaaactcagaggcatatatccaccgtgaagtatcacgaggacttcgagaaacacaaaggatgctttacaccagtagtgaccgatcccattacagaacgtgtcaagaaaaatatgcaggacttttcagacattaattacagagggattcaaaggaaggttgtggagatggaacagaagcggaatgaccaagatcaggaaacaattacaggacttcgcgtgtggcggaccaatcccggatcagtattcgactacgatccggctgaggacaatatccagagccgatctctccatatgattaacgtgcaggcacagagacgctcaagagaacagagccggtccgcctctgcactgagcatttctgggggtgaagaaaagtccgaacatagtgaagcacctgatcaccacctgagtacatactctgacggtggagtgttcgcagtctccaccgcctacaagcacgctaagaccactgagcttccccagcaacgctcatccagtgtggcaacacagcagacaaccgtctcttcgatccctagccacccttctacagcaggcaagatatttcgggctatgtacgattacatggctgccgatgctgatgaggtcagtttcaaagatggcgatgcaataataaatgttcaggcaatcgacgaaggctggatgtacgggaccgttcagagaactggccgtacggggatgctgccagccaactatgtggaagcaattta

SEQ ID NO: 232119 - DNA, 1503 bp, synthetic construct
  misc_feature 1..1503: note = Description of Artificial Sequence: Synthetic coding sequence
  source 1..1503: mol_type = other DNA
atggagcgagttaaacgaaatcaggaaaatttttcatcggtcctctataaagaaaatttaggcacggggatccccatccccatcactccagagatgcagagggtgaaacataaccaggagaatctcagttccgttctatataaggagaacatgggaaagggaacccccctacccgtaacacccgagatggagagagtcaaacataatcaagaaaatatatcatccgttctctacaaagaaaacatgggcaaaggcaccccgttacccgttacacccgaaatggaaagagtcaagcacaatcaggagaacatttcaagcgtactgtacaaagaaaacatgggcaaggggaccccactcgctgtgacccctgagatggaaagagtaaagcacaaccaagagaacattagtagtgttctttataaagagaacgtgggaaaggccaccgccacaccagttactcccgagatgcaaagggttaagcggaaccaggaaaacatctccagcgtcctgtataaagaaaacctgggtaaggctacgcctactccctttaccccagaaatggaacgcgtgaagcggaaccaggagaacttctcctctgtcttgtataaagaaaatatgcgaaaagctaccccgacccccgtgacacctgagatggaaagggctaaaaggaaccaggagaacatcagcagcgttttgtattcggactctttcagaaagcaaatccagggcaaggctgcctacgtgcttgacaccccggaaatgcgccgagtccgagaaacccagcgacatatctccactgtcaagtaccacgaggactttgaaaagcataaggggtgttttacccccgtcgtcaccgatcccatcacagaacgagttaagaagaatatgcaggatttttcagacattaactatagagggatccagaggaaagtggtggagatggagcagaagcgcaatgatcaggatcaggaaactataaccggcctgagggtctggcggacaaacccgggatctgtgtttgactacgatcctgccgaagacaatatccagtctcgcagtcttcatatgatcaatgttcaggctcaaagacgttcccgtgaacagagcaggagtgcatccgcgctgtcaatctctggaggtgaggaaaagtccgagcactcagaagctccggatcatcatctaagcacgtattctgacggtggggtctttgccgtgtctaccgcttataaacatgcaaagaccaccgaactgccccagcaacgctcctctagcgtcgcaacccagcaaaccaccgtctcttcgattccttctcatccaagtacagccggaaagattttccgggctatgtacgactacatggcagcagacgccgatgaagtgagtttcaaagatggggacgcaatcatcaatgtgcaggctatcgatgaggggtggatgtacgggactgtacaacgcactggacgaactggtatgctgcccgctaattatgtcgaggccatttag

SEQ ID NO: 232120 - DNA, 7878 bp, synthetic construct
  misc_feature 1..7878: note = Description of Artificial Sequence: Synthetic coding sequence
  source 1..7878: mol_type = other DNA
atgcccgatacacctgagataaacttggcacgtgctaatgcactcaatgtgtcgaacaagttgtaccgggaaggttgggatgagatgaaggccggatgtgacgttcgcttagacgccatcccaatccaagcagccaaagctagcagagagatcgcgtccgactataagtataaattggatcacgaaaaacaaaaaggccattatgttggaacattgacagctcgagatgataataagatcagatgggcattgattgccgacaagctccagaacgagcgtgagtacaggctagactgggcaaagtggaaagccaagatccagagcccggtggatatgctgtccatcctccacagcaaaaattctcaggcactggtgtccgacatggactaccgaaactatctccaccaatggacctgcatgcccgaccagaacgacgtgattcaagccaaaaaggcatacgagcttcagtccgataacgtctacaaggctgaccttgagtggcttcgcggtattggctggatgccgaatgattcggtgagcgtcaatcatgcgaaacacgcagccgatattttcagcgaaaagaaataccggaccaagattgagaccctaaattttaccccggtggatgatcgcgtcgactacgtgactgccaaacagtctggagagattctggatgacattaaatataggaaggattggaatgcaaccaaaagcaaatacaccctgactgagactcccctgctgcacaccgcccaggaggctgcccgaatccttgaccaatacctgtacaaggagggctgggagcgacagaaggccacaggttatattctaccacccgacgccgtaccatttgtgcatgctcaccactgcaatgacgttcaaagcgagctcaagtataaggcagagcacgtgaaacagaaaggccattatgtaggcgtcccgactatgagggatgaccccaagttggtctggttcgagcacgccggtcagattcagaacgagcgcctgtacaaagaagactaccataaaactaaggctaaaattaacatcccagctgacatggtgtccgttctggcagccaagcagggtcagacattggttagcgacattgattacagaaattatcttcatcagtggatgtgccaccccgaccagaatgacgtgattcaggccaggaaagcctatgatctgcaatccgataacgtgtacagggccgacctggagtggctcagaggtattggttggatccctttggattcagtggaccacgtaagagtgaccaagaatcaggagatgatgtctcagattaagtataagaagaatgctcttgaaaactatccaaacttccgatcagtcgtggatccccctgaaatcgtgctcgccaagattaatagcgtgaaccagagtgatgtgaaatataaggagaccttcaataaggctaagggaaagtacaccttttcaccggacacacctcatatttcccactccaaggacatgggcaaactgtattccaccattctgtacaaaggggcttgggaggggacaaaggcatatggttacaccttggatgagcgctatattccaattgttggggcaaaacacgctgacctagttaatagtgaattaaaatataaggaaacctacgaaaagcagaagggacattacttagcaggcaaagtaattggcgaatttcccggagtagtgcattgcctagatttccaaaagatgagatcagctcttaattaccggaagcattatgaggataccaaagccaacgtgcacatacctaacgacatgatgaaccatgtgttagccaaacggtgccagtacattcttagtgacctcgaatatcggcattacttccaccagtggacgtctctcctggaagaacctaatgtgatccgggtgaggaatgcccaggagatattgagtgataatgtgtataaggacgatctgaattggctcaaggggatcggctgctacgtttgggacacgcctcaaattttgcatgccaagaagtcctatgacctgcagagtcaacttcaatacacggctgcaggaaaggagaacctccagaattataacctggtgacagacacccccttatacgtaactgctgtacagtccggaattaacgcctcagaggtgaagtataaggaaaattaccatcagatcaaggacaaatatacaactgtgctggagaccgttgattatgaccgcactagaaacctgaaaaatctgtacagtagcaatttgtataaagaggcttgggatcgagttaaagctacatcctatatcctcccatcgagcactttatctctgacacatgctaaaaatcagaagcacctcgcctcgcatattaagtatagagaagagtatgaaaagttcaaagctctatatactctgcccaggtccgtcgatgacgaccctaacacagctcggtgtctgagagtgggaaaactgaatatagaccgcctctatcggagtgtgtacgaaaagaacaagatgaagatccacatcgtgcctgatatggtggagatggtaaccgccaaggacagccagaagaaagtctcagagattgactaccggctgaggctccacgaatggatctgccatccggaccttcaagttaatgaccacgtcagaaaagtaaccgaccagatctctgacattgtgtacaaggatgacttgaactggctgaagggaattggctgttacgtgtgggatacacctgagatcctgcacgcaaaacatgcctatgacctccgtgacgatatcaagtataaggctcacatgttgaagacaaggaacgactacaagctggtaaccgacacacctgtgtacgtgcaggccgtcaaatctggcaagcagttgagcgatgctgtgtaccattatgactatgtgcactcggtgaggggtaaggtggcgccaacaactaaaactgtggatctcgatcgggcactgcacgcatacaaattgcaatcttccaatctgtacaagaccagcctgagaacactgccgaccggttatcggctgcctggagacactcctcactttaagcatatcaaggacacccgatacatgtcttcctattttaagtacaaagaagcatacgaacacaccaaggcttacgggtatacattggggccaaaggacgtccccttcgtgcacgtgagaagggttaacaacgtcacttccgagcggctttacagggaactctatcacaaactgaaagacaagattcatacaacacctgacactccagaaattcgacaagtgaagaagacccaggaagccgtgtccgagcttatctataagagtgacttcttcaagatgcaaggccacatgatttcactgccctatactcctcaggtgattcattgcaggtatgttggcgatatcacgtccgacatcaaatacaaagaagacctccaggtgttgaagggttttgggtgctttctgtacgatacccctgacatggtcaggtctcgccacctgagaaaattatggtccaattacctttacactgacaaagctcggaagatgcgagacaagtataaggtcgtgctggacacacccgaataccgcaaggttcaggagctgaaaacccacctcagcgaactggtgtatcgagccgctggaaagaagcaaaaatcaatttttacttctgtgcccgataccccagacctgttaagggccaaaagaggacaaaagctgcagtcccagtacctgtatgtcgaactcgccactaaggagagaccccatcaccatgctggtaatcagacaaccgctctgaagcatgccaaggacgtaaaagacatggtgtccgagaagaaatacaaaatccagtatgaaaagatgaaagacaagtatacgcctgtgcccgacacccccattctgataagagccaaacgggcttattggaacgcatcagatcttagatataaggagacatttcaaaaaacaaaaggtaaataccacaccgtgaaggatgctctcgatattgtgtaccaccgtaaagtgacggacgatatcagcaaaatcaagtacaaagaaaactatatgtctcagctgggaatctggcgcagcatccctgacaggccggagcactttcaccaccgtgccgttaccgatactgtgagcgatgtaaaatacaaggaagatttaacctggctcaaaggcatcggctgttatgcctatgacacacctgacttcactctggccgaaaagaacaagaccctgtattccaaatacaaatataaagaagtgtttgaacgcacaaagagtgactttaaatacgtggctgattcgcctatcaaccgccacttcaagtatgccacacaactgatgaatgagaaaaagtatagggccgattacgagcagcgcaaggataagtaccacttggtagttgatgagcccagacacctactggcaaagacagccggagaccagatttcacagatcaagtatcgcaagaattatgaaaagagtaaggataagttcacaagtatcgtggacactccagagcacctgaggactacgaaagtaaataaacagatctcggatatcttatacaaactggagtacaataaggctaagccgcgtggctacacaactattcatgatacacctatgctcctgcatgtgaggaaggtgaaggatgaggtttctgacctaaagtataaggaggtgtatcaaaggaataaatcaaactgcaccatcgaacccgatgctgtgcacatcaaggcagcaaaggatgcctataaggttaataccaacctggactataagaaacagtatgaggcaaataaggcgcattggaagtggacaccagataggcccgatttcctgcaggccgctaagagctccttgcagcagtccgattttgaatataaactggatcgtgaattcctgaaaggatgcaagctgagcgttaccgatgataaaaacaccgttctcgccctgagaaatactcttattgagagcgatcttaagtacaaggaaaagcacgtgaaggagcggggaacctgtcacgctgtccctgacaccccccagatactgttggccaagaccgtctctaacctggtatccgagaacaaatacaaggatcatgtcaaaaaacacctagcccagggctcctacaccacactacctgaaactcgggacacagttcatgttaaggaggtgaccaagcacgtttccgataccaactataagaagaaattcgtgaaggagaagggcaagtctaactactctataatgctcgagccacccgaggttaagcacgcaatggaagtggctaaaaagcagtccgacgttgcctatcgcaaggatgccaaggagaatctgcattatactacagtggccgacagaccggatattaaaaaggctacccaggctgctaagcaggccagtgaggttgaatacagagctaagcaccgaaaggaaggctcccacgggctgtccatgctgggtagaccagacatcgagatggccaaaaaagctgctaagctctcatctcaggtcaagtacagagaaaactttgacaaggagaaagggaagacacccaagtataaccccaaagattcccaactctataaggtcatgaaggacgccaataacctcgcctctgaagtgaagtacaaagctgatctgaaaaagctgcataagcctgtgacagacatgaaagaaagccttattatgaatcatgtcctcaacacctctcagctggcctcttcttatcagtataagaaaaaatacgaaaaaagcaagggacactatcacaccattcctgacaacctggagcagctgcacttgaaggaagctactgaactgcagtccattgtgaaatacaaggagaaatatgagaaagaacgtggtaaacctatgttggattttgagactcctacttatatcacagctaaggaatcccaacagatgcaatccgggaaagaataccgcaaggattatgaagagtccataaaggggagaaacctaacaggccttgaggttacccccgcattgctacacgtgaagtatgccaccaagatcgcctcagagaaggagtatagaaaagacttggaagaatccattcgtgggaaagggttgaccgaaatggaggacacacccgacatgctgcgcgctaagaacgctacccagatcttgaatgagaaagagtacaagagggatctagagctggaagtgaagggacgtggcctcaatgccatggcaaatgaaacacctgactttatgcgggcacgaaacgccactgacattgcttctcagatcaagtataaacagagcgctgaaatggagaaggccaactttacttcggtggtcgacactccagagattatccatgctcagcaggtcaagaatctctcctcccaaaaaaaatataaggaagacgcagaaaaatctatgtcttactatgagacagtgcttgacacccccgagatccaaagagtacgggaaaatcagaagaatttcagcttgcttcagtaccagtgcgacttgaagaacagcaagggcaagattacagtggtgcaggacacacccgaaatcctgcgggtgaaagagaaccaaaagaatttctcaagcgttttatataaagaggatgtcagtcctgggaccgccatcggaaaaactccagaaatgatgcgagtcaaacagacacaggaccatatctcttccgtgaaatacaaggaagcaattggccaggggacaccaattcccgatctgcccgaagtaaagcgagtcaaggagacacagaagcacattagttcggtgatgtataaagagaatctgggaaccgggattccaacaacagttacacccgagattgagagggtgaagcgcaaccaggaaaatttttccagcgtgttatacaaggagaatatgggcaagggtaccccactgcctgtgactcctgagatggaaagggtgaaacacaaccaggagaacatttctagtgtcctgtataaggagaatgttggaaaagctaccgccacccccgtgacacccgagatgcagcgcgtcaaaaggaatcaggaaaacatctctagtgtcctctactctgacagcttccgcaaacagattcaagggaaagctgcctacgtgttggacaccccagagatgaggcgcgtccgtgaaactcagagacacataagcacagtgaaataccatgaggatttcgaaaagcataagggctgcttcacgcctgtggttactgacccaatcaccgaacgcgtgaagaaaaacatgcaggattttagcgatataaattaccggggtattcaaaggaaggtggtggaaatggagcagaagcgtaatgaccaggatcaggagactattacgggcctgcgcgtctggcgcaccaacccagggagcgtgttcgactatgatccagccgaggacaatatccaatcccggtctcttcacatgattaatgtgcaagcccagagaagaagtcgagagcagagtcgctcagcttctgctctgagcatctcgggcggagaggagaaatcagagcactcggaagcccctgatcatcacctgtcaacctattctgacggaggagtgtttgctgtgtcaacagcctataagcacgcaaagacaacggaactcccccagcaacggagttcatcagtagccacccagcagacaactgtgtcctcaattccatcccatccctctaccgccggtaaaatatttagggcaatgtatgattacatggcagccgacgccgacgaggtgtcttttaaggatggggatgctattatcaatgtgcaggccatcgacgaggggtggatgtacgggacagtccagagaaccggaagaacaggcatgctgcccgcaaactatgtggaggctatttac

SEQ ID NO: 232121 - DNA, 25578 bp, synthetic construct
  misc_feature 1..25578: note = Description of Artificial Sequence: Synthetic coding sequence
  source 1..25578: mol_type = other DNA
atggctgacgatgaggattatgaggaagtggttgagtactatactgaagaagtcgtgtacgaggaagtgccaggcgaaacaatcacaaagatctatgaaaccaccactacgcgtacttcagattatgaacagagcgaaaccagtaaacccgctctcgcccaacccgcactggctcaacctgcatccgccaagcctgtggagcgaaggaaagtgattcggaagaaggtcgacccctccaaattcatgactccgtacatcgcccatagtcagaaaatgcaggacctgttctctccaaataagtataaagagaaatttgaaaaaaccaaaggccagccatatgcttcaaccaccgacacacccgaactcagacgcatcaaaaaagttcaggatcagctgagcgaggtcaaatacaggatggacggtgatgtggcaaaaaccatctgccacgtggacgagaaagcgaaggacatcgagcatgcaaaaaaagttagccagcaggtatccaaggttctgtacaagcaaaactgggaggacactaaggataaatacttgctccccccagatgcaccagagctggttcaggccgttaagaacaccgccatgttttctaagaaactttatactgaagattgggaagccgacaagagcttgttttatccttacaatgatagccccgaactgaggcgggtcgcacaggcccaaaaggctctgagcgacgtggcctacaagaagggcctggcagagcaacaggcccagtttactccacttgccgacccgccagatattgagttcgccaagaaagtgaccaaccaggtgagcaagcagaagtataaggaggattacgagaacaagatcaaaggtaagtggtccgagacaccttgcttcgaagtggcaaatgccaggatgaatgccgataacatcagcaccaggaagtatcaagaggatttcgagaacatgaaagaccagatttactttatgcagaccgaaactccagaatacaaaatgaataaaaaggccggagtcgctgccagcaaggtgaaatacaaagaggattacgaaaagaacaaggggaaggcagactataacgtacttccagcatcggagaatccacagttgaggcagctcaaggcggctggcgacgcgctgagcgacaagttatataaggagaattatgagaaaacgaaggccaagtctatcaactattgtgaaacacccaaatttaaactggatacggtgctacagaacttctcatccgataaaaagtacaaagacagttatctgaaagacattttgggccactatgttggaagcttcgaggacccgtatcacagccattgcatgaaagttacagcacaaaacagtgataaaaattataaggcggagtacgaggaggatagggggaaaggttttttcccccaaactattacgcaggaatatgaagccattaagaagctggatcagtgtaaggatcatacctataaagttcatccagataagaccaaattcacacaggtcactgatagtccagttcttctgcaggctcaggtcaattcaaaacagttgagtgaccttaattacaaagcgaagcacgaatctgagaagttcaagtgccacattccacccgacaccccagccttcattcagcacaaggtaaatgcctacaatctctcagataacctatacaaacaggactgggagaagtccaaggcaaagaaatttgatattaaagtcgatgcaatccccctccttgccgcaaaagctaacaccaagaacacaagtgacgtgatgtataagaaggactatgaaaagaataaaggcaagatgattggagttttgagcattaatgacgatccaaaaatgctccattcattgaaagtagcaaagaatcaatcagaccgtctgtacaaggagaattacgagaaaaccaaggcaaagagcatgaactactgcgagacccccaaataccagctcgacacacagctgaaaaacttctccgaggcgaggtacaaagatctttatgtgaaggatgtcctgggacattatgtcgggtcaatggaggacccttatcatacccattgtatgaaggtggcggctcaaaatagcgataagtcttataaggctgaatatgaagaagacaagggaaaatgttatttccctcaaacaattacgcaggagtacgaggctatcaagaaattagaccagtgcaaggaccacacctacaaggtacacccagataagactaaattcacagcggtgactgatagccccgttctgttacaggcccaattgaacaccaaacagctttcagaccttaactacaaagcaaagcacgagggtgagaagtttaagtgtcacatcccagctgatgcccctcagtttatccaacatcgcgttaacgcctataacctgtctgataatgtgtataaacaggattgggaaaaatcaaaggcaaaaaagttcgatataaaagtggacgccatccctctcttggccgcaaaagccaacaccaagaacacttcagacgtcatgtataaaaaagactatgagaaatcaaagggcaaaatgattggcgctttatcgattaatgatgaccctaaaatgctccattccttgaaaaccgccaagaaccaaagcgaccgcgaataccgtaaagactatgaaaaaagtaagactatttacacggcccctctcgacatgctgcaggtgactcaggccaagaagtcccaagcaattgccagtgacgtggattataaacatatcctgcattcatattcctaccctccggactccatcaatgtggacctcgcaaaaaaagcctacgcattgcagtctgatgtcgagtacaaagctgactataatagttggatgaaaggctgtggatgggtgcctttcggttctctcgaaatggagaaggccaagcgggcttctgacattctgaatgaaaagaagtatcgacagcaccctgacacgttgaaattcacctctatcgaagacgcccctatcactgtccaaagcaagattaaccaggcccagcgcagtgacattgcatataaggcgaagggtgaggaaattattcacaagtataatctcccacccgacctgcctcagtttatacaggccaaagtgaacgcctataacatcagtgaaaatatgtacaaggctgacttgaaggatttgtctaaaaagggctacgatctgaggactgacgcaattcctatccgtgccgctaaagccgctaggcaggctgcttcggatgtccaatacaaaaaggactacgagaaagctaagggaaagatggtcggttttcaaagtttgcaggacgaccctaagctcgttcattatatgaatgtagctaagatacagtcggatcgggagtacaaaaaagactacgaaaagaccaaaagtaaatacaatacacctcatgatatgttcaatgtcgtagcggctaaaaaagcacaggacgttgtgtcgaacgtcaattacaagcactcgctgcaccactatacctacctccctgatgccatggacctggagctgtctaaaaacatgatgcagatccaaagcgataatgtctacaaggaggattacaataattggatgaagggcataggctggataccaatcggtagcctggacgtcgaaaaagtcaagaaggcaggtgacgcccttaatgaaaaaaagtatcggcagcatcctgataccctaaaatttacttccatcgtcgacagcccagtcatggtccaggccaaacagaatacaaaacaggtcagcgatatcctgtataaagccaagggtgaagacgtcaaacacaaatacacaatgagtcctgacctcccccagtttctacaggctaaatgcaatgcgtacaacatctctgatgtttgttataaacgcgattggtatgacctcattgcaaaaggcaacaatgtgctcggagacgctataccaatcacagcagctaaggcctctcgtaatatcgcatctgattacaagtataaggaagcatacgaaaaatctaaggggaagcatgtgggatttagaagcctccaggatgaccccaaactggtccactacatgaacgtggccaaactgcagagcgatcgcgagtacaagaaaaattacgaaaacacgaaaactagctaccacactccaggagatatggtttctatcaccgccgcaaagatggctcaggacgtagcaactaacgtgaattacaaacaacctctccatcactacacctacctgccagacgcaatgtcactggaacataccaggaacgtgaaccaaatccagtccgacaacgtgtataaagacgaatacaattcatttttgaaaggaatcggatggattccgatcggtagcctggaagtggaaaaagtgaaaaaagcaggcgacgccctcaatgaacgcaaataccgccagcatccggatacggtcaagtttacatcggtgcccgattctatgggcatggttttagcccagcataacaccaaacagctgtctgatctgaattataaggtggagggcgagaagctaaagcataagtatacaattgaccccgaattgccacagtttattcaggcaaaggtcaacgctcttaatatgagtgacgcgcactataaggcggattggaagaaaactatagctaaaggttacgacttgagacccgacgccatccctatcgtagccgctaagtcaagcagaaacatagcctccgattgcaaatacaaggaagcgtatgaaaaagcgaaagggaagcaggtggggtttttgtcgcttcaggatgatcctaagctcgtgcattatatgaacgtcgccaagattcagtccgatagggagtataagaagggttatgaagctagcaagacgaagtaccatacaccccttgacatggttagtgtgacagctgctaagaaatctcaggaggtagccaccaatgcaaattacagacagagctatcatcactatactctgttacctgacgcacttaatgtggagcactctcgcaatgccatgcagatacaaagtgataatctctacaagagcgatttcactaactggatgaaagggatcggatgggtgcctatcgagtcattggaggtggagaaagcaaagaaggctggggaaatcctgagtgaaaaaaagtaccgccagcaccccgaaaagctcaagtttacttatgcaatggacacgatggagcaagctctgaacaagagtaataaactcaacatggataagcgcctgtacaccgaaaagtggaacaaggataagaccaccattcatgtgatgcctgatactcctgatattctgctgtctagagtgaatcagattaccatgtccgacaaactttataaagccggttgggaggaggagaagaaaaaggggtatgacctcaggcccgacgcaatcgcaattaaagcagccagggctagcagagacattgctagcgattacaagtataagaaagcctatgaacaggctaaagggaagcacatcggtttcagatctcttgaagatgaccccaagctcgttcattttatgcaggtcgcaaagatgcagagcgacagggaatataagaaaggttatgagaaaagcaagacttcctttcacacacccgtggatatgctttccgttgtagctgctaaaaagtctcaggaggttgccaccaacgcgaactaccggaacgtgattcacacctacaatatgcttccagatgccatgtcctttgaactcgctaagaacatgatgcaaatccaaagtgacaaccagtataaagcggattatgccgacttcatgaagggaatcggctggcttccattgggctcacttgaagcagagaaaaataagaaagctatggagatcataagtgaaaaaaagtatagacagcatcccgatacactgaagtactcaaccctgatggacagtatgaatatggtgctcgcccagaataatgctaaaattatgaatgaacacctgtacaaacaggcgtgggaggctgacaagaccaaagtgcacatcatgcctgacattcctcagattatcctggctaaggccaacgccattaacatgtctgataagctgtataagctgtccctggaggagagcaagaagaagggctacgacctgcgacctgatgcgattccaattaaggcggctaaggcaagtcgggacatcgcctccgattacaaatataaatataactatgagaagggaaagggtaagatggttggattcagaagtcttgaagacgacccaaagttggtgcactccatgcaggtggctaagatgcaaagcgaccgggagtacaagaaaaactatgagaatacgaaaacatcctaccacactcctgcggatatgctgtcagtgaccgcagcaaaagatgctcaagcgaacataacaaacacaaactacaagcatttaatccacaagtatattctcctgccagacgcgatgaacatcgagctgacgcggaatatgaaccgtatccaaagcgacaatgagtacaaacaggattacaatgaatggtacaaaggtctgggatggagtccggcaggctccctggaagtcgaaaaggctaaaaaggccacagagtacgcatcagatcaaaagtataggcaacacccatctaattttcaattcaaaaaactgaccgacagcatggacatggtgctggcgaaacagaacgcccacacaatgaacaagcatctgtatactatagattggaataaggacaagacgaaaattcacgtgatgcctgatacgcccgacattctccaggccaagcagaatcaaaccctgtactcccaaaaactgtacaagctgggctgggaagaagctcttaagaaagggtacgacctgcctgtggatgctatttccgtgcaactcgcaaaggcctctcgggacatagcaagcgattacaaatacaaacagggctatcggaaacagctagggcaccacgttggctttcgcagcttgcaggatgacccaaaactagttctcagcatgaacgtggccaagatgcagtctgagcgagagtacaagaaagactttgaaaaatggaagactaaattcagctctcccgtagacatgctgggagttgtccttgcgaagaagtgccaggagcttgtgagcgacgtggattacaagaactatctgcatcaatggacttgtctgccagatcagaatgacgtcgtccaggctaagaaggtctacgaactgcagtccgagaacctctataaatccgacctcgaatggctacgcggaatcggatggagccctcttggctcccttgaggctgagaagaacaagcgcgcaagtgaaattatcagcgaaaagaagtaccgacaacctcccgatagaaataaattcacgagcatccccgatgctatggatatcgttctggcaaaaacaaacgctaagaatcgcagtgataggctctaccgggaggcatgggacaaagacaagactcaaatccatattatgcccgacactcccgacatagttctggcaaaggccaatctaattaatacatccgacaagctgtatcgtatgggctacgaggaactaaagcggaagggatacgatctcccagtggacgcaattcccattaaggccgcaaaggcatctcgggagattgccagcgagtacaagtacaaggaggggttccgcaagcagttagggcaccatatcggggctcgtaacatcgaggacgatccaaagatgatgtggagcatgcatgttgcgaaaattcaaagtgacagagagtataagaaagactttgaaaaatggaaaactaagtttagcagtccagtagatatgctgggagtggttctggcgaaaaaatgccagaccttggtctccgatgtcgattacaagaattatctgcaccaatggacatgcttgccagaccagtctgacgtcatccacgcccgacaggcgtatgacctgcagtctgataatctttataaatctgaccttcaatggctgaaagggattggctggatgacctctggatccctagaggacgaaaaaaacaagagggctacacagattttgtcggatcatgtgtataggcaacatccagatcagttcaagttcagctctctgatggattcaattccgatggtgttggccaagaataatgccatcactatgaatcatcgcttatacactgaggcctgggacaaagataagactacggttcatataatgcctgatacacctgaagtcctgttggccaagcagaataaggtcaactattctgagaagctttacaaattgggactggaagaggccaaacgcaagggctatgatatgcgagtggatgcaataccaatcaaggccgctaaagcatcgagagacattgcatccgagttcaaatataaagagggttaccggaaacaactcggccatcatatcggagctcgcgctattcgcgacgatccgaagatgatgtggtccatgcatgtggcaaagatccaaagcgatcgggaatacaagaaagactttgagaagtggaaaactaagttctcctctcctgtggatatgctcggtgtggtcctcgcgaagaagtgccagactctcgtgtctgatgttgattataagaattatttacaccaatggacctgtctgcctgaccagagcgacgttatccacgcccgtcaggcctacgacctccagtctgataatatgtacaagagcgatctccaatggatgcggggtataggatgggtatctatcggcagccttgatgttgagaagtgcaagcgtgcaacagagattctcagcgataaaatctacaggcagcctccggataggtttaaattcacatcagtgacagactctctcgaacaagtgctcgctaagaataacgctatcacgatgaataagcgcctgtacacggaagcttgggataaagacaagactcaaatccacattatgccagataccccagagattatgctggcaagaatgaataaaatcaattactctgaatccctgtacaagcttgcaaacgaggaagccaagaaaaagggctacgacctccgcagtgatgccatccccatagtagctgccaaggcaagccgcgacatcataagtgactataagtacaaggacggttactgtaaacagctgggccaccatataggtgccaggaatatagaagatgacccgaaaatgatgtggtctatgcatgtcgcgaagattcagagtgatagggagtataagaaggactttgaaaaatggaaaactaagttcagttcaccggtggacatgctgggggttgtcctggctaagaaatgtcaaacactggtttctgatgtcgactataagaattaccttcatgaatggacctgtttacccgatcagagcgacgtgattcatgcccgtcaggcctatgacctgcaaagcgacaatatctacaaaagtgatctccagtggcttcgcggaattggttgggtgcccatcgggtctatggacgtggttaaatgcaagcgtgcgactgaaatactgtcagataatatctaccgtcagccacctgacaaactcaaattcacaagcgtgaccgattccctggagcaagtactagcaaaaaacaacgccctaaacatgaataagcggttgtatactgaagcatgggacaaggacaaaacccaaatccatatcatgccggatactcccgaaattatgctggccagacaaaataagattaactattccgaaacactttacaagctggccaatgaagaagcgaagaagaaaggctacgatcttagatcagatgccataccaatcgtcgcagccaaagcgtcaagagatgtcatatctgactataaatacaaagacggttatcggaaacagctaggacatcacattggtgccagaaatattgaagacgatcccaagatgatgtggtctatgcatgtggccaaaatccagtccgatagggaatacaaaaaggactttgagaaatggaagacgaaatttagttcccctgttgacatgcttggcgtggtcttagccaaaaagtgtcaaaccctggtatctgatgtggactacaagaattacttgcacgaatggacttgcctgccagaccaaaatgacgtgatacatgctcgtcaggcctatgatttgcagtcggacaatatctataagagcgatctccaatggctgcgcggaatcggatgggtgccaatcgggtctatggatgtagtgaaatgtaaacgcgcagcagagatcctctccgacaacatataccgccagcctcccgacaaactgaagtttacctctgtaaccgattctctggaacaagtgctggcaaaaaataatgcattgaatatgaacaagagattgtatacagaggcctgggacaaagacaaaacccaggtccacataatgccggatacccctgagatcatgctggctagacagaacaagataaactatagtgagagtttataccgccaagcaatggaggaagccaagaaggaaggttacgatcttcgctctgatgcgatcccaatcgtggccgctaaggcctccagggacatcgcatctgattataagtataaggaggcttacagaaagcaacttgggcaccacatcggggctcgagctgtccacgacgatcccaagatcatgtggtcactccacatcgcaaaagtgcagtcagacagagaatacaagaaagacttcgagaagtataaaaccaggtatagctctccggtcgacatgcttggcattgttttagccaagaaatgccaaacgttggttagtgacgtggactataaacaccctctgcacgagtggatctgcttgccggaccaaaacgatatcatccacgctcgtaaggcgtacgacctgcagtcagacaacctttacaaatcggatctggagtggatgaagggcattggctgggtacccatagattccttggaagtcgtccgggctaaaagagcaggcgaactcctgtccgacaccatctaccgtcagcgaccggagacactgaagttcacttccattactgacaccccggaacaggttctagccaagaacaacgcactgaacatgaacaagcgactgtatacagaagcttgggataacgataaaaagaccatacatgtgatgccagatacccccgagattatgctggcgaagctgaaccggatcaattactctgataaactgtacaaactggccctggaggagtctaaaaaggagggctacgatctgagactggacgcgatccctatacaggccgctaaggcgagcagagatatcgcctcagattacaagtataaggaaggctaccgcaagcaactaggccaccatattggcgcacggaacatcaaggatgacccaaagatgatgtggagcatccatgttgccaagatacaaagcgatagagagtataagaaggaatttgaaaagtggaagactaaattttcctcgccggtggacatgcttggagttgttttagctaagaagtgtcagattctggtgtcagacatcgactacaaacaccccttgcacgagtggacatgccttcctgaccagaacgacgtgattcaagctaggaaggcatacgatcttcagagcgacgctatctacaagagcgaccttgagtggcttcgtgggatcggctgggtgccaattgggtccgtggaggtggaaaaggtgaaacgggcaggcgagatcttgtcagatcggaagtacagacaacctgcagaccagcttaaatttacatgcatcactgacacgccagagattgtcctcgcaaaaaacaacgctctgacaatgagcaagcatctgtacacagaagcctgggacgccgataaaacctcaatccacgtgatgccagacacgcctgatatccttctggccaaatctaatagcgccaatatctctcagaagctgtatacaaagggatgggatgagtctaagatgaaggactatgatctgagagcagacgccattagcatcaagagtgccaaggccagccgagatattgcaagtgactacaaatataaagaggcctacgagaaacagaaaggacatcatatcggagctcagtccatcgaggatgaccctaaaatcatgtgtgcaatccacgcaggtaaaattcagagtgagcgagaatataaaaaggagtttcagaagtggaaaacaaaattttcttctcctgtcgatatgttgtctatcttgttggccaaaaaatgccagaccctggtgaccgatattgactatcggaattatttacatgaatggacttgtatgcccgatcagaacgacatcatccaggccaagaaggcctatgacctgcaatccgactcagtctataaagcagatctggagtggttgcgtgggatcggttggatgcccgagggctcggttgaaatgaatcgagtcaaagtggctcaagatttggtgaatgaacggctatacagaacaaggcccgaggctctctcattcacctcaatagtggacacccctgaagttgtactcgccaaggcgaattccctgcaaatttccgaaaaactttatcaggaggcatggaataaggacaaatcaaatatcactatcccctccgacactcccgaaatgctgcaggcgcacatcaatgccctgcagatctcaaacaagctctaccagaaagattggaacgatgctaagcagaaagggtatgacatcagagcagacgctattgaaatcaaacacgctaaggccagcagggagatagcaagtgagtataaatacaaggagggttacagaaagcaactcggccatcatatgggctttagaaccctccaagatgatcccaaaagcgtgtgggcaattcacgctgccaagatacagtccgatcgggagtacaagaaggcctacgagaagtccaaagggatccacaatacacccctagatatgatgtctatcgtccaggccaaaaagtgtcaagtgcttgtctctgacatagactaccggaactaccttcaccaatggacttgcctgcccgatcaaaacgacgtaatccaggctaaaaaggcatacgacctgcagagtgataacttatataaaagtgacctggagtggctaaaagggattggttggctgccagaggggtccgttgaggttatgagagtgaagaacgcacagaacctccttaatgaacgcctttacagaattaagcctgaggccttaaaatttacatccatcgttgatacacccgaggtcattcaggctaaaatcaatgctgtgcagatctctgaaccattataccgggatgcttgggagaaggaaaaagctaatgtcaatgtccccgctgatacgccactaatgcttcaatccaaaattaatgcactgcagatcagcaacaaaaggtatcagcaggcatgggaagatgttaagatgacaggatacgatcttcgggctgatgcaatcggcattcagcatgcaaaagcctctagagatatagcatctgattacctatacaaaaccgcctacgagaaacagaagggtcactacataggttgccgctctgcaaaagaggacccaaaactagtgtgggcagctaacgtcctaaagatgcagaacgaccgcttatacaagaaggcctacaatgatcacaaggccaagatctctattcctgttgacatggttagcatttctgctgccaaagagggacaagcgctcgccagcgacgtagactaccgacactacctccaccattggtcttgtttcccagaccagaacgacgtgattcaggccaggaaagcgtacgacttgcaaagcgattcggtgtacaaagctgatctggagtggttgaggggaataggttggatgccagagggcagcgtggaaatgaacagagtaaaagtggcccaggacctagtcaacgaaaggctgtatagaacacgaccggaagccctgtcattcactagtatcgtggacacccccgaagtggttctggctaaagccaatagcctccagatctccgagaagctctaccaggaggcctggaataaggacaaaagtaacatcacgatcccttcagacacgcctgagatgctgcaggcgcatattaacgcgctgcagattagcaacaagctctaccaaaaagactggaacgataccaagcagaagggctacgacattcgggcagacgcgattgaaatcaagcacgccaaggcttctcgggagatcgcaagtgagtacaagtacaaggagggttataggaagcagcttggccaccacatgggtttccgcacactccaggacgaccccaagagcgtgtgggccatccacgccgcaaagattcaatctgatagggaatacaagaaggcctacgaaaagagcaagggaatccacaataccccattagacatgatgagtattgtccaggcaaaaaagtgtcaggtactggtgtcagatatcgattaccgcaactacctccatcagtggacatgtctgcctgatcagaacgacgtcatccaagccaaaaaagcatatgatttacagtccgataacctgtacaaatccgacttggaatggcttaagggcattggttggctgccagaggggtccgtggaagtgatgcgagtcaagaacgctcagaatctgctcaatgagcgcttgtatcgcatcaaacctgaggcactaaaattcactagcattgtggacacacctgaggtcattcaggccaaaattaacgctgtgcagatctctgaacctctttaccgcaatgcatgggaaaaagagaaagcgaacgtcaatgttcccgcagacactccactgatgcttcagtctaagataaacgcccttcagatcagcaacaaacgctatcagcaagcttgggaggatgtgaaaatgaccggatacgacctgagggccgatgctataggcatacagcatgcaaaagcgtctagggatatcgcaagcgattatctatacaaaacggcatacgagaaacagaagggtcattacattgggtgcagaagcgcaaaagaagatcctaaactcgtctgggcagctaatgtgctgaagatgcaaaatgatcggctctacaaaaaggcctacaatgatcacaaagccaaaatatctatcccagtggacatggtgagtatcagcgcagccaaagaggggcaagccttagcctccgacgtggactaccgacattatttgcaccattggtcttgctttcctgatcaaaacgacgtgattcaggcacgcaaggcttatgatcttcagtcagatagcgtgtataaagccgacttagaatggctgaggggaattggatggatgcctgagggctcggtcgagatgaatcgggtaaaagtcgcccaagatctggtaaatgagcgcctctacaggaccagacccgaggctctgagtttcacatccatcgtggatacacctgaagtcgtgttggcgaaggcgaatagcttacagatcagcgagaagctgtaccaggaagcgtggaacaaggacaagtccaatataaccatccctagcgatactccagagatgttgcaggcacacatcaacgctctgcaaatctccaataaactttatcaaaaggactggaatgacacaaaacagaaggggtacgacatccgagccgacgctatagagattaaacatgctaaggcatccagagagatagcctcagagtataagtataaggaaggctatcgcaagcagctgggccaccacatggggtttcgtaccctccaggatgaccccaaatccgtctgggctatccacgcagccaagattcagagcgatcgggagtacaagaaggcctacgaaaagagcaagggaattcacaacacccccctggacatgatgtctattgtacaggcgaagaagtgtcaggtgctggtgagcgatatcgattaccggaattatcttcaccagtggacatgcttgcctgatcagaacgacgttatccaggcaaaaaaggcgtacgacctgcagtctgacaacttatataaatccgatttggagtggttgaaagggatcggctggttacccgagggatcagttgaggttatgagggtgaaaaatgctcagaacttactaaatgagcgcctgtacaggattaagcctgaggccctgaaattcacgtctattgtggatacaccagaggtgatacaggcaaagattaacgctgttcagataagtgagcccctgtaccgcgacgcctgggagaaggagaaagcaaacgtgaacgtacccgctgacacccccctcatgcttcagtccaagattaatgcattgcaaattagcaacaagaggtaccagcaggcctgggaggatgtaaaaatgaccggatacgatctccgggctgatgcgattggcatccaacacgccaaggcctcacgtgacatcgcgtcagattacttgtacaagaccgcgtatgagaagcagaaaggacactatatagggtgtcgctcagcgaaggaagatccaaaattagtgtgggccgctaatgtgttgaagatgcagaacgaccggctctataaaaaggcatacaacgatcataaagctaagatatcaatcccagttgacatggtgtctatcagcgcagccaaagaagggcaggctctcgccagcgacgtggactacaggcactacctgcatcggtggtcctgcttccctgaccagaacgatgtcatccaggccaggaaagcctatgacttacaatctgacgcactttacaaagctgatctggagtggctcagaggcataggatggatgcctcagggctcgcctgaggtgctcagagttaaaaacgctcaaaatatcttctgcgatagcgtctacagaactccggtggtcaacctcaagtacacttccattgtggatacaccagaggtggtgctagcgaaatcaaacgccgaaaacatctcaatcccaaaataccgcgaagtctgggataaggataaaacttctatccacatcatgccagatacacccgagataaacttggcccgtgccaacgccctgaatgtgtctaacaagctctaccgtgaaggatgggatgagatgaaggcaggttgcgacgtacggttagatgcaatcccaatccaggctgccaaagccagtcgggagattgcttctgactacaagtacaaactggaccacgagaaacagaaaggacactatgtcgggacattgaccgcaagggatgataataagatcagatgggccctcatagccgataagctgcaaaacgaacgcgagtaccgactggattgggcaaaatggaaggccaaaattcagtccccagtcgacatgctgtccatcctgcattccaaaaacagccaagcactggtctccgatatggattaccgaaactacctgcaccagtggacttgcatgccagaccagaatgacgtcatccaggccaaaaaagcttatgagctgcagagcgacaacgtgtataaggcggacctggagtggttacggggaatcggctggatgcccaatgacagcgtctccgtgaaccacgcaaaacacgcagccgacatttttagcgagaaaaaataccgtacgaagatcgagactctgaatttcacccctgtggacgacagggtggactacgtgactgcaaaacagtctggcgaaatactggacgatatcaaatatcggaaagattggaacgcaactaagagcaagtacacacttactgagacacctctactccatacagcccaagaggcagcgagaattttggatcagtatctgtacaaggaaggctgggaacgacagaaggccacaggctacattcttcccccagacgccgtgccatttgtccacgcccatcactgtaatgatgtgcagtctgaactgaagtacaaggcagaacacgtgaagcagaagggtcattacgtaggagtgccgacaatgagagatgatcccaaacttgtctggttcgagcacgccggacagatccaaaacgaaaggctctacaaagaggattatcacaaaactaaagccaaaataaatatacctgccgatatggtgagtgtgctcgcagctaaacaaggccaaactctcgtgagcgacattgattatcggaactatttacaccagtggatgtgccaccctgaccagaatgatgttatccaagccaggaaagcttacgacctgcaaagtgacaatgtgtatagggccgatcttgagtggcttcgcggtattgggtggattcccctggatagtgtggatcatgtgcgtgtgactaaaaaccaagagatgatgtcacagattaaatataagaagaacgccctcgagaactacccaaatttccgcagcgtggtcgaccctccagaaatagtattagccaaaatcaattcagtcaaccagtctgatgtaaagtacaaagaaacattcaacaaggccaagggaaagtacaccttttcgccagacactcctcacattagtcattctaaggatatgggtaagctgtatagtaccatcttgtacaaaggggcatgggaaggaacgaaagcctacggttacacccttgacgaacggtacattcccatcgtcggtgccaaacatgcggatctggtcaactccgagcttaagtataaggagacctatgaaaagcaaaaggggcattatctggctggcaaagtgatcggcgagtttcctggagtcgttcattgcctggactttcaaaaaatgcgaagtgccctcaactaccgcaagcattacgaggacaccaaggctaacgtccacatacctaatgacatgatgaaccacgtcctggcgaagaggtgccagtatattttgagcgaccttgaatacaggcactatttccatcagtggaccagccttcttgaggagcccaacgtgatccgagtacgcaatgcacaggaaatcctctccgataatgtgtataaggacgacctgaattggctaaaaggcatcggttgttacgtgtgggacacgccccaaatcctgcatgctaaaaagagctatgacttgcagtcccagttgcaatataccgccgctggcaaggaaaatcttcagaactacaacctggtgaccgacacacctctttatgtcaccgccgtgcagtccggaatcaacgcctccgaggtaaagtacaaggagaactaccaccagataaaagacaaatacactactgtgctggagacagtggactatgaccgtacacgcaatctcaaaaatctatatagttccaacctgtataaagaggcttgggatcgggtgaaggccactagctatattctcccttcctccacactgtcactcactcacgccaaaaatcaaaagcacctggcttcccacattaagtatcgggaggagtatgagaaattcaaagccctttacaccctgcctaggagtgtggacgacgaccctaacacagcccgttgcttgcgagtcggaaaactcaacatcgacagattgtaccgcagtgtctacgagaaaaacaagatgaagatacacatcgtccccgacatggttgagatggtaactgccaaagatagtcagaaaaaggtctcagaaattgattatcgtttgaggcttcatgaatggatttgtcaccccgacctccaagtaaacgaccatgtccgcaaagtgacagatcaaataagtgatatcgtctataaagacgatctgaactggctgaagggtatcggctgttatgtgtgggatacacctgaaatattgcacgccaaacacgcctacgacctcagagacgatattaagtacaaggcacatatgttgaagacacgcaatgattacaagctagtcactgacactcctgtatatgtgcaggcagtcaagtcaggtaagcaacttagcgacgctgtataccactacgactacgtgcatagcgtgagagggaaggtggcccctacaacaaagaccgtcgaccttgacagggctttgcacgcatacaagctgcagtcctctaacttgtacaagacctcgttgcgaactttgcccacaggataccggttgcctggggacactcctcacttcaagcacattaaagacactcgctatatgagttcatatttcaaatataaagaggcttacgaacacaccaaagcctatggctatacgttggggcctaaggacgtgccttttgttcatgttcgaagggttaacaacgtgacatccgagcgtctgtacagagagctgtaccataaattgaaggacaagatccatacaactccagataccccggagatccgtcaagttaaaaaaactcaggaagcagtctccgagctgatctacaagagtgactttttcaagatgcaagggcatatgataagcctgccctacacaccacaagtaatccactgtaggtatgtcggggatatcacgtctgatatcaagtataaggaggacctgcaggtcttgaaggggttcgggtgtttcctctacgatacccccgatatggtccggtctagacacctccggaagctgtggtctaactatctgtatacagacaaagcgcgtaaaatgcgcgacaagtataaggttgtgcttgatacaccagaatatcgaaaggtgcaggagctgaaaacacaccttagcgagctagtctaccgtgcggcaggcaagaaacagaagtctatctttacatcagtgccggacacccccgatctgctgcgcgctaagagaggacaaaagctgcagagccagtatttatacgtcgagctggctacaaaagagcgtccccaccaccacgccggaaaccaaaccactgcactgaaacatgctaaagacgtgaaagatatggttagtgagaagaagtataagatacagtatgagaaaatgaaagataagtatacacctgtacccgacacccctatactgatccgcgctaaacgcgcttattggaatgccagtgaccttaggtataaggaaacctttcaaaagactaagggaaagtaccacactgtgaaggatgccctggacattgtctatcaccgaaaagtgactgacgacataagcaaaattaagtataaagagaactacatgtctcagctgggaatctggcgaagcatccctgatagaccagagcatttccaccatagggccgttactgacacagtctccgatgttaaatacaaggaggaccttacttggctgaagggcattgggtgctatgcctacgacacccctgatttcacactcgctgaaaaaaacaagactctctattcaaaatacaaatacaaagaggtgttcgaaaggaccaagagtgatttcaaatatgtcgctgactcacccatcaatagacattttaagtatgcgactcagctaatgaacgagcggaagtacaagtcttcagctaaaatgtttctgcagcacggttgtaacgaaatactgagacctgacatgctgaccgccctatataacagccacatgtggagccagatcaagtaccgtaaaaattatgagaagtcaaaggacaagttcacctctattgttgacaccccagagcacttgcgcacaacgaaagtcaacaagcagataagtgacattctatacaagttagagtataacaaggccaaaccacgaggctatacgaccatacacgatacaccaatgctcctccacgttaggaaggtcaaggacgaagtatcagatttgaaatacaaggaagtgtaccagcggaacaaaagcaactgcacgatagagccagatgctgtgcacattaaggccgcaaaggacgcatacaaggtaaatactaatctggactacaagaaacaatacgaagctaacaaagctcattggaagtggacgcctgacagaccagactttctccaagctgcgaagtcttccctgcagcagtccgattttgagtacaaactcgaccgcgagtttctgaagggctgtaaacttagtgtgacagacgacaaaaacacggtgctggcactcagaaatacacttatagaaagcgatctcaaatacaaggagaagcacgtcaaggaacgagggacctgccacgccgtgcctgatactccccaaattctgctcgcaaaaaccgtgtcaaacctcgtatccgagaataagtataaggaccatgttaagaagcaccttgcccagggctcatacaccaccctgccggaaacccgggacaccgtgcacgtaaaggaagtcaccaaacacgtgtcagatacaaattataaaaaaaagttcgtgaaggagaagggaaagagtaattatagcattatgttggaacctcctgaggtgaaacacgctatggaagtcgcaaagaagcaatccgacgtggcgtacaggaaggatgctaaggaaaatttgcactacaccacagtcgcagataggccggatatcaagaaggccacccaggctgcgaaacaggccagtgaggtggaatatagggccaaacacaggaaagagggctctcacgggctctctatgttgggaaggcccgacattgagatggccaaaaaagccgctaagctgagctcccaggtgaagtaccgggaaaacttcgacaaagagaaggggaagacccctaagtataatccaaaggacagccaactgtataaagtcatgaaagatgctaataacctggctagtgaagttaagtacaaggcagacttaaagaagctgcacaagcccgtgacagacatgaaggagtccctcattatgaaccacgtcctgaacaccagccagttggcctcctcttaccagtataagaagaaatacgagaagtccaagggtcactaccataccatcccggataacttggaacagctgcatctcaaagaggccaccgagctccagtccatcgttaaatacaaggagaagtacgaaaaagaacgagggaagccaatgctggattttgaaactcctacctacatcaccgcaaaggaatcacagcagatgcaaagtggaaaagagtatcggaaagattacgaggagtccatcaaaggaaggaacttaaccggacttgaagtgaccccagccctgctccatgtaaaatacgccacaaaaatcgcaagcgagaaagagtaccgcaaagatcttgaagagagtattaggggtaaaggcctgacggaaatggaggacacgccagacatgctgagagctaaaaatgcaacacagatcctgaacgaaaaagagtataagcgcgacttggagctggaagtcaaaggcagaggcctaaacgctatggcgaatgagactccagacttcatgagggccagaaatgcgacggacatcgcatctcagattaaatacaagcagtccgcggagatggagaaagctaacttcacatctgttgttgacactcccgaaataatccacgcacagcaggtaaagaatttgagcagccagaagaaatataaagaggacgctgagaagtcaatgagttattacgagacagtacttgacactccagagattcaacgggtaagagaaaaccagaagaacttctcactgctccagtaccaatgcgacctcaagaatagcaagggcaagattactgttgtgcaagacacaccagagattctgagagtgaaggagaatcaaaaaaatttttcgtccgttctttacaaagaagatgtcagtccgggtacagccatcggcaagactcctgaaatgatgcgtgtgaagcagactcaggaccacattagtagcgtgaagtacaaagaagccattggacagggaactcctatcccggatttgcctgaagtcaagcgcgtaaaagagacacagaaacacattagtagcgtgatgtataaagagaatctgggaactgggattccaacaacagtaacacctgaaatagaacgggtaaaaaggaatcaggaaaatttttcctctgtgctgtataaggagaaccttggcaaaggcattccaacccctatcacccctgagatggagagagttaagaggaaccaggagaacttttctagtattttatacaaggaaaacctatccaaaggaacgcccttacctgtgacgcccgagatggaacgcgttaagctgaatcaggagaacttcagttcagtgttgtacaaagagaatgtgggaaagggaatcccaatccctattacacccgaaatggagcgagttaagcacaatcaggaaaattttagtagcgttctgtacaaagagaatcttggtaccggcatacctattcccataactcccgaaatgcagagagtgaagcacaatcaggaaaacctgagcagcgtgctctataaagaaaatatggggaaaggtacacctctgccagttacgcctgagatggaacgtgtgaagcataaccaagaaaatatctcttcagtgctttacaaggaaaacatggggaaaggtaccccactgccagtgacgcctgaaatggaacgggttaagcataaccaggagaacatttccagcgtgctctacaaagaaaatatggggaagggcacgcccttggccgtgacccccgagatggagcgcgtgaaacataaccaggaaaatatctcctctgtcttgtacaaagaaaatgtggggaaggccaccgccacacctgtgaccccggaaatgcaacgagtcaagcgaaaccaagaaaacatctcttccgtgctttacaaggagaacctgggtaaagcaaccccaacacctttcacccccgaaatggagcgagtgaagcgaaatcaggaaaatttcagttcagttctatacaaggagaacatgaggaaagccacaccaaccccggtcacccccgaaatggagagggccaaacgcaaccaggagaacatcagcagtgtgctttatagtgattcctttcggaagcaaatccaggggaaggcggcttacgtgcttgacacccctgagatgaggcgcgtgagggaaacacagcggcatatctcgacggtgaagtatcatgaagattttgaaaaacacaaagggtgcttcacaccggttgtgactgacccaatcaccgagagagtgaaaaaaaacatgcaggatttcagtgacatcaactatcggggaatccagaggaaagtggtggagatggaacaaaagcggaacgaccaggaccaggaaactattactgggctgcgcgtctggagaactaaccctggtagcgtgtttgactacgaccccgctgaggataacatacagtcacgatcgcttcatatgatcaacgtacaggctcagcgccgaagcagagagcagtctcgctccgcaagcgcattgtccatctctggcggagaggagaaatcagagcatagtgaggctcccgaccaccatctgagcacctattcagacggtggggtgttcgcggtgtctacagcctacaaacacgctaagaccactgagttgccccaacagaggagctcaagtgtggccacacaacagacaacagtctcatcaattcctagtcacccctctaccgctggaaagattttccgagccatgtacgattatatggcagccgacgcagacgaggtgagtttcaaggacggcgatgccatcattaacgtccaagcgatcgatgagggatggatgtatggaacggtccagaggaccgggaggacagggatgctgcccgctaactacgttgaggccatttag

SEQ ID NO: 232122 - DNA, 20010 bp, synthetic construct
  misc_feature 1..20010: note = Description of Artificial Sequence: Synthetic coding sequence
  source 1..20010: mol_type = other DNA
atggcagatgacgaggactatgaggaggtggtggagtactacaccgaggaagtcgtgtatgaggaagtacccggtgaaactatcaccaaaatctatgagacgaccacgacaagaaccagcgactacgaacagtcagaaacgtccaagcccgcactggctcaacccgctttggcccaacctgccagtgctaaacccgtggagcgacgcaaggtgattagaaagaaagtcgatccctctaagtttatgacaccctacatcgctcactcacagaagatgcaggacctgttctccccgaataagtataaggaaaagttcgaaaaaactaaagggcagccctacgccagcaccactgacactccggagctgcgacgcataaaaaaggtacaggatcagttaagtgaagtcaaatatagaatggatggtgatgttgctaaaacgatttgtcacgtggatgagaaggcgaaggatatcgagcatgccaagaaagtctcacaacaggtttccaaggtgctctataagcagaattgggaagatacaaaggacaaatacctgcttccccctgacgcccctgagctggttcaggcagttaagaacacggcaatgttttcaaagaaactgtacacagaagactgggaagctgacaaatctctgttctatccatacaatgactcccccgagctgcgaagggtcgcacaggcgcagaaggctcttagcgacgtcgcctacaaaaagggccttgccgagcagcaagcccagttcacccctctggccgatccccctgatattgagttcgctaagaaggtgacgaaccaggtttccaagcagaaatacaaggaggattacgagaataagatcaagggaaagtggtccgaaacaccatgctttgaagtggccaacgctcgtatgaacgctgataatatcagcactcggaagtaccaggaagattttgaaaacatgaaagatcagatttactttatgcagactgagaccccagaatacaaaatgaacaaaaaggccggtgtagccgcttcaaaggtgaaatacaaagaggactacgagaagaataaggggaaagcagattataatgtgctgcctgccagtgaaaaccctcagcttcggcaactcaaggctgcaggcgatgccctgtccgacaagctttataaagaaaactatgaaaagactaaggccaaaagtatcaattattgtgaaacgcccaaattcaaactggacaccgtgttgcagaacttctcttcagataagaaatacaaggacagctatctgaaagacatcttggggcactatgttggttcctttgaagacccttatcacagccattgcatgaaagttaccgctcagaacagcgacaagaattacaaagctgaatatgaggaggatcgtggcaaaggcttcttcccacagaccatcacacaggaatatgaagcaatcaagaagctcgaccaatgtaaggatcacacctacaaggtgcaccccgataagaccaaattcacacaggtgacggactctccagtcctgctgcaggcccaggtgaattccaagcagctttcagacctgaattataaggccaaacatgaaagtgaaaagttcaagtgccacattccacccgacacacccgctttcattcaacataaggtgaatgcttataatttgagcgacaacctgtacaagcaggactgggaaaagtccaaagcaaagaagtttgatataaaagtcgacgccattcctctgctggccgcaaaggccaacacaaaaaacacttcggatgtgatgtacaagaaagactatgaaaaaaataaggggaaaatgatcggagtgctgagcattaacgacgacccaaaaatgctgcattccctgaaggtggcgaagaatcagtcagaccgtctttacaaagagaactacgagaagacaaaagcgaagtctatgaattactgtgagacacctaaataccagctggacacgcaactcaagaattttagtgaggcgcgttataaggatctgtatgtgaaagacgttctaggacactatgtggggtcaatggaagatccttaccacacacactgtatgaaagtggccgctcagaactccgataaaagctataaggccgaatacgaggaagacaagggaaaatgttatttcccccaaaccattactcaggaatatgaggccatcaagaaacttgaccagtgtaaagaccacacttacaaggtacaccctgataagacaaagttcacggctgtgaccgattctcccgtactgctccaggcccagctgaataccaaacagctgtctgatctcaattacaaagcgaaacacgagggagaaaaatttaaatgtcacattccagccgacgcccctcaatttatacagcatcgcgttaacgcatataacttgagtgacaatgtctacaagcaggactgggagaagtctaaggcaaagaagttcgacatcaaggtggacgccatcccccttctggccgctaaggcaaatacaaaaaacacctcagacgtgatgtacaagaaggattatgaaaaaagtaaaggcaaaatgattggagctctgtccattaatgacgaccccaagatgctccacagcctaaaaactgctaagaatcagtccgaccgggagtaccggaaggattatgaaaaatctaagacgatctacacggctccactggatatgctgcaagttacgcaggctaaaaagtcccaggcaatagcctctgatgtcgattacaagcatatattacacagctattcatatccccctgacagcatcaacgtggatctggcaaagaaggcatacgctctgcaatcagatgtcgagtacaaggccgactacaatagctggatgaagggctgcggctgggtgccctttggctccctcgagatggagaaagctaagcgggctagcgacatcctaaatgagaaaaagtataggcagcatcctgatacactgaaatttacttctatcgaagacgcgcctattactgtgcaaagcaagataaaccaggcacaacggagcgacattgcctataaagccaaaggcgaggagatcatacacaagtacaacctgccacccgaccttccacagttcatacaggccaaggttaatgcctataacatttccgaaaacatgtataaggccgatctgaaagacctttcaaaaaaggggtatgatctccgtactgatgcaatcccgatccgggcagcgaaggccgctagacaggctgcttctgatgtgcaatacaagaaggattacgagaaggccaagggaaagatggtgggatttcaatctctgcaagacgatcccaagctggttcactatatgaacgttgccaagattcaaagcgaccgggagtacaaaaaagactacgagaaaactaagtctaaatataacacaccacacgacatgtttaacgtggtcgcggcaaaaaaggcacaagatgtggtcagcaacgtcaattataagcactccctgcaccattatacctacttgcctgacgcgatggatctcgagttgagcaagaatatgatgcagatccagtctgacaacgtgtacaaggaggactacaacaactggatgaagggaatcgggtggatcccgatcggttccctggacgtcgaaaaggtgaagaaagccggagatgccctcaacgaaaaaaagtatcgccagcatcccgatacactgaagttcactagcatcgtggatagccccgtcatggtccaggctaagcaaaacacaaagcaggtaagcgatattctgtacaaagctaaaggcgaggacgtgaagcacaagtatactatgtctcccgacttgccacagtttcttcaggcaaagtgtaatgcctacaacatatccgatgtctgttacaaacgtgactggtacgacctgatcgccaaaggaaacaatgtgttgggggacgccatccctataactgccgctaaggcctcccggaatattgcatccgattacaaatacaaagaggcatacgagaaatctaaagggaaacacgtcggatttcgcagccttcaggatgaccccaagttggttcactacatgaatgttgctaaactccagtctgacagggagtacaaaaagaactacgagaatacaaaaacctcttaccacacaccaggcgatatggtgtccattactgccgcaaagatggcacaggacgtggcaacaaacgttaactacaagcagcccttacatcactatacatatctccctgatgcaatgagcctggagcataccagaaatgtcaaccagatccagtcggacaatgtctataaggacgaatataattctttcctcaaggggattgggtggatccctataggatcgctggaggtcgagaaggtcaagaaggcgggagatgccctgaacgaacgaaagtatcggcagcatccggacacggtgaagtttactagcgtgcctgacagtatgggcatggtgctggcacagcacaataccaagcagctgtcagatctcaattataaggtggagggcgaaaagctgaaacataagtacacaattgatcccgaactcccccaatttattcaggctaaggtgaatgccctgaacatgtcggatgctcactataaggcggactggaagaaaactatcgccaagggatacgacctgcgcccagacgccattccaatcgttgcggcaaagagcagtaggaatatagccagtgactgtaaatacaaggaagcatacgaaaaggcgaaggggaagcaggtaggttttctttcacttcaggacgatcctaagctggtccactacatgaacgtggctaagattcagtcggaccgtgagtacaagaagggctatgaagcaagtaagactaagtaccatacacccctggacatggtctccgttaccgctgctaagaaatctcaggaagtggctacaaacgcgaattatcgacagtcctaccaccattatacccttctgccagacgctcttaacgttgaacattcgaggaatgccatgcaaattcagagcgataacctttacaaaagcgactttacaaattggatgaagggaattgggtgggtcccaattgaatcactcgaggtagagaaagcaaagaaagccggtgaaatcctgagtgagaagaagtacagacagcacccggagaagctgaagttcacttatgccatggacacgatggagcaggccctgaacaagtctaacaaactgaatatggataagcgcctgtacacagagaaatggaataaagataaaacaacaattcatgtcatgcccgacacacctgacatactgctatcacgagtaaaccaaatcactatgtctgacaagctgtacaaagccggttgggaggaggaaaaaaagaaaggctacgacctaagacccgacgcaattgctattaaggctgccagagcaagccgtgatattgcctctgattataaatacaagaaggcatacgaacaggccaaaggcaagcatatcggctttagaagccttgaggacgaccccaagctcgtacacttcatgcaggtagccaagatgcagtccgacagagagtataaaaagggttacgaaaaaagcaagacttccttccacacacccgtcgatatgttaagtgttgtggccgcaaagaagtcccaggaagtggctacaaacgctaactaccgtaatgtcatccatacctataacatgttgccggacgctatgtccttcgaactcgctaaaaatatgatgcagattcagagcgacaaccaatataaagcagattatgccgattttatgaaaggcataggttggctgcctctcggatcactggaggctgagaagaataagaaagcaatggagataatctcagagaaaaaataccgtcagcatccagacactctgaaatattctactcttatggatagcatgaacatggtgctggctcagaataatgccaaaattatgaatgaacatctatacaagcaggcttgggaagctgacaagaccaaggtgcacattatgcctgacatccctcagattatcctggccaaagctaatgccattaacatgagcgataaactgtataaactgagcttggaggaaagcaaaaagaaagggtatgaccttaggccagacgccatcccaatcaaagctgccaaggccagtcgagacattgcctccgattataaatataaatataattacgagaagggcaagggcaaaatggtcggttttcggtcactagaagacgaccccaagcttgtgcactctatgcaagtcgccaagatgcagtccgacagggaatataagaagaactatgaaaataccaagacatcctaccatactcccgcagacatgctgagcgtaaccgccgcaaaggatgcacaggccaacattaccaacaccaattacaaacatctcattcataagtacatcctactgcctgatgccatgaacattgaattaactaggaacatgaacagaatccagtccgataacgagtataagcaggattataatgaatggtataaagggttgggttggtcccctgctgggtcccttgaggtcgagaaagcaaaaaaggcgacagagtacgctagtgaccagaaatacaggcagcacccaagtaacttccagttcaaaaagctgactgacagcatggacatggtgctggcgaagcagaatgctcataccatgaacaagcatctttacacgatcgactggaataaggacaagactaagattcatgtaatgccagacacacctgatattctccaagcaaagcagaaccagactttgtactcacagaagctgtacaagctggggtgggaagaagctctgaaaaaggggtacgatctgccagtcgatgcaatatctgtccagctcgctaaggccagtagagatattgcaagtgattataaatataagcagggctatcggaagcagcttggtcatcatgtagggttccgctcgctgcaggatgacccaaagctcgtgctgtccatgaacgtggccaagatgcagagtgagcgggagtataaaaaagactttgaaaagtggaaaactaagttttcctcccctgttgacatgttaggcgtcgtgctggcaaagaagtgccaggagttagtttcagatgtggattataaaaactaccttcatcagtggacttgtctcccagaccagaatgatgttgtccaggccaaaaaggtgtatgaactacaatctgaaaatctgtacaagtctgacttagaatggcttagggggatcggctggtcccctttggggagcctggaggcagagaaaaacaagcgcgcttctgagattattagcgaaaaaaagtaccgccagcctcctgacaggaataaattcacctctatccccgatgcaatggatatagtgttagccaagactaacgccaaaaaccgatctgacagactctaccgagaggcatgggataaggacaaaactcaaatccacatcatgcctgacacccctgacatagtgctggccaaagctaacctgatcaataccagcgacaaactttaccgaatggggtatgaggagctgaagcgtaagggctatgacctgcccgtcgatgcaatcccaatcaaggcagccaaggcctctcgagagatcgcatctgagtataagtacaaggaaggattccggaaacagctagggcatcatataggcgcacggaatatcgaggatgatcctaaaatgatgtggagtatgcacgtcgcgaaaatccaatctgaccgggaatacaaaaaagactttgagaagtggaaaacaaaattctcaagcccagtggacatgttaggggtggtgcttgccaagaagtgtcagactctcgtgagtgacgtggactataagaactatctacaccagtggacctgtttgcccgaccagtcagacgtgatccatgctagacaggcctatgacttgcagtcagacaatctctacaaatcagatcttcaatggctgaagggaattggttggatgacatcagggtcactggaagatgaaaagaataaacgcgcaactcagatcctgtctgaccacgtgtataggcagcatcccgaccagttcaagtttagctcgttaatggattccatacctatggtactggccaagaacaacgccatcaccatgaaccacagattgtacactgaggcatgggacaaagataaaactaccgtgcatattatgccggataccccggaagttcttttggccaagcagaacaaggtgaattacagcgagaagctttacaagctcggattggaggaagccaagaggaagggctacgatatgcgggttgacgctattcctatcaaagccgctaaagcgtcacgggacatcgcaagcgaatttaaatacaaggaggggtaccggaagcaactgggccaccatattggcgcacgcgcaatcagggacgatcccaagatgatgtggtctatgcatgtggccaaaattcagtccgatagggagtataagaaagattttgagaaatggaagactaaattcagtagtcccgtggacatgttgggcgttgtgttggctaagaaatgccagacccttgtaagcgatgtcgattacaaaaactacctacatcagtggacttgcttgcctgatcagtctgacgttattcacgctcgtcaggcctacgacttgcagagtgacaatatgtacaagtctgatcttcagtggatgcgtggaattggatgggtatccatcggttcactggatgtggagaaatgcaagcgggcaaccgaaatcctaagcgataagatttaccggcaacccccagataggttcaaatttacctccgtgactgattcccttgagcaggtgttagccaaaaacaacgcactgaatatgaacaagcggttgtataccgaggcctgggacaaggacaaaacacagattcatatcatgcccgacactccagaaattatgctggccagacagaacaagatcaactacagcgagaccctatacaaactcgcaaatgaagaagcaaaaaaaaaaggatacgaccttcgctccgatgccatccctattgtcgctgccaaggccagcagagatgttatctctgattacaagtacaaggacggctaccggaagcagctggggcatcacattggtgctagaaacatcgaggatgatccaaaaatgatgtggtctatgcacgttgccaagatccagtcagatagggagtacaagaaggatttcgagaagtggaagactaagttttcatcaccagtagacatgttaggcgttgtattggctaaaaaatgccagactctagtttctgatgttgattataagaattacctgcatgagtggacctgtttaccagatcagaacgatgtgatccacgcgaggcaagcatatgacctccagtccgacaacatatacaaatctgacctgcagtggctcagaggaattggttgggttcctatcgggagtatggatgtggtgaaatgtaagagggcagctgagattctcagcgataatatctacagacagcctcctgataaactgaaattcacctcagtgaccgactctctcgagcaagtgttagccaaaaataacgccttgaatatgaataaaaggctctatacagaggcctgggacaaagataagacccaggtacacattatgcccgatacacccgagattatgctcgcaagacagaataaaataaattactctgagagcctctaccgccaggccatggaagaagctaagaaggaaggatacgacctgcgcagcgacgccatacccatcgttgccgcaaaagcaagcagggacatcgcttccgactataaatataaagaagcatacaggaagcaactagggcaccacattggtgcgagagcagttcacgacgatcccaaaattatgtggtcgctgcatattgcaaaagttcaatctgaccgcgaatacaagaaagattttgaaaaatacaagactcgctactcaagtcccgtagatatgctgggtatagtgctggccaaaaagtgccagacactggtatctgacgtggactataagcacccactgcatgagtggatctgcctgccagaccagaatgatattattcacgcccgaaaggcttacgatctccagagtgacaatctttacaaatccgatctggagtggatgaagggtatcggctgggttccaatagattcactggaagtagtgagggctaagcgcgctggagagctgctgagcgacaccatctacagacagcgtccagagacactaaagttcaccagcattacggacacccccgagcaggttctggctaagaataacgctctcaatatgaataaacgcttatacacggaggcatgggacaatgacaaaaaaacaatccacgtgatgcctgacacacctgagattatgctggccaagctcaacagaattaattacagcgacaaattatacaaactggccctggaggagtccaagaaggagggctatgatctcagactggatgccatcccaatacaggccgctaaagcctcccgtgatatcgccagcgattataaatacaaggaggggtatcgcaagcagctgggccaccatattggcgcacgcaatatcaaagatgatccgaagatgatgtggtccatccacgttgcaaaaatccaaagtgacagagagtacaaaaaggagtttgaaaaatggaagacgaagttctcttcgcctgtggatatgctgggagtggtcttggctaagaaatgccagatcctggtctctgatattgactataaacaccccctgcacgaatggacttgtttgcccgatcagaatgacgttattcaggccaggaaagcttatgacctacaatctgatgcaatatacaagagtgacttagagtggcttcgtggaattgggtgggtgcctatcggttccgttgaggtcgagaaggtaaaacgagccggagaaattctcagtgatcggaagtacagacagcccgcagaccagctgaagtttacttgtatcactgacactcctgagatcgtgctggccaagaataatgcgctgaccatgtcaaagcacctgtatacagaggcatgggacgcagacaaaacatccattcatgtcatgcccgatacccccgatatactgcttgctaagagtaactcggcaaatatttctcagaaactctataccaagggctgggacgagtctaagatgaaagactacgaccttcgcgcagatgccatctccatcaaaagtgcaaaggcctcccgagatatcgcctccgactacaagtacaaggaggcttatgagaagcagaaaggtcaccacatcggcgctcagagtatcgaggacgaccccaagattatgtgcgccatacacgccggtaaaatacagagcgaacgcgaatataagaaggaatttcagaagtggaagactaagttttcctcgcctgttgacatgctctcgattttgctggccaaaaagtgccagaccctggtcaccgatattgactatcgcaactatctgcacgaatggacatgtatgcctgatcagaatgatatcatccaagcaaaaaaagcatacgatctgcagagtgatgctctttacaaggccgacctagaatggcttcgtggcatcggctggatgccccagggctctccagaagtgctcagggtcaagaatgcgcagaacattttttgcgacagtgtctaccgtactcctgtggtcaaccttaagtatacaagcattgtcgacacccctgaggtagttttggcgaagtcaaacgccgagaatattagtattccaaaatacagagaggtttgggacaaggacaagacctctattcatataatgcctgatactcctgaaatcaatctcgcacgggcaaatgcgcttaacgtgagcaataagctctacagagaaggatgggacgagatgaaggccggatgcgatgtcagactggacgcgattcccatccaggccgcaaaggcttcccgcgaaattgcaagcgattataaatacaaactcgaccatgagaagcagaaaggacactatgttgggaccctgaccgccagagacgataataagatccggtgggccctgatcgctgacaaacttcaaaatgagcgagagtaccggcttgactgggcgaaatggaaagcaaagatccagtctccagtcgacatgctgagcattttgcactccaaaaacagccaggccctcgtcagtgacatggactacagaaactatcttcatcagtggacatgcatgccagaccagaatgacgttattcaggcaaaaaaggcctatgaattgcagtccgacaatgtgtacaaagcggacctcgagtggttgagaggcatcggctggatgcccaacgattctgtttccgttaatcacgcaaaacatgccgctgacatttttagcgagaagaagtaccggaccaagattgagacgctgaacttcacccccgtggacgacagggttgattatgtcacggctaagcaaagtggcgagatcctggacgacataaaataccgaaaggactggaacgccaccaagtccaaatacaccctcaccgagactccccttctgcacacggctcaagaggcggcaaggatcctcgatcagtatctgtacaaagagggatgggagcgacagaaggcaaccggatacattcttcccccagacgccgtcccattcgtgcacgcccaccactgtaacgatgtgcaaagcgagttaaagtataaagccgaacatgttaaacagaaaggacattacgttggcgtgcccactatgagggacgatcccaaactcgtgtggtttgagcacgccggtcagatccagaatgaaaggttgtataaggaggattaccataaaaccaaagcaaaaatcaacatccctgcagacatggtgtctgtcctggccgctaagcagggccagaccctggtttccgacatagattatcggaactacctccatcagtggatgtgccatcccgatcagaacgatgtgatccaggccaggaaggcctatgatcttcaaagcgacaacgtctacagggctgatctggagtggctgagaggtattggttggattcccctcgactcagttgatcatgtgcgagtgactaaaaatcaagagatgatgagccagattaagtacaagaagaatgcactcgagaattaccctaattttcgtagcgtagtggaccccccagaaatcgtgctggctaaaatcaactccgtcaaccagagtgatgtaaagtataaagaaacattcaacaaggcaaaaggcaagtacaccttttctccagatacaccacacatctctcattcaaaagatatgggaaaattatactccacgatcctatataagggggcttgggagggcacaaaggcatatggttatactctggatgaacgctacatccccattgtgggcgctaagcacgctgatctggtgaactccgagctgaagtacaaggaaacctatgagaagcagaaaggccactatctggccggaaaggttattggcgagttccccggagtcgttcactgcctagactttcaaaagatgaggtcagctctgaactatagaaagcactacgaggatacaaaggccaacgttcacataccaaacgatatgatgaaccacgtcctggctaagcgctgtcagtacatcctctcagacctagagtacaggcactacttccaccagtggacttctctgctggaagagcccaatgtcattcgggtccggaacgcacaggaaatcctgtctgataacgtctataaggacgatttgaactggctgaaggggattggttgttatgtctgggataccccccagattcttcatgctaagaagtcatacgatctccagtctcagctgcaatatacggcagctggaaaggaaaacttgcaaaactataatttggttaccgacacccctctctatgtcactgcggttcaatccggtatcaatgctagcgaggtaaaatacaaggagaattatcatcagattaaggataagtatacaacagtcctggagaccgtggactatgataggaccaggaatctgaaaaatctctatagtagtaacctctacaaagaggcctgggatcgggttaaggcaaccagttacatcctcccgtcctccacattgtcgctaacccatgccaagaaccagaaacatctggctagtcacatcaagtatcgagaggaatatgaaaaattcaaagccttgtatacactgccccgatcagtggacgatgatccaaataccgccagatgtttgcgagtcggcaagctcaacatagacagactgtacaggtcggtttacgaaaagaataagatgaaaatacacatcgtgccggacatggtggaaatggtcaccgcgaaggacagccagaagaaagtttccgagatcgattataggctaaggctccacgagtggatttgtcatcccgacctgcaagtcaacgaccatgtgaggaaagtcaccgatcagatcagcgacatcgtctataaagacgaccttaattggctcaaggggattgggtgctacgtgtgggacaccccggagatcctgcatgccaaacacgcatacgacctcagagacgatattaagtacaaagcccatatgctgaaaacacgcaacgattacaagctcgtgacagatacacctgtctatgttcaggctgtcaaatctggaaagcaactgagcgacgccgtttatcactatgactacgtccactctgtgagaggcaaggtcgcccctactacaaaaaccgtggacttagaccgtgccctccacgcatataaacttcagtcatcgaatctgtataaaactagtcttaggactctgcctacgggataccggcttcccggagataccccccattttaagcatatcaaagatactaggtatatgtctagctattttaagtataaggaggcttacgagcacacaaaagcctacggctacactttgggccctaaggacgtgcccttcgttcacgtgcgccgagtcaataatgtgacgagcgaacgcctgtatcgcgagttatatcataaattaaaggataaaatccataccacacctgacacacctgaaatcaggcaagtgaaaaaaacgcaagaagcagtgtctgagttgatttataagagcgacttctttaaaatgcaggggcacatgatctctttaccttacacaccacaggtgatacattgccgctatgtgggagatattacatcagacatcaaatacaaagaagacctgcaggtgttgaaaggcttcggctgtttcctgtacgatacgcctgatatggttaggagcagacacctccgaaagttgtggtccaactatctgtacactgacaaggccagaaaaatgagggataaatataaagtggttttagacacgcccgagtacaggaaggtgcaggagctgaagacacacctttcagagctggtttatagggctgccggtaaaaaacagaagtcaatttttacaagtgtgccagatacacctgatttgttacgcgcaaaaagaggccagaagctgcagagccagtatctttatgtcgagctggccacaaaggagcgtccccaccatcacgcgggtaaccagaccacagccttgaagcatgccaaggatgtgaaggacatggtgagcgagaaaaagtacaagattcagtacgagaagatgaaggacaagtacacgccagtgccagatacccctatcttgataagggccaaaagagcctattggaatgccagtgatctacgttataaagagacgttccagaagactaaggggaagtaccacacggtcaaggacgcactagacatcgtatatcaccgaaaagtgacggacgacatctctaagatcaagtacaaagaaaattatatgtcccagctcgggatttggaggtccattccagataggcccgaacactttcaccaccgtgctgttaccgatacagtaagcgatgtgaagtataaggaagatctcacttggctcaagggcattggatgctatgcctacgatactcccgatttcaccctggcggagaaaaacaaaacgttgtattctaaatataaatataaggaagtgtttgagcggaccaagagtgacttcaagtatgtagcagactcgcccattaatagacactttaaatatgcgacacaactgatgaacgaaaaaaagtaccgtgccgattatgagcaaagaaaggacaaatatcacctggtggtcgacgaaccaaggcatctgctggccaaaacggctggggaccagatcagccagattaaataccgcaaaaattacgaaaagtccaaggacaagttcacaagcatcgtcgatacaccggaacacctcaggactaccaaagtaaataagcagatttctgatatactgtacaaactggaatacaacaaggccaagcctcggggttacaccactattcatgacacacccatgctacttcatgtgcgcaaagtcaaagacgaagtcagcgatctgaagtacaaggaagtctaccagcgaaacaaatccaactgcaccatcgagcctgatgccgtacacatcaaagctgcgaaggatgcctataaggtgaatacaaatctagactacaagaagcaatatgaagcaaataaggcacactggaagtggacacctgaccggccagactttctacaagctgctaagtcgtctctgcagcagtctgactttgaatacaagctggatcgcgaatttctgaagggctgtaagctttccgtgaccgatgataaaaacacagtgttggctctccggaataccctcatcgagtcggatctcaaatacaaagagaaacacgtgaaggaaaggggaacttgccacgctgttccagataccccccagattctgctcgctaaaactgtctcaaatctggtgagtgagaacaaatacaaggaccacgtcaaaaagcaccttgctcagggcagctacaccacccttcctgagacccgggacaccgttcacgtgaaggaagtgactaaacacgttagtgacaccaactataaaaagaaattcgtgaaggaaaagggaaaaagcaactatagcattatgttggaaccccctgaagtcaaacatgcgatggaggttgccaagaaacagtctgatgtggcctacaggaaagacgcaaaggagaacttgcattacactactgtagcagatagacccgatattaaaaaggccacgcaggccgctaaacaagcttctgaggtcgagtaccgggcaaaacacaggaaggaaggatctcatggcctgtccatgctgggaagacccgacatcgaaatggccaagaaggccgcaaaactctctagtcaggttaaataccgcgagaactttgacaaagaaaagggcaagacaccaaagtacaatccgaaggatagccagctatacaaggtgatgaaagacgctaataatcttgcgagcgaggtcaagtataaagcggaccttaaaaaactccacaaacctgtgactgatatgaaagaatctctgattatgaatcacgtgctaaataccagccagctggcctcaagttatcagtataagaagaagtatgaaaagagtaagggccactatcatacaattccagacaatctcgaacagttacatctgaaagaagctaccgaactgcagagcattgttaagtacaaggagaagtatgaaaaagagcggggtaagccaatgctggatttcgaaactcctacctatataaccgctaaggaaagccagcagatgcagtccgggaaggagtaccgtaaagattatgaggaaagcattaagggcagaaacctcaccggcctggaggttactcctgcccttctccatgtaaaatacgcgacgaaaattgccagcgagaaagaatataggaaggatctcgaggagagcataagaggaaagggtcttactgagatggaggacactccggatatgctgcgggcaaagaatgccacacagatcctgaacgaaaaagaatataagcgggacctcgagttggaagtgaaagggagagggttaaacgccatggccaatgaaacccctgatttcatgcgggcaagaaacgccaccgatatcgcatcccagatcaagtacaaacagtcagccgagatggaaaaggccaacttcacttccgtggtcgatacacccgaaatcatccacgcacaacaggtgaagaatttgtcttctcagaagaaatacaaggaggacgcagaaaagtctatgagttactacgagactgtgcttgacacacccgaaattcagagggtccgggaaaatcagaagaacttctccctgctccaataccagtgtgatcttaaaaattcaaaaggcaaaatcacggtggtgcaggatacgcccgagattcttcgtgtcaaggagaaccagaaaaacttctcctctgtgctttacaaagaagacgtgtcacctgggaccgccatcggtaagacgccggagatgatgcgagtgaagcagacccaggatcacataagctcagtgaaatataaggaggctatagggcagggcaccccaatccctgaccttccagaggtgaagcgcgttaaagaaacccaaaagcatatctccagcgtgatgtataaagagaatctggggactggtatccccacaacagtgacgcctgaaatagagagggtgaaaagaaaccaggaaaatttcagcagcgttttgtacaaagagaatcttggcaagggtatccccacaccaatcacacccgagatggaaagagtgaaaaggaaccaagagaattttagtagcgtcctctataaggaaaacatggggaagggcactcccctagctgtgaccccagaaatggaacgcgtcaaacacaaccaggagaacatctcctccgtcctctataaagaaaacgttggtaaggccacggccacccccgtcacccctgagatgcagcgtgtgaaacggaaccaagaaaatatctcgagtgtgctatacaaagagaacctgggcaaggctactcctacaccttttacaccggaaatggagcgagtgaagcgaaaccaggagaacttctcttcagtgctctacaaagagaatatgcgcaaggccactcccactcctgttacacccgagatggagcgggctaagcgcaatcaggagaacatctccagcgttctttattcagattctttcaggaagcagatccagggcaaggcggcttatgttctggataccccagagatgcgccgtgtgagagaaacccagcggcatatctcgaccgtgaaatatcacgaggacttcgaaaaacacaagggatgctttactcccgtggtgacagatcccattaccgagagggtcaagaagaacatgcaggatttcagcgatataaattatcgaggtatccagcgaaaggtggtggagatggagcagaagagaaatgaccaggaccaggagacaatcacaggcctgcgtgtgtggagaactaatcccggttcggtgtttgactatgatccagccgaggacaacattcagagccggtccctccacatgataaatgtgcaagcgcagcgcaggagcagagaacagtctagaagcgcctctgctctcagcataagcgggggagaggagaagagcgagcacagtgaggccccagaccatcatctgtcaacttattccgatggaggcgtattcgccgtcagcaccgcctataaacacgctaaaactacagaactcccccaacagcgctctagcagtgtggcgacacaacagacaaccgtgagcagcattccatcccatcctagcacggcaggcaaaattttccgtgctatgtatgactacatggccgcagatgctgatgaggtaagctttaaagatggagatgccattataaacgtgcaagccattgatgagggatggatgtacggaacggtacagagaacggggcgaacgggcatgttgcctgctaattacgtggaggcaatttaa

SEQ ID NO: 232123 - DNA, 25577 bp, synthetic construct
  misc_feature 1..25577: note = Description of Artificial Sequence: Synthetic coding sequence
  source 1..25577: mol_type = other DNA
atggcagatgacgaggattacgaggaagttgtcgaatattataccgaggaggtggtgtacgaagaagttcctggggaaacaatcacaaaaatctatgagaccaccaccactcgtaccagtgactacgaacagagtgagaccagcaagccggctctggctcaacccgctttggctcagcccgcaagcgccaagcctgttgagagaaggaaggtaatccgaaaaaaggtcgaccctagcaaatttatgaccccctatatcgcacactcccaaaagatgcaggatttgttctcccccaacaaatacaaggagaagtttgaaaagaccaagggccagccgtacgcgtccacgaccgatacccccgaactgcgcaggatcaagaaagttcaggaccagctctcagaagtgaaataccgcatggatggcgacgtcgccaagaccatttgtcatgtggacgagaaggccaaggatatcgagcacgccaagaaagtgtcacagcaagtgagtaaagtgttgtataaacaaaactgggaggatacgaaggacaagtacctgctgcccccagacgctccagaactggtgcaggccgtgaaaaacaccgctatgttctccaaaaagttgtacactgaggattgggaggctgacaaatccctattttacccttacaatgactcacccgagttgagaagggttgcccaggcccaaaaggcactctccgatgtggcgtataagaaaggattggcagaacagcaggcacagtttacacccctcgccgatccacccgatatcgaatttgccaaaaaagtgaccaatcaggtcagtaaacaaaagtataaggaggattacgagaacaaaattaaggggaagtggagtgaaaccccttgtttcgaagtcgctaacgccagaatgaacgcggataacatcagcacccggaaatatcaggaagactttgaaaatatgaaggatcagatttatttcatgcagactgaaacccccgaatataagatgaacaagaaggcgggagtcgctgctagcaaggtgaagtacaaggaggattacgagaaaaacaaagggaaggccgactacaacgtgctgcccgcaagtgagaatccgcaactgagacaactcaaggctgctggcgatgctctgtctgataaattatataaggaaaactacgaaaagacaaaggcaaaaagtattaactattgcgaaactcccaagttcaagcttgatacagtcctccagaacttttcatcagataaaaaatacaaagacagctatctgaaggatatccttggccattatgtcggctcattcgaggacccataccactcccattgcatgaaagtgacagcccagaattccgacaaaaactataaagcggagtatgaggaagaccggggtaagggcttctttccacaaacaatcacgcaagagtatgaggctattaaaaagctcgaccagtgcaaagatcacacgtacaaagtgcatcccgacaaaacgaaattcacgcaggtcacggactcaccagtgttactccaagctcaagtgaattcgaagcagctaagcgacctgaactacaaagccaagcacgagagcgagaagttcaagtgtcacataccacctgatactccggctttcatccagcataaggtgaatgcatacaacttgagcgataatttgtataaacaggattgggaaaaaagtaaagccaaaaaatttgacattaaggtggatgcaatccccctgctcgctgccaaagctaacactaagaacacatctgacgtgatgtacaaaaaagactatgagaagaacaaagggaagatgattggagttttgtcaatcaatgatgacccaaaaatgctccacagcttaaaggttgccaagaatcaatcagataggttatacaaggagaattacgagaagaccaaagccaagtctatgaattactgcgagacacccaaataccagctcgatacacagcttaaaaacttctctgaagccaggtacaaagatttatatgtgaaggacgtcctcggtcactatgtcggctccatggaagatccttatcacacacattgtatgaaagtggccgcacagaattctgataagtcttataaggccgaatatgaggaggataaggggaaatgttatttcccccaaaccataacgcaggagtatgaagcgattaaaaagctcgatcaatgtaaagatcatacttacaaggtccaccctgacaagaccaagttcacggcagtgacagattcaccggtcctgctgcaggcccagctcaacactaagcaattatccgatctgaactataaggccaaacacgagggtgaaaagtttaagtgccacatccccgcagatgctccccagtttattcagcaccgagtcaacgcctataacctgtctgacaacgtgtataagcaagattgggaaaaatctaaggcaaaaaaatttgacatcaaggtggatgcaatcccactcctcgccgctaaggccaacacgaagaacacgtcagacgtgatgtataaaaaggactatgaaaagagtaaggggaagatgatcggagcgctgtcaataaacgatgacccaaagatgctccactccctgaaaacggctaagaatcaatctgatagagagtaccgcaaggactacgagaagtctaaaacaatctataccgccccattggacatgctgcaggtcacacaagccaagaagtcacaggctattgcatctgatgtagattacaagcatatcctacatagctatagctaccctccggattcaatcaatgtggaccttgccaaaaaagcgtatgctttacagagcgatgttgagtacaaagctgattataattcttggatgaaggggtgtggttgggtgcccttcgggagtttggagatggagaaggccaaaagagcatccgacattctgaatgagaagaagtaccgtcaacaccctgacacccttaaatttacctcaattgaggacgccccaattacagtgcaaagcaaaatcaaccaagctcagcgtagtgatatcgcatacaaagccaagggggaggaaatcatacataagtacaacttaccgccagacctcccccagtttattcaggccaaagttaatgcgtataacatatctgaaaacatgtacaaggcagatctgaaggacttgagcaagaagggctacgatctgaggacagatgctattccgatccgggctgctaaagccgcacgtcaagcagcttcagatgtgcaatacaaaaaagactacgaaaaggccaaggggaagatggttggatttcagtcgttgcaggacgacccgaagctcgtgcactacatgaatgtggctaaaattcagtcggatagggagtataaaaaggactatgagaagaccaagtctaagtacaatacaccacacgatatgtttaatgtcgtggctgccaaaaaagcccaggacgtggtatccaacgtgaactataagcattccctgcatcactatacatacctgcctgatgctatggatttggagctgagcaagaatatgatgcagattcagtcggacaatgtttataaggaggactacaataattggatgaaggggatcggatggataccaattggatcactcgacgttgagaaggttaaaaaggccggtgacgctctgaatgagaaaaagtaccggcagcaccctgatacacttaaattcacctcaattgtcgactctccggttatggtgcaggcaaagcaaaatacaaagcaggtgtctgatatcctgtataaagctaagggagaagacgtcaagcacaagtataccatgtctcccgacctacctcagttcctacaagcgaagtgtaacgcctacaacatctccgatgtctgctataagagagattggtatgacctcatagccaaagggaataacgtcctcggagatgccatacctataacagccgctaaggcttcaagaaatatcgcttccgactacaagtacaaggaagcgtatgagaaaagtaaggggaaacacgtagggttccgaagcctgcaagatgacccaaagctggttcattacatgaacgtggccaagttgcaatcggacagagagtataagaaaaactatgaaaataccaagaccagctaccacacacctggggatatggtttccataacagccgctaaaatggcccaggatgtggctacaaatgtgaactacaagcaaccgctccaccactatacatacttgccagatgccatgagtttggaacacaccaggaacgttaaccaaattcagtccgataatgtgtacaaggacgagtataacagctttctcaagggcatagggtggatccctatcggatcattggaagtcgaaaaagtgaaaaaggcaggcgacgcgctgaacgaacgaaagtacagacagcatcctgacaccgtgaagttcacgagcgtgcccgacagcatgggaatggtgttagcacaacataacaccaagcagctctccgacctgaattacaaggtggagggggagaaactgaagcataagtataccattgacccggaactcccccaattcatccaagccaaagtgaatgctttgaatatgagcgacgcccattacaaagctgactggaagaaaactatcgccaaaggttatgacctgcggcctgatgccattcctatcgttgcggcaaaatcctctagaaatatagccagcgattgtaaatataaggaggcatatgagaaagccaaaggcaagcaggtgggctttctttccctgcaggacgatcctaaacttgttcactacatgaatgtcgcgaagattcagtccgatcgagaatacaagaaaggatatgaggcaagcaaaaccaagtaccatactcctctcgacatggtgagtgttaccgctgcaaagaagtcccaggaggtggctacaaacgcaaactacaggcagagctatcatcactacaccctgctgccagatgctcttaacgtggaacactctaggaacgcaatgcaaattcagagcgataacctttacaaatctgattttactaattggatgaaaggaattggctgggtgcctattgagtcattagaggtcgagaaggctaagaaggccggagaaatcctcagtgagaaaaagtacaggcaacacccagaaaagctgaaattcacgtacgcaatggacactatggaacaagctctgaataaatccaataagttgaacatggataagcgcctgtacaccgaaaagtggaacaaagataaaacaactatccatgttatgccggatacaccagatattctactgtctagggttaaccagatcacaatgagcgacaaactgtataaggccggatgggaagaggaaaagaagaagggctatgacctgagacccgatgccatagcaatcaaagcggcacgggcaagccgggacatcgcttccgattataagtataagaaggcctacgagcaagctaagggaaaacatatcggctttagatcactcgaggacgatcccaaattagtccatttcatgcaggtcgctaaaatgcagagcgatagagaatataaaaaggggtacgaaaaatcaaaaacttccttccacaccccagttgacatgctgtccgttgtggccgcaaagaagagccaggaggtggccacaaacgctaactaccgcaacgttattcatacttacaacatgctcccagatgctatgtccttcgaactggccaaaaatatgatgcagatccagagcgataaccagtacaaggcagattatgcagactttatgaagggcataggctggctgcctctcggcagcctcgaggcagagaagaataagaaggctatggagatcatcagcgagaagaagtatcgccagcatccagacacactaaaatacagcacccttatggacagcatgaacatggtcctggcccaaaataacgcgaaaatcatgaatgaacatctctataagcaggcatgggaggcagataagacaaaagtccatatcatgccggacatcccacaaataatcttggcgaaagcaaacgcaattaacatgtccgacaaattatataaactgtctttagaggaaagcaaaaaaaaaggctatgatcttcgccctgatgctatcccgattaaggcggcaaaggcatccagggacattgctagcgattacaaatacaaatataattatgagaaagggaaaggtaaaatggtcggcttccgatccctcgaggacgaccccaagctcgtgcactccatgcaggttgccaagatgcaaagtgatcgtgagtataagaagaattatgagaatactaagacttcttatcatacacctgccgatatgctgtccgtgaccgccgcaaaggatgcacaagccaacattactaacactaactacaaacacctgattcacaagtatatactgctgcccgacgccatgaacatcgaactcacaagaaacatgaatcgaatccagagtgacaatgagtacaagcaggattacaatgaatggtataagggtcttggatggtcccccgcaggaagcctggaggtcgagaaagccaagaaggctactgagtatgcctctgaccagaagtaccgccagcatcccagtaatttccagtttaagaaattgacagacagcatggacatggtgctcgccaagcagaatgcgcacacaatgaataaacacctgtatactattgactggaataaggacaagaccaaaattcacgtcatgcccgatacgccagacattctgcaagcgaagcaaaatcaaaccttgtatagccaaaagctgtacaagctgggctgggaagaggccctgaagaaaggatatgacttgcctgtagatgcaattagcgtgcagctggctaaagcaagccgagatatcgcgagcgactacaagtacaagcaggggtataggaaacaactcggtcaccatgtggggttccggtctcttcaggacgaccctaaactggtcttgagcatgaacgtggcaaagatgcagtcggagagggagtacaaaaaagacttcgagaagtggaagaccaagttcagctctcctgtagacatgttgggcgttgtgctggcaaagaaatgtcaggagctggtgtcagatgtggactacaaaaactatttgcaccagtggacatgcctgcctgatcagaacgacgttgtccaggctaaaaaggtctatgaactccaatcagagaatttgtacaaaagcgatttggagtggctgcggggtataggctggtctccattgggcagcctggaggcggaaaaaaacaagcgggcatctgaaatcatatctgagaaaaagtaccgacagccccctgatcgtaataaattcacctccatacccgacgcaatggacatcgtgcttgctaagacgaatgccaaaaacagatcggatcggctgtatcgcgaagcatgggataaagataaaacccagattcacattatgcctgacacaccggatattgtgctagccaaagctaatctgataaacacgagcgataagctgtatcgtatgggctacgaggagctgaaacgaaagggatacgatctgcctgtggatgccataccaataaaagccgctaaggccagcagagagattgcttctgagtacaaatataaggagggcttcaggaagcagctgggccaccacatcggcgctaggaatattgaggacgaccccaagatgatgtggagcatgcacgttgccaaaatccagtctgatagggagtataaaaaagactttgaaaaatggaagactaaattctccagtcctgtagatatgctgggggttgttctggcaaagaagtgccagacactggtctccgacgtagactacaagaattatttgcaccagtggacatgcctgcctgatcagagtgacgtgatccatgcaagacaggcttacgaccttcagagcgataatctgtataaatccgatttgcagtggttaaaggggattggctggatgacttcaggttcattagaggacgaaaagaataagcgcgctacacagattctcagcgatcatgtttaccgtcagcacccagaccagttcaaattttcgagtctcatggatagcattccaatggtgctggcaaaaaacaatgcaattactatgaatcatcgtctgtataccgaggcctgggataaagataaaaccaccgtgcatatcatgccagacaccccggaggtgctactggccaagcagaacaaggtcaattatagtgagaagctctataaattaggcctggaggaggcaaaacgaaaagggtatgatatgagggtggacgcaattcccataaaagccgcaaaggcctcaagagatatagcgtcagaatttaagtataaagagggataccggaaacagctagggcatcacatcggagccagggctattagggacgatcccaagatgatgtggtcaatgcacgtggcgaaaatccagagcgacagggaatataagaaggactttgagaagtggaaaacaaagttctctagtccagtggatatgctcggggtcgtgctcgctaaaaagtgccagacactggtgagcgacgtcgactataaaaactacttgcaccagtggacctgccttcctgaccagtccgatgtgatacacgctcggcaggcctacgacctgcaaagcgacaacatgtataaatctgatctgcagtggatgcggggaatcggctgggtgtcaatcggaagtctggacgtcgaaaagtgcaagagagctaccgagatactgtccgacaagatttaccgacagccacctgatcgctttaagtttacatctgtcacagactctctggaacaggtcctggcgaaaaacaatgctattacgatgaacaaaagactctacaccgaggcgtgggataaagataaaacacagatccacatcatgccagacaccccagagatcatgctagctagaatgaataagattaactactccgagtccctctacaagctggcgaatgaagaagcaaaaaaaaagggttatgacctccggtctgacgccatccctatcgtcgccgctaaggcgagtcgcgatatcatcagcgattacaagtacaaggacggctattgtaagcagctgggacaccacattggggcacgaaatatcgaggatgatccaaaaatgatgtggagcatgcacgtcgctaagatccagtccgacagggaatacaagaaagatttcgaaaaatggaagacaaagttttctagtccagtcgacatgctgggcgtggtgttagccaagaagtgtcaaaccctagtgtcggacgttgattacaagaattatttacacgagtggacatgcctccctgatcaatccgacgtcatccatgcccgacaggcatacgatctgcagagcgacaatatttacaagtctgacctccagtggctgcggggaatcggatgggtaccaatcggctccatggacgtcgtgaaatgtaagcgagccactgagattctgagcgataatatttaccgacagccacctgacaaacttaaatttacctcagtcaccgattctctggagcaggttctcgccaagaacaacgccctcaacatgaacaagcggttgtacaccgaggcatgggacaaggacaagacacagatacatataatgccagacacccctgaaattatgctggctcgccagaataaaatcaactacagtgaaacgctgtacaagctggctaatgaggaagccaagaagaaaggctatgacctgcgctctgatgctattccaatcgtggccgcaaaagcctctcgcgacgtcataagcgactacaaatataaagatggataccgaaaacagctcggtcatcatattggggctcgaaatattgaggacgaccctaagatgatgtggtccatgcatgtagccaagatacagagtgacagggaatacaagaaagatttcgaaaaatggaagaccaagttctcatcacctgtggatatgctcggcgttgttctggccaagaagtgtcagacattggtgagtgacgtggactataagaactatctgcacgagtggacatgtctccccgatcagaacgatgttattcatgccagacaagcctatgacctccagtctgacaacatctacaagtctgacttgcaatggctgcgtgggatcggctgggtcccgattggatccatggacgtggtgaagtgtaagcgtgctgccgagatcctgtccgataacatttaccgtcaacctccagataagctcaaattcacctcggtcactgactccttagagcaggtcctagccaaaaataatgcccttaatatgaataagaggctttacacagaagcctgggataaagacaagactcaggtgcacatcatgcctgacacgcctgagataatgctcgccaggcagaacaaaattaattacagcgagtcattgtatcgccaggccatggaggaggccaaaaaggagggatatgatctccgcagtgacgccattccaatcgtggctgcaaaagcatcacgcgatattgcgtccgattataagtacaaggaagcatacagaaaacagctgggtcaccacatcggggctagggccgttcatgatgatccaaagatcatgtggagcctacacattgcaaaggtgcagagcgaccgggaatataaaaaggacttcgaaaagtataaaacacgctacagctcacctgttgatatgttagggattgtgctggctaagaagtgtcagactctggtgtccgacgtcgactacaaacatccactgcacgagtggatttgtctgcccgaccagaatgatatcatccatgccagaaaggcatatgatcttcagtctgataacttgtacaaatctgacctagagtggatgaagggcattggctgggtcccaatagatagcctggaggtggtcagagccaaacgggcaggcgagctactgagcgacaccatctatagacaaaggccagaaacattaaagttcacaagcatcaccgacacgccagaacaggtattggctaagaacaacgcgctcaacatgaataagaggctgtacacagaagcatgggacaacgacaagaagactatccacgtcatgccagatacacctgagattatgctggccaaactgaatcgtataaattattcggacaagctctataaactggcgttggaggagtccaaaaaggaaggttacgatttgagactcgacgcaattccgattcaggctgccaaggcaagcagggatattgcctccgattacaagtataaagagggatatagaaaacaacttgggcaccatatcggggcaagaaacatcaaagatgacccgaaaatgatgtggagcatccacgtggccaagatacaaagtgacagggaatacaagaaagagttcgagaaatggaaaacgaaattcagtagccctgtcgatatgcttggcgtggtgctcgccaagaagtgccagattctcgtgtctgatattgactataaacatccactgcacgaatggacgtgtcttcctgatcagaacgacgtcatacaggctcgcaaggcctatgatctgcaaagcgacgccatctacaagtctgatctggagtggctgcgcggtattggctgggtcccaatcggctcagtagaagtggagaaagtcaaacgggctggggagattctgtccgaccggaagtaccggcagccagccgatcagcttaaattcacgtgtattactgatactcccgagattgtcttagctaagaataacgcgcttacaatgtctaaacacctgtacacagaggcctgggacgccgacaagacatccatacatgtgatgccagacacaccggacatccttctcgcaaagtctaacagcgcaaacatttcacagaagttatataccaaaggctgggatgaaagcaagatgaaggattatgacttgcgcgctgacgccatctcaatcaagtccgccaaagcaagtagggatatcgcttccgattacaagtacaaagaggcctacgagaagcaaaaaggtcaccacatcggagcacagtctatcgaagatgatccgaaaatcatgtgcgctattcatgcgggaaagatccagagtgagcgtgaatataagaaggagtttcagaaatggaagactaagttcagctcccccgtcgatatgcttagtattttgctagccaaaaaatgtcagacccttgtgaccgacatcgattaccgcaattatctgcatgagtggacctgtatgccagaccagaatgatattattcaggccaaaaaagcttatgacttgcaatccgatagtgtatacaaagccgatctggaatggctgcgtggaatcggctggatgccggaggggtctgtagagatgaaccgagtgaaagtagcccaggacctcgtgaacgaacggctgtaccgcactagaccagaagcccttagtttcacgagcatagtcgacacccccgaggtggtccttgctaaggcaaacagtctgcagatcagcgagaagttgtatcaagaggcctggaataaagacaagtctaacatcacaatcccaagcgatacgcccgagatgttgcaggcccatattaacgcactgcaaattagcaataaactgtaccagaaagattggaacgatgcaaaacaaaaaggttatgatattcgagcagatgccattgagattaagcatgctaaggcctcacgggagatcgccagtgaatataagtataaagagggataccgtaaacagctgggacatcatatggggtttagaaccctacaagatgaccccaagagcgtgtgggccatccatgcagcaaagatccaatccgatagagagtacaagaaagcctacgagaagtctaaggggatccacaatactccgctggacatgatgtcgatcgtccaggccaaaaagtgccaggttctggtttctgacatagattacagaaattaccttcatcagtggacatgcctccccgatcaaaatgacgtgatccaggcaaaaaaagcttatgacctgcagagtgacaacctatacaagtctgacctcgagtggttgaagggcattggttggctcccagagggatcggtggaggtgatgagagtgaagaacgcccagaacctgttgaacgagcggttgtaccgcattaagccagaagccctgaagttcactagcattgttgatacacctgaagtcattcaggctaagattaatgccgtgcagattagtgagccactttatcgggacgcgtgggagaaagaaaaagctaatgtgaatgtgccagccgatactccgctgatgctacaatccaaaatcaacgccttgcaaattagcaataagagataccaacaggcatgggaggacgtgaaaatgaccggttatgatttgagggccgatgctatcgggatccagcacgccaaagcatctagagatattgcatcggactatctgtataagacagcctatgagaagcagaagggtcattacattggttgccggtccgccaaggaggatccgaagctggtctgggcggctaacgtattaaagatgcagaatgatagactctataaaaaggcttacaatgaccacaaagccaaaatttccattccagtcgacatggtgtccatcagcgcagccaaagaaggtcaagcgctggcctccgacgtggactatagacactatctgcaccattggtcttgctttccagatcagaacgacgtgatccaggccagaaaagcctatgacctgcagtctgattctgtgtacaaagcagacttggaatggctccgaggcatcggctggatgcccgaaggctctgttgagatgaatagagttaaggtcgcgcaggatctcgtgaacgaacgtttgtatagaacgagacctgaagccttgagcttcacatcaatcgtggacacgcctgaggttgtgctggctaaggccaactccttgcagatctccgagaagctttaccaggaggcgtggaataaggacaaaagtaacataacaataccatccgacacaccagaaatgcttcaagcccatattaacgcactccagataagtaacaagctataccaaaaagactggaatgatacaaagcagaaaggctacgatattagagctgatgcaatcgagatcaagcatgcaaaggcgtcaagagagatcgcttcggagtacaaatacaaggaggggtacagaaaacaactaggccatcatatgggctttcggactctccaggatgatcccaagagcgtgtgggcaattcacgctgctaaaatccagtcggacagagagtacaaaaaagcatatgaaaaaagtaagggaatccataatacgccactcgacatgatgtccatcgtccaggccaagaagtgtcaggttctggtttcggatatcgactataggaattacctgcaccagtggacatgcttaccagatcaaaatgacgttattcaggcaaaaaaagcatatgatttgcagtccgataacctgtacaagtcggacctggagtggctcaaaggaataggttggctcccagaaggcagtgtggaggtgatgcgcgtgaagaacgcccaaaatctacttaatgagaggctctaccgaattaagccagaagccttgaagttcacctcaatcgtagataccccggaagtaatccaggccaaaatcaatgctgtgcagatctctgagccactatacagaaacgcgtgggaaaaggaaaaggctaacgtgaatgtcccagcggatacacctctcatgctacagagtaagattaacgccctccagatttctaacaagcgataccagcaggcctgggaggatgtcaaaatgaccgggtacgacctgagagccgatgcgattggaatacagcatgcaaaggcatccagagacatcgcctctgattatctctacaaaacagcctacgaaaagcagaaggggcactatattgggtgccggtccgcaaaggaagacccaaaactggtctgggcagccaacgtcttgaaaatgcagaatgatagattgtataagaaggcctacaatgatcacaaggccaagatctcaatccccgtggacatggtctccatttcagcagcaaaggaagggcaggcgctcgccagcgacgtcgactatcgccattacctgcaccactggagctgttttccagaccagaacgacgttatccaggccaggaaagcttatgatctgcagagcgatagtgtgtataaggctgatctggaatggttgagagggatcggatggatgccagagggcagcgttgagatgaatcgggtcaaggtggcccaggatctcgtgaatgagcgtctgtaccggacacgccctgaggccctctcctttacatcgatcgtggataccccggaggttgtgctggcaaaagctaattccctgcaaatctctgagaagttgtaccaggaagcttggaataaggacaagtcgaacatcacgatcccttccgatactcctgaaatgctgcaagcccatattaatgcccttcagatctccaataagctttaccagaaggattggaacgatactaagcagaaaggatatgacatccgcgcagacgccatcgaaattaaacacgccaaggcctctagagaaattgcctcagaatataagtataaggagggctataggaaacagttgggacatcacatggggttcaggactttacaagacgacccgaaaagcgtttgggctatccacgccgcaaagatccagtctgatagggaatataaaaaggcgtatgagaaaagtaagggtatccacaacactcctctggacatgatgtctatcgttcaggcgaagaaatgtcaggtgctggttagcgatatcgactacaggaactatctgcaccagtggacttgcctgcccgaccaaaatgatgtgatccaggccaaaaaggcttacgacctacagtcagataatctatataagagcgatctggagtggttgaagggcatagggtggttgccggagggtagcgtggaagtcatgagggttaagaatgcacagaatctgctgaatgagagactgtatcgtattaaacccgaggcccttaagttcacatcaatagtggatactcccgaggtgatacaggccaagattaacgcagttcagattagtgagccactttaccgcgacgcatgggagaaggagaaggcgaacgtaaatgtgcccgcagatacccccctgatgttacagtcaaagatcaacgctcttcagatttccaacaagagatatcagcaggcatgggaagacgtcaaaatgacaggctacgatttgagagcagacgcaatcggtatccagcatgccaaagctagccgtgatatcgcatcagactatctctataagaccgcgtacgaaaagcaaaaaggacattatattggttgcagatccgcaaaggaggacccaaagctcgtgtgggcagcaaatgtactgaaaatgcagaatgataggctgtataagaaagcatacaacgatcacaaggctaagatcagcatccctgtggacatggtctctatctctgccgcaaaggagggccaagcacttgcttcggacgtagactaccgtcactacttacaccggtggtcgtgtttcccagatcaaaatgacgtgatccaagctcgcaaagcatatgaccttcaatcggatgcattatataaagccgatcttgagtggctcagggggatcggatggatgcctcagggctcgcctgaagtgctccgagtcaagaacgcacaaaacatattctgtgactctgtgtacaggaccccagtagtaaacctcaagtacactagcatagtggacactcccgaggtagttctagccaaaagtaacgccgagaatattagcatcccaaagtatcgcgaagtttgggataaagataaaacctcaattcacatcatgccggacactccagaaatcaacttggcacgggcaaatgcattgaatgtctctaacaagctttacagggagggatgggacgaaatgaaggccggttgcgatgtgcggttagacgccatccctatacaggctgccaaggccagtagagagatcgcctcggactataaatacaaactggatcatgagaaacagaaggggcactacgtcggcacactcaccgcgcgtgacgataataagattcggtgggcattgatagccgacaagctgcagaatgagagggaataccgtctggattgggctaaatggaaggctaaaattcagtctcccgttgacatgctgagcatcttacacagtaagaatagccaagcattggtgtcagacatggactaccgcaactatctgcatcagtggacctgtatgcccgaccagaacgacgtgatccaggctaaaaaagcctacgagttacagtccgacaacgtttataaagctgatttagagtggttacgagggatcggctggatgcctaacgattctgtttccgtaaatcacgccaagcacgcagccgacatttttagcgaaaaaaaataccgaacaaaaatcgaaactctcaactttacccccgtagacgacagagtcgactatgtgactgccaagcagtccggtgaaatactcgacgatataaaatatcggaaggattggaacgcaacaaagtctaaatacacacttactgagacacccctgctgcacacagcacaggaggcagccagaatactggatcagtatctgtacaaggagggatgggagcggcagaaagccaccgggtacatcctgccaccagatgcagttccctttgttcacgctcaccactgcaacgatgtccagtctgagcttaagtacaaagccgaacacgttaagcagaagggacactacgtaggagtccctacgatgcgcgatgatccaaaactcgtgtggttcgaacacgcaggccagattcagaatgagagactctacaaggaggactatcacaagactaaggccaaaataaacatccctgcagatatggtcagcgttctcgccgcaaaacagggccagacattagtctcggacattgattacaggaactatttgcaccagtggatgtgccatcccgatcagaacgacgtaattcaggcacggaaggcttatgatctgcagtctgacaacgtgtaccgcgctgatttagagtggctgagaggaatcgggtggattcccctagattctgttgatcacgtgagagtcaccaaaaatcaagagatgatgtcccagattaaatacaaaaagaatgcccttgagaattatccaaatttcaggagcgtcgtcgatcctcccgagattgtgctggctaaaataaactccgtaaatcagtcagacgtgaagtataaggagaccttcaacaaagcaaaaggcaaatataccttcagccctgacactccccatatttcccacagcaaagatatgggaaagctttacagtacgatcctgtacaaaggggcatgggagggcactaaggcctacggttacacactggacgaaaggtacatccctatcgtaggcgctaaacatgcagatctggtcaactccgagcttaagtacaaagagacatatgagaagcaaaaagggcactatctggcagggaaggtgatcggcgagttcccaggggttgtgcattgccttgacttccaaaagatgcggagtgccctgaactatagaaagcactatgaggacaccaaggctaatgtacatatcccaaacgacatgatgaatcacgtactggctaaacgttgtcagtatatcctcagtgatttggagtaccgtcactacttccaccagtggactagcctgctggaagagcctaacgtaatccgcgttcgaaacgcgcaggagattttaagcgacaacgtctacaaggatgacctgaactggttgaaagggattggatgctacgtctgggatacgcctcagatactgcacgctaaaaagagctatgatctgcagagccagttacagtatacagccgcagggaaagaaaatcttcaaaactataatttggtcacagataccccattatatgtgacagctgttcagtctgggatcaatgcctccgaggttaagtataaggagaactatcaccagataaaagacaagtatacaactgtgctggagacagtggattatgaccgcacaaggaatttgaaaaacctatattcctcaaatctctataaggaggcctgggatagggtcaaagccacgtcatacattctgccttcttccactcttagcctcactcatgcaaagaaccagaagcacctggcgtcccacattaagtatcgcgaggagtatgagaagtttaaggcactgtataccctgcccaggagcgtggacgatgatcctaatactgcacgctgcctgcgagtcgggaagctgaatattgaccggctgtaccgctctgtgtatgagaagaacaagatgaagatacacatcgtgccggacatggtggagatggtcacggccaaggattctcaaaagaaggtcagtgaaattgactacaggctgagactgcatgaatggatctgccaccctgatttgcaggtgaacgatcacgtgagaaaggtgaccgatcagatctcggacatcgtatacaaagacgacctgaattggctcaagggcataggatgttacgtttgggacacacctgagattctgcatgcgaagcatgcttatgacctgcgagatgatatcaagtataaggcccatatgctgaaaacccggaatgattataagctggttacagacacgcccgtttatgtccaggctgtaaagtcgggtaagcagctgagcgacgccgtataccactacgattacgtccactctgtgcgcggaaaagtcgcaccgacaacaaaaaccgtggacttggatcgggctttgcatgcttataaactacagagtagtaacctttataaaacctcactgcggacactccctactggatatagactgcccggtgatacacctcactttaagcatattaaagacacacgctatatgtcatcttacttcaagtataaagaggcttatgagcatactaaagcttacggctataccctagggcctaaagacgtaccctttgtgcacgtgagacgagttaacaacgtgacaagcgagaggttgtacagggagttataccacaagctgaaggataagatccacacaacccccgatactcccgagataagacaggtaaagaaaacacaggaagccgtcagcgaactgatttataaatccgactttttcaagatgcagggccacatgatcagcctgccatacacccctcaagtgattcactgccgatacgtgggcgacatcactagcgacatcaaatacaaggaggacttgcaggtgctgaaaggtttcggttgtttcttgtacgacaccccagacatggtgcggtcccgacatttgaggaaattatggagcaactatctgtacaccgataaagcaagaaaaatgcgcgacaagtataaagtagtcctagacacacccgagtaccgaaaagtgcaggaattgaagactcatctcagcgagctggtgtacagggccgcaggcaaaaagcaaaagagtatttttacttcagtcccagataccccagacttgctcagggccaaacgcggacagaaactccagtctcaatacctgtatgtggaactagctactaaggagaggcctcaccatcacgcgggaaatcagactacggctttaaagcacgcaaaagacgttaaggatatggtctcagaaaagaagtataagatccagtacgaaaagatgaaagacaaatacacccccgtaccagacacacctatcctgattcgagccaaacgcgcttactggaatgcaagcgacctgcggtacaaggagacattccagaagaccaagggtaagtaccacacggtaaaggatgctctggacattgtctatcacaggaaagtcaccgatgatatctccaaaattaaatataaagaaaattatatgagccaactgggcatatggcgaagtatccctgaccgaccagagcacttccatcacagggccgtgaccgataccgtgagcgacgtcaagtacaaggaggacctgacttggcttaagggcattggttgctatgcttacgataccccagatttcacactggccgagaaaaataagactctttattcgaaatacaagtataaagaggtatttgagagaacgaagtccgatttcaagtatgttgctgacagtccaattaacaggcattttaagtacgcaactcagctgatgaacgaaaagaagtatagagccgactacgaacagcggaaggacaagtatcacctggtggtagacgagcctaggcatctgctggccaagacagcaggcgatcaaatttcacagattaagtataggaagaactacgagaagtcgaaagacaagtttacaagcatcgttgacacgccggagcacctccgaacaactaaagtaaataaacaaatcagtgatattctctacaaactggaatataacaaggcgaaacctcgcggatacaccactatccatgatactccgatgctgctacacgtcagaaaggttaaggacgaggtgtcggaccttaagtacaaagaggtttatcagcggaacaaaagtaactgtaccatcgagcctgatgctgttcatattaaggctgccaaagacgcctacaaggtaaacactaatctggattacaagaagcagtacgaggcaaacaaagcacactggaaatggaccccagacagacctgactttttgcaggcagctaagagcagtctccaacagtccgacttcgaatacaagctggatcgggagtttttgaaaggctgtaagttaagcgttactgacgacaaaaatacagttctcgcactgagaaacacgctgattgagtccgacctgaaatataaagagaaacatgtgaaagagagggggacctgtcacgccgtcccagacacaccacagattctgctggccaagaccgtgtcaaatctggttagcgagaacaagtacaaggatcatgtgaagaagcatttagcacaagggagctacactacattgccagagactagggacacagtgcacgtcaaggaagtgactaagcatgtttctgatactaactacaagaagaaatttgtgaaagagaaggggaaatccaattattctatcatgctcgaaccacccgaagtgaagcatgccatggaggtggcaaagaagcaaagcgacgtggcctatcgcaaggatgcgaaagaaaatcttcactacactactgtcgctgaccgcccagacatcaagaaggctacccaggccgctaaacaggcgagcgaggtcgagtaccgggctaagcatcggaaggaggggagtcacgggttaagcatgctaggcaggcccgacatcgaaatggcaaaaaaagccgctaaactgtccagtcaggtcaaatacagggaaaattttgataaggaaaagggtaaaacgccaaaatataatcctaaggacagccagctatacaaagttatgaaagacgcgaacaatctcgcgtcggaagtaaagtataaagccgacctgaaaaaactgcacaagcccgttaccgatatgaaggaatccttgatcatgaatcacgtcttaaatacctctcagctggcaagttcctaccagtataaaaaaaaatatgagaaatccaaggggcactaccatactatacctgacaatctggaacagctccacctaaaagaggccaccgaactgcagtctattgtaaagtacaaggagaagtacgagaaagagcggggtaagccaatgcttgatttcgaaacccccacgtacatcacagcaaaggagagtcagcagatgcagagtgggaaggagtacagaaaagattatgaagaatcaataaaaggacgaaatctgacgggactggaggtcacccctgccctgttacacgttaagtatgccaccaagatcgccagtgaaaaagagtatcgcaaggatctggaggaaagtatcagaggaaagggtctaaccgaaatggaggatacacccgatatgttacgggctaaaaatgccacacagatcttgaatgagaaggaatataaaagagatctggagcttgaggtgaaaggcaggggactcaacgcaatggctaacgaaaccccagacttcatgagagccagaaatgccacagatattgcatcgcaaatcaagtataagcagtctgcagagatggagaaagctaatttcacaagcgtggtggatacacctgaaatcattcatgctcaacaggtcaagaacctgtccagccagaagaaatacaaggaggatgcagaaaaatccatgtcgtactatgagacggtcttagacacgccggaaatccaaagggtgcgagaaaatcagaaaaacttctcactgctccaataccaatgtgaccttaaaaacagcaagggaaagattacggtggtccaggatacacctgaaatactgcgagtaaaggaaaatcaaaaaaatttcagtagtgtgttgtacaaggaggatgtctcaccgggaactgctattggcaagacgcctgagatgatgagagttaagcagacgcaggaccacatcagttctgtgaaatataaagaggccatcggacaggggacgccaattcctgacctcccagaggtcaaaagggtaaaggagacccagaagcatattagctccgtcatgtataaagagaacctggggaccgggattcccacaactgtgacccctgagattgagcgagtgaagcgcaatcaggaaaatttctcatcggtcctttataaggagaacctggggaaaggcattccaacacctatcactcccgagatggagagagtcaaacggaaccaggagaacttctcgagtatcctttacaaggaaaatctctcaaaaggaactcccttaccagtgacacccgaaatggaaagggtcaaactgaatcaagagaacttctccagtgtgctttacaaggagaatgtaggtaagggcatcccaatcccaattacacctgaaatggagcgagtaaagcataatcaggaaaatttttcatcagtgctgtacaaggagaatctggggaccggaatacccattccaatcacaccagaaatgcagcgtgttaaacacaatcaggaaaatctctcttcagtcctgtataaagaaaatatgggtaagggcacaccgcttccagtgacgcctgagatggaacgagttaagcacaaccaggagaacatctcgagcgtcctatataaggaaaacatggggaagggcacaccactgcccgtgaccccagaaatggagcgggtcaaacataatcaagagaatatctcctcggtactctacaaagaaaacatggggaaggggacgccacttgccgttaccccagagatggagagagtgaagcacaatcaggagaatatcagctccgttctttataaggaaaatgtgggaaaagcgactgccactcctgtcacacccgaaatgcagcgggtgaaacggaaccaggagaatatttcatcagtgctgtataaagagaatctaggtaaggcaacgcccactccctttactcctgaaatggagagggtaaagcgcaaccaggaaaacttcagctctgtgctgtataaagagaacatgagaaaggccacacccaccccagtgacccctgagatggagcgcgcaaagcgaaaccaggaaaatatatctagtgtactctacagcgattctttccgaaaacagattcaggggaaggctgcatacgtactggacacccctgagatgcgccgagtcagagagacccagaggcacatctccacggttaaataccacgaggactttgagaaacacaagggttgttttaccccggtcgtgacagaccccataactgaacgtgtcaagaaaaacatgcaggatttcagcgacattaattaccgcggtatacagcgcaaagttgtggaaatggagcaaaagcggaacgatcaagatcaggaaacaatcacgggcctcagggtctggagaactaatccgggttccgtgtttgactatgatccagccgaggataacatccagtcgcggtccctgcatatgatcaacgtacaagcccaaagacgtagccgagaacagtcccggtcagctagtgcccttagtatctctggtggggaggagaagtctgagcattcagaagcgcctgatcatcatctcagtacttattccgacgggggtgttttcgctgtatctaccgcatacaagcacgccaagaccactgagctgccccagcagagatcaagctctgttgctacacagcaaaccacagtgtcttctataccatcccacccttctacagctggcaagatcttccgagccatgtatgactatatggcagccgacgcagacgaggtctcatttaaagatggcgacgctattattaacgtccaggcaatcgacgagggctggatgtatggaaccgtccagagaacagggagaaccggaatgctgcctgccaattacgttgaggcaattta

SEQ ID NO: 232124 - DNA, 864 bp, synthetic construct
  misc_feature 1..864: note = Description of Artificial Sequence: Synthetic coding sequence
  source 1..864: mol_type = other DNA
atggctgatgacgaagactacgaggaggtggttgaatattatactgaggaggtagtttatgaggaagtgcctggcgaaaccattacaaaaatttatgaaacaaccacaaccaggacaagtgattacgagcagtccgaaacttctaaaccagccctcgcacagcccgctcttgcccaacctgcatccgccaaaccggtggagagacgtaaggtaataaggaaaaaagtggacccttcaaaattcatgactccctacattgcacactcccagaagatgcaggaccttttttcccctaataagtacaaggagaagttcgaaaagaccaaagggcagccttatgcctcaactacagatacgccagagctgcggcgtatcaagaaggtgcaggaccaactcagcgaggtaaaatatcggatggacggggacgttgccaagaccatttgccatgtcgacgaaaaggcaaaggacatcgagcatgccaaaaaggtcagccagcaagtgagcaaggtcctgtacaaacagaattgggaggacaccaaagataaatatctcctccctcctgacgccccagagctcgttcaagcagtgaaaaacactgccatgttctccaaaaagttgtatactgaagactgggaagccgacaaaagtctcttctatccttacaatgattccccggaactaaggagagttgcacaggcccagaaggcgctgtccgacgttgcctacaagaagggtctcgctgagcaacaggcccagttcacacccctggctgatcctcccgacattgagttcgctaaaaaggttacaaatcaggtctcaaaacagaaagaaaaaaaaaggaaaaagaaacgaaagaaagtgtag

SEQ ID NO: 232125 - DNA, 1317 bp, synthetic construct
  misc_feature 1..1317: note = Description of Artificial Sequence: Synthetic coding sequence
  source 1..1317: mol_type = other DNA
atgatgagggtcaagcaaacacaggatcatattagctccgtcaagtacaaagaggctattgggcaggggactcccattccggatcttccggaagttaagcgtgtgaaggagactcagaaacacatctcctccgtgatgtataaggagaacctgggcactgggatcccaacgacagtgacccctgagatcgagagagtgaaacgcaatcaggaaaatttctccagcgtgctgtacaaggagaatatgggcaagggaacgccactggctgtgacacctgagatggagcgggtgaagcataaccaggagaatatttcctcagttctgtacaaggagaacgtggggaaagcaactgctaccccagtgacacctgagatgcagcgcgtgaaaagaaatcaggagaacataagcagcgtgctgtacaaggaaaacatgcgaaaggccacacctacccccgtgacacccgagatggaaagagccaagcggaaccaggagaacatcagctccgtcctctacagcgactcgttcaggaagcagattcaggggaaagccgcttacgttctggatacaccagaaatgcggagggttcgggaaacgcaacggcacatctcaacagttaaatatcacgaggatttcgaaaaacataaagggtgcttcacaccagtagttacggatcctataaccgagcgagtgaaaaagaatatgcaggacttctcagatatcaactacagaggcatccagaggaaagttgtggagatggaacaaaaaaggaatgatcaggatcaggaaacgataacagggctgcgcgtgtggcgcaccaatcccggtagcgtcttcgactatgatcccgctgaagacaatatccaatcgaggtcactgcatatgataaacgtgcaagctcagcgacgcagccgcgagcagtcaagaagtgcatccgcgctctccatatccgggggagaagaaaagtctgaacactctgaggctcctgaccaccatctttctacctactctgacggcggtgtcttcgccgtaagcaccgcctataaacatgctaaaacaacagaactgcctcaacagcggagtagctccgtggctacccagcaaacaaccgtgtctagcattccatcccatccctccaccgcaggtaaaatcttccgcgctatgtacgattacatggcagcagatgccgacgaagtgagctttaaggatggagatgccataatcaacgtccaggcaatcgatgagggctggatgtacggaaccgtccagcgaacagggaggacagggatgctgccagcaaattacgtggaggctatttag

SEQ ID NO: 232126 - DNA, 1014 bp, synthetic construct
  misc_feature 1..1014: note = Description of Artificial Sequence: Synthetic coding sequence
  source 1..1014: mol_type = other DNA
cagaagtacaaggaggattatgagaataaaattaaaggcaaatggtccgaaacgccctgttttgaagtggctaacgccagaatgaacgccgataacatttccactcggaagtaccaggaggacttcgaaaacatgaaagaccagatctacttcatgcaaacagagacacccgaatacaaaatgaataagaaggccggtgtcgcagcctctaaagttaagtacaaggaagattacgaaaagaataaaggcaaagcggattataacgtcctgccggcttcggaaaacccacaactccgacagctcaaggcggctggtgacgccctcagcgataaactgtacaaagaaaattatgaaaaaactaaggccaaatccatcaattattgtgaaactcctaagttcaagcttgatactgtgctgcagaacttttcatccgataagaagtataaagattcttatcttaaggatattctgggccattacgtgggctcattcgaggatccttatcactcccattgcatgaaagttacggctcaaaatagtgacaagaactacaaagccgaatacgaggaagatcggggtaaaggtttctttcctcaaaccataactcaggagtatgaggccattaagaaattggaccagtgtaaagatcacacctataaagtccaccccgataagaccaagttcacccaagtcaccgattcacccgttctcctacaggcacaagtgaacagcaaacagttgagcgatctgaactacaaagcaaagcacgagtccgaaaagtttaagtgccatattcctccagataccccagctttcatacagcacaaggtgaatgcttacaatctgtcagataacctatataagcaggactgggaaaaatcaaaagcaaagaagtttgacattaaggtggacgccataccgcttcttgccgcaaaagcaaacacaaaaaacacatcagatgtcatgtacaaaaaggactatgagaaaaataaggtaaaggtgcagcagagatag

SEQ ID NO: 232127 - DNA, 5192 bp, synthetic construct
  misc_feature 1..5192: note = Description of Artificial Sequence: Synthetic coding sequence
  source 1..5192: mol_type = other DNA
atgaacgtgcagccatgttcgaggtgcgggtacggcgtgtatccagcagaaaagatcagttgcattgatcagatttggcataaggcatgtttccactgtgaggtgtgcaaaatgatgttatccgtaaacaacttcgtctctcaccagaagaagccctattgccatgcacataatccaaagaataatacttttacttccgtgtatcatacccccttaaatttgaacgttcgcacattccctgaagcgattagcggtattcatgaccaggaagacggagagcagtgcaagagtgtgttccattgggacatgaagagcaaagataaagagggtgcacctaatcggcagccgcttgccaatgaaagagcatactggaccggatacggcgaggggaacgcgtggtgtcccggagcgctgccagaccctgagattgtgagaatggtggaggctagaaagagtctgggggaggaatataccgaagactacgaacagccgagagggaaaggcagtttccccgctatgatcacacccgcttaccagagagctaaaaaggccaaccagttggcgagccaggtggagtacaagcggggtcacgatgagaggattagtcgtttcagtaccgtggtcgacacaccggaactgctgcgtagcaaagccggagcccaactccagtcagacgtccgctacacagaggactacgaacaacagagaggtaagggaagcttccctgcgatgatcacccccgcttatcagatcgctaagcgcgctaacgagctcgcttcggatgtgcgataccaccagcaatatcagaaggagatgaggggtatggcgggacctgccataggggctgagggcattctcactcgggagtgcgccgaccagtacggtcaaggctaccccgaagaatatgaagagcatcgcggaaaggggagctttcctgcgatgatcactccggcatatcagaatgcgaagaaagcgcatgagcttgcgagtgacatcaagtacaggcaggattttaataaaatgaagggcgcagcgcattaccactctctgcccgcacaggataatctggtgctgaagcaggctcaatccgtcaacaagctggtgtcggaggttgaatacaagaaggatctcgagtccagcagaggccactctatcaattactgtgaaacccctcaatttcgcaatgtatcaaagatcagcaaattcacctcggataacaaatacaaagaaaactaccagaaccatatgcgtgggagatatgagggagtgggaatggacagaagaaccctgcatgcaatgaaagttggaagcttggcctcaaacgtggcctataaagctgactataagcacgatattgtggattacaactaccccgctacgctaaccccatcataccagaccgcgatgaagctagtgcctctcaaggacgcaaactaccggcaaagcatcgacaaattgaagtattctagcgttacagacacgccccaaattgtgcaagccaaaatcaatgcgcagcagctatctcacgtgaattaccgcgcagattatgagaaaaataaactcaactacactctgccccaggatgtgccacaattggtgaaagccaagaccaatgcaaagctgttcagcgaggtcaagtacaaggaaggatgggaaaagactaaaggaaaggggtttgagatgaagctggatgccatgtcgctgctagcggcaaaagccagcggggaattggcgtctaacatcaagtataaggaggagtatgagaagacaaagggcaaagccatggggactgctgactcgagacttttacacagtctgcagattgccaagatgtcatcagaggtggaatacaagaagggtttcgaagagagcaaaacacggtttcaccttcctatggatatggtcaacatccggcatgccaaaaaagcacagacccttgcctcagatctggactatcggaaaaagttgcacgaatataccgtgctccctgaggatatgaagacccagtgggctaagaaggcctacgggctgcaatcggaactacagtataaggccgatctggcttggatgaagggagtgggctggttaacagaggggtcccttaatctggagcaggctaagaaggctggacagctggtatccgagaagaactatcggcagcgcgtggacgaactgaagtttactagcgtgacagacagctctcagatggagcatgcgaaaaaaagccaagagctccagtctggcgtggcctacaaggctggtaatgagcagagcgtccaccagtacaccataagcaaagacgagcctctctttttgcaagcgcgtgctaatgcggctaatctgagtgagaagctgtacaagtcgtcctgggaaaatcagaaggcaaagggatttgagctacgcctggatagtctcactttcttggcagctaaagctaaaagagatctggcatccgaggtaaagtacaaagaagattatgagcggtcccggggaaagttgattggagccaaagatgttcagggagatagccagatgagtcacagtctgcagatgtccaagcttcagtccgagctagagtataagaaaggttttgaggacacaaagagtcagtgccatgtcagtctcgacatggtccatctagtgcatgcaaggaaggcacaacacctggctacagatgtgggatataagaccgccgagcaccactttactgccctgcccacagacatgaaggtggaatgggctaaaaaagcctacggcttacagagtgataaccagtacagggcagatgtgaagtggatgaaaggaatggggtgggtggccaccgggagtctgaacgtggaacaagcgaaaaaggccggagaactgataagtgagaagaagtacaggcaacaccccgatgcgctcaagttcactagcattaaggacacccctgaaatggtgcaggctagaatttcctatacccaggccgtcgatcgattgtatagggaacagggagagaatataaaacatcactacactccaactgcggaccttcccgaggtgctgctggccaagcttaatgctatgaatattagcgaaacacgttacaaggagtcatggagtaagcttagggatggcggatacaaacttaggctcgatgcactcccctttcaggctgctaaggctagtggagagatcatttctgactataagtacaaggaggcatttgaaaagatgaagggccagatgctgggctctcgatcactggaagatgacataagcctagcccatagtgtgtacgccacctccctccaaagtgacgtcaattacaaaaaaggtttcgagcactcgaaggctcaatttcatttgcccctggatatggccgctctggtgcacgccaagaaggcacagacgctcgccagtaatcaggactacaaacacccgctgccgcagtacacgagcttggctgaggatctgcggcttagttgcgcaaagaaagcccacaagctgcaatctgaaaacttatataggtccgacctgaatttcatgcggggagtggcctgcgtgattcctggcacccttgagatcgaaggaaggaagaaggccagcgagttgataagtgagtcgaaatatcgacagcacccgcattcatttaagtacaccgccgtgaccgatacaccgaatctgcttcacgccaaattcagtaatcagattactaatgagaggctgtataaggctgccggagaagacgctagacacgagtacactatgacacttgggctgcctgagttcattcgggcaaaaaccaacgctgctaatctgtctgacgcacgctataaagagtcgtggaggaacctccgtgctcaggggtataagctgaccattgaggcactcccctttcaggccgctcgtgcatccggcgatattgccagcgactttctttataggcacgactttgtgaaagagagaggcaagctgattggaccacagtcagtacgagacgaccccagaatccagcattgtaggcgaatggggcagcttcagagcgagttgcagtaccggaggggtgccacgtcatctcaggcacagtttcacctcccgatggacatggtgcatctcgtccacgcgaagaacgcacaggccctcgcttcggaccatgactacagaacccagtaccataaatttacggccctgcctgaagatctgaagatggcctgggctaaaaaagctcatgctctccagtctgagctgagatacaaaagcgacctcataggcatgaaggggattgggtggttggctcttaggagtccccagatggaaagcgccaaaaaggcaggggagctcatttccgagaccaaataccggaagaagcccgacagcatcaagtttaccacagtcgtcgattcaccggacctggtccacgctaaaaacagttatatgcactgtaacgaacgcatgtaccgatctggagacgcagagagcctgcataggtacaccctgatacccgaccatcccgacttcactcgggcacggcttaatgctctacacttgtcagataaggtgtacaggaatagctgggagcagacccgggctggcagttacgattttaggctcgacgcaatccccttccaaacagccagagcatccagagagatcgcatcggacttccggtataaggaggccttccttagggatcgcggattgcagattggctacagaagcgtggacgacgacccccgtatgaagcattttcttaacgttgggaggctccagagcgataacgagtataagaaggacttcgctaagagcaggtcccaatttcacagctccaccgaccaacctggacttctgcaggctaaacgcagccagcagttggcgtctgatgtgcattataggcagccattgccacagcccacatgcgaccctgaacagctgggcctccgccatgcgcagaaggcgcaccagttacagagcgacgtaaagtacaaaagcgatttaaaccttacgagaggggtggggtggacgccacccggatcctacaaagtggagatggcacggagagccgcagaactggcaaatgctagaggcctcggccttcagggtgcatatcgtggagctgaggcggtcgaggccggagaccatcagtccggcgaagttaacccggacgcgacagagatcttgcatgtgaagaaaaagaaagcgctgcttctgta

SEQ ID NO: 232128 - DNA, 5088 bp, synthetic construct
  misc_feature 1..5088: note = Description of Artificial Sequence: Synthetic coding sequence
  source 1..5088: mol_type = other DNA
atgaatgtgcagccttgttcacgatgcggatacggggtgtaccctgctgaaaagatctcctgtatcgaccagatttggcataaggcttgtttccactgcgaagtgtgcaagatgatgttgagcgtgaacaactttgtgtcccaccagaaaaagccctattgtcacgcccacaaccccaagaacaatactttcacctctgtttatcatactcctctcaaccttaacgtgcgaaccttccctgaagcgatctctggcattcatgaccaagaggacggcgaacagtgcaagtctgtgttccactgggatatgaaatccaaggacaaggagggcgcacccaaccgccaacctttagccaacgaacgcgcttactggaccggctacggcgagggaaatgcctggtgtcccggtgccctgccagaccccgagattgtccgtatggtggaggcccgtaaatcccttggtgaagaatatacagaagactacgaacagccccgtggaaagggcagtttcccagcaatgattacccccgcatatcagagagcaaaaaaggcaaatcaactggcaagtcaggttgagtataaacgcggtcacgatgaaagaatctccaggtttagtactgtggtggatactcccgaattgcttagatccaaagccggtgcccagctacagagcgacgtgcgctacacagaggactacgagcaacaaaggggcaaaggcagttttccagcaatgattacacccgcttaccagattgctaagcgcgctaacgagctcgcgtcggacgtgcgataccaccagcagtatcaaaaggagatgagaggaatggcaggacctgctatcggcgctgagggcattctaacgcgcgaatgtgccgatcagtacggccagggctacccagaagaatatgaggaacacaggggcaaaggatcattccccgctatgatcactcccgcttaccagaatgccaagaaggcccatgagctagccagcgatatcaaataccggcaggactttaataaaatgaagggcgcagcccactaccattccctgcctgctcaggacaacttagtgctgaaacaggcacagagcgtcaacaagcttgtgagtgaaaacaaatacaaagagaattaccagaaccacatgagaggcaggtacgagggcgtcgggatggataggagaacacttcacgccatgaaggtgggctccctagccagtaatgttgcctataaggcagattacaaacatgatattgtagactataattatcctgcaacattgacaccaagctaccagaccgctatgaaactggtgcctctgaaagatgccaattaccggcaatccattgacaagttgaagtattcatcagttaccgacacaccccagattgttcaggccaagatcaatgctcagcagctgagccacgtgaattatagggccgactacgaaaagaataaattgaactacacactaccacaagacgtgcctcaattggtcaaggcgaaaacgaacgccaaactgttttccgaagttaagtacaaggaagggtgggagaaaactaagggaaaaggttttgagatgaaactggatgctatgtctctattggccgctaaagcctcaggcgagttggccagcaacattaaatataaggaagagtatgagaaaaccaaaggaaaagccatgggaaccgccgattctagactcctccacagcctgcaaattgccaaaatgtcaagtgaagtggaatataagaaaggattcgaggagtcaaagacgagatttcatttaccaatggacatggtgaacattcgtcacgccaaaaaggcccaaactctggcaagcgacctcgactaccggaagaagttacacgaatacaccgtgttgcctgaagacatgaaaacacagtgggccaagaaggcatacggacttcagtctgagctgcagtacaaagccgaccttgcctggatgaagggggtgggatggttgacggagggttccctgaacttggagcaggccaagaaagctggccagctggtgtctgagaagaactacaggcagagagtggacgaattgaagtttacatccgtgaccgactcttcccagatggagcatgccaagaagtcacaggagttacagagtggtgtcgcctataaagccggtaatgagcagtccgtgcaccagtatacaatctccaaggatgaaccactgttcctgcaagcaagagccaacgctgctaatctgagcgaaaagctgtacaaaagcagctgggagaatcagaaagctaaggggtttgagctgcgactagactcccttacattcctcgcagcaaaggccaaacgggacctggcttccgaggtcaagtacaaagaggactacgagcgttcccggggtaaactcattggagcgaaagatgtgcagggtgatagccagatgtcccatagccttcagatgtccaagctgcagtccgaactagaatataaaaaaggatttgaagataccaaaagtcagtgccatgtctccttagatatggtgcatttagtacatgctcggaaagcccagcacttggccaccgatgtgggctacaagactgccgagcaccatttcacggccttaccaacagacatgaaagtggagtgggccaaaaaggcctacggcctccaatccgataatcaataccgtgctgacgttaagtggatgaaggggatggggtgggtagcaactgggagcctgaatgtggagcaggctaagaaagcaggcgaactgatttctgagaagaaatacagacaacatcccgatgccctaaaattcactagtattaaggatacacccgagatggtgcaggcacgtattagctacacgcaggctgttgatagattgtacagagagcagggggagaatataaagcaccactatacccccaccgctgacctgcccgaggttctcttagccaagttgaatgctatgaatattagcgaaacacgctacaaagagtcctggagcaagctgcgcgatggaggatataagctgcgcctggatgccctgcccttccaggctgcaaaagctagcggagagattatttccgactataagtacaaggaagctttcgagaaaatgaaaggtcagatgctgggctcacgatctttagaggacgacatatcactagcccactctgtctatgctacatctctccagtctgatgtgaattataaaaaaggttttgaacattcaaaggcgcaattccacctacctctggacatggcggcactggtgcacgccaagaaagcacaaaccctggcctctaatcaggactataaacatcctttgcctcagtacacgtccctcgccgaagatctcagactttcgtgcgccaaaaaggcacataagttgcagagcgagaacctctacaggtccgacctgaactttatgagaggtgtcgcctgcgtaatccccggaactctggagatcgaaggcaggaaaaaggccagcgagttgattagcgaaagcaagtatcggcagcatccacactcttttaaatatactgcggtcaccgacacgcccaacctcctgcatgccaagttttctaaccaaattactaacgagcgactctacaaagccgcaggcgaagatgccaggcatgaatatacaatgaccctgggcctacccgaatttatccgggcaaaaactaacgccgcaaatttgagcgatgcccgatacaaggagagctggcgtaatctgcgcgcacagggctacaaactcactattgaggccctgccattccaggctgccagagcctccggggacattgcgagcgattttctctaccggcatgattttgttaaagaacgcggaaaattgatcggaccacagtcagtaagggacgatcccagaattcagcactgtcggagaatgggccagctgcagagtgagctgcagtacaggagaggcgctacgagctcccaggctcagtttcatctgccaatggacatggtacacctagtgcacgccaagaatgcccaggccttggcaagcgaccatgattaccgcactcaataccacaaattcacggctctgccggaagatctcaagatggcttgggcaaagaaagcgcatgctctacagagcgaattgcggtacaaatcagatctgattggtatgaagggtatcggctggcttgcgctgcgcagcccacagatggagtccgctaagaaagccggagaactgatttccgaaacgaagtaccgaaagaaaccagacagcataaagttcaccaccgtggtggattctccagatctcgttcatgcgaagaactcctatatgcattgcaatgagcgcatgtacagatccggggatgctgagagtctccaccgatacactttaattcctgatcaccccgacttcacacgggctagactgaacgctctgcatctgtcagacaaggtgtaccggaacagctgggagcaaacccgggcaggctcgtacgacttcagacttgatgctatcccttttcagactgctcgggcttcccgagaaatcgcatcagattttcgatataaagaagcattcttaagggatagagggttgcaaatcggctatcgatccgtggatgacgaccccaggatgaagcactttctgaatgtgggccgtctacaatccgacaacgagtacaagaaggacttcgccaaatcccgctctcagtttcattcttccactgaccagcccggtctgctgcaagccaaacgcagtcaacagctggctagcgatgtgcactatcggcagccgctcccgcaacccacttgcgatcccgaacagttagggctcagacacgcccagaaagctcatcagttacaaagcgacgtgaagtataagtccgacctgaatctgacacgtggcgtgggctggaccccccctggatcttacaaagtcgaaatggctcggcgagccgcagagctggcaaatgccaggggtctgggcctgcagggcgcttaccgaggcgctgaagccgtggaagcgggtgatcaccagtcgggagaagtgaaccccgatgccacagagatcctccacgttaaaaaaaagaaggcacttctcctatag

SEQ ID NO: 232129 - DNA, 2559 bp, synthetic construct
  misc_feature 1..2559: note = Description of Artificial Sequence: Synthetic coding sequence
  source 1..2559: mol_type = other DNA
atgagagggatggccggtccggcaatcggagcggaaggcatccttaccagagagtgtgccgatcagtatggacagggataccccgaagagtacgaggagcatagggggaagggcagtttccccgctatgatcacacctgcctaccagaacgccaaaaaagcccacgaattggctagtgacataaagtatcgccaggacttcaataaaatgaaaggtgccgctcactatcacagtttgccagctcaagataatctagttctcaaacaggcccaaagtgttaataaacttgtgagtgaagtagagtataaaaaagacctggagtcctcccgcggacacagcatcaattactgcgaaaccccacagtttagaaatgtctctaagatcagtaagtttactagtgacaataaatataaggagaactatcagaatcacatgagagggaggtacgagggcgtcggaatggacagacgcaccctccacgctatgaaggtggggagtcttgctagcaacgtcgcctacaaggcagactataaacacgacattgtggactacaactatcctgccacactgactccaagttaccagactgcaatgaaactggtcccacttaaggacgccaactataggcagtccattgataagctgaagtattcaagcgtgaccgacaccccacagatcgtccaggccaaaataaatgcccagcagttgtcccacgtgaactaccgcgcagattacgaaaaaaataagttaaattacactttgccacaggacgtaccccagcttgttaaagccaagaccaacgcaaagctgtttagtgaggttaagtacaaggagggctgggagaaaacaaagggtaaaggctttgaaatgaaactcgacgctatgtctcttctagcagccaaggcctcaggcgaactggcttccaacgtacatctgctcctgtctctgaagatcaagtataaggaggagtacgaaaagactaaggggaaggctatgggcacggccgactctagacttctacactctctccaaatcgccaagatgagttcagaagtggaatataaaaagggctttgaggaatccaagaccagattccacttacccatggatatgggtgtggggtggctgacggagggctctctcaacctagaacaggcgaagaaggctggccagcttgtgagtgagaaaaactacagacagagagttgatgagcttaagttcaccagtgtgaccgacagcagccagatggagcacgcgaagaaatcccaggagcttcaatccggtgtagcctacaaggccggaaacgaacagagcgtacatcaatatacaatttccaaggacgaacccttattcctgcaggctagagctaacgcagcgaatctgtcagagttcctgtatcgccacgattttgtgaaggaacgagggaagctcatcgggcctcagtccgtgagggatgacccacggattcagcactgtcgtagaatgggacaactgcaatccgagttgcagtatcgacggggagccacatcttcacaggcccagttccatcttcctatggatatggtgcacctggtacatgcaaagaatgcccaggcactcgcaagtgaccacgactataggacccagtatcataaatttacggcgttacccgaggacctcaagatggcatgggctaaaaaagcacatgcgctgcagtctgagctgagatataagtccgacctcatcggcatgaagggaatcggctggctcgctcttaggagcccacagatggagagtgccaagaaagcgggagaactgatctctgagactaagtatcgcaagaagcctgactctattaagtttactaccgtggtggactctcccgatctcgtgcacgccaagaatagttacatgcattgtaacgagaggatgtacagatccggcgacgcagaaagcctgcatagatatactctcattcctgatcatccagatttcactcgggcacggctgaacgctctccatctgtctgacttcaggtataaagaggccttcctgagagacagaggactgcagattggctacagatccgttgacgatgatcctagaatgaagcactttctcaatgtcggccgtttacaatctgacaatgagtacaaaaaggacttcgctaagagtcgctcccaatttcactcctccactgatcaacctggtttgctgcaggctaaaaggagtcagcaattagcctccgacgtccattacagacaaccactgccacagcctacgtgcgaccctgagcagctgggccttcggcacgctcagaaagctcaccagctacaatcagacgtgaaatataagagtgacctcaaccttacccgtggggtggggtggaccccgccaggatcttataaggtcgaaatggcaagacgagccgcagagttggcgaacgccaggggtttaggtcttcagggcgcttacagaggtgctgaggcagtagaggctggggaccatcagtctggagaggtcaatccagacgctacggagatactacacgtcaagaagaaaaaggccctactcctgtag

SEQ ID NO: 232130 - DNA, 5217 bp, synthetic construct
  misc_feature 1..5217: note = Description of Artificial Sequence: Synthetic coding sequence
  source 1..5217: mol_type = other DNA
atgaacgttcagccttgctctcggtgtggctacggagtctaccctgccgagaaaatttcttgcatcgaccagatttggcataaggcatgttttcactgtgaagtgtgcaagatgatgctgtcagttaataactttgtgagccaccaaaagaagccttactgtcatgctcataaccccaaaaacaacactttcacctcagtctatcacacacctctgaacctgaatgtgagaacgttcccggaggcgataagcggcattcacgatcaggaggacggagagcagtgtaagtctgtgtttcattgggatatgaaatctaaagataaggaaggcgctccgaatcgacaaccactcgctaacgagagagcctactggaccggttacggggaggggaacgcatggtgccccggagctctgcctgacccggaaattgtccgtatggttgaagctcgcaagtcactgggggaagaatacactgaggattatgaacagccacgcggtaagggctcatttcctgccatgatcacgcctgcataccagcgagcaaaaaaagccaatcagctcgcttctcaggtggaatataaacgaggccacgacgagcggatctctagatttagtaccgtcgtcgataccccagagctgctgaggagcaaagctggcgcacagctgcagtccgatgtgagatacactgaggattatgaacagcagagaggtaagggctccttccctgccatgataacacctgcgtaccagatcgccaaacgcgcaaatgagctggctagtgacgtgagatatcaccagcagtatcagaaggaaatgcgcggaatggccggtcctgccattggtgctgagggaatcctcacacgcgagtgtgccgatcagtatggccaaggttatcccgaggaatacgaagagcacagaggaaaaggatctttccctgcaatgattacccccgcttatcagaacgctaagaaggctcatgagttagcctcagatatcaagtatcgccaagattttaataagatgaaaggtgccgcacattaccacagccttccagcacaggacaatcttgttcttaagcaagcacagtcagtcaataaactggtgagtgaggtggaatataagaaagacctcgagagctctcgtggtcatagtatcaactactgcgagaccccacagttcaggaatgtatccaagattagcaaatttacctccgacaataagtacaaggagaactaccagaatcacatgagagggagatatgagggcgttggcatggaccgtagaacattacacgccatgaaggtgggctcactagcctcaaatgtggcatacaaggctgactacaaacatgatatcgttgattataactacccagcaacccttaccccaagttatcagactgccatgaagttggtccccctgaaagacgcaaactatagacagtctatcgataagctcaaatacagtagtgtgaccgacaccccacaaatcgtccaggctaagataaacgcacagcagctgagtcatgtaaattatagagcagattatgagaagaacaaactgaactacacactgcctcaagatgtcccccagttggtgaaggctaagaccaacgccaaactgttctccgaggtgaaatacaaggagggttgggaaaaaaccaagggtaaaggcttcgagatgaagttagatgctatgtcactgctggctgcaaaagcatcaggagagttagcttcgaacgtgcatctgttattgtccctcaagattaaatataaagaagagtacgaaaaaacaaaaggcaaggcaatgggtaccgccgactctcggcttctgcacagcttgcaaatcgccaaaatgtcctccgaggtcgaatacaagaaggggtttgaagaatctaagacccgctttcacctccctatggatatggtcaacatcagacatgctaagaaagctcagacactggcctctgaccttgattacaggaagaaactccacgaatacacagtgctcccagaagatatgaagactcagtgggctaagaaggcatacggactgcagtctgaactccagtataaggccgatctcgcgtggatgaagggcgtaggatggcttacagagggatcacttaatctcgaacaggccaaaaaagcgggacagctcgtttctgaaaagaactataggcagcgggtggacgaactgaagtttacaagcgttaccgacagtagccaaatggagcacgccaagaaaagccaagagctccagagcggggttgcatataaggccggaaacgaacagtctgtgcaccagtacactatttccaaagacgaaccactttttcttcaagctcgtgccaacgctgccaatctctctgaaaagttgtataagagtagttgggaaaatcagaaagctaagggcttcgagctgagactggattcgctcactttcttggctgcgaaagccaaacgcgaccttgccagtgaggtcaaatataaagaggactacgagcggtctcgcggaaaactcatcggggcaaaagacgtacaaggggattctcagatgtctcacagcctgcagatgagtaagctgcaatcagagctcgaatacaaaaagggtttcgaagacacaaaatcacagtgtcacgtgagcctggacatggtccacctcgtgcatgctcggaaggctcagcatctcgctactgatgtaggctataaaactgcggagcaccactttacagccctgcctacagacatgaaggtggagtgggccaaaaaggcatacggactgcagagtgataatcagtatcgggcagacgtgaaatggatgaaaggcatgggctgggtggctactgggtccctgaacgtggagcaggccaagaaagccggagaactgatatctgaaaagaagtacaggcagcatcctgatgctctgaaattcacgtccattaaggatacaccagagatggtgcaggctcgaatatcatatactcaggcagtggacagattatatagggagcagggagagaacatcaagcaccactacactccaaccgctgatctcccagaagttctgctggccaagctgaatgctatgaacatatcagaaacccgttacaaggagtcctggagcaagcttcgggacggcggttacaagctaagactggatgcgctacccttccaggccgcaaaagcgagcggagagattatcagtgactacaaatacaaagaagcttttgaaaagatgaaggggcagatgctgggtagcaggtccctcgaggatgatattagtcttgcccattctgtctacgcaacctcactgcagtcagacgtgaattataaaaaaggcttcgaacattctaaagcacagttccacctacccctggacatggctgctttggttcatgccaaaaaggcccagaccctggcttctaaccaggactataagcaccctctacctcagtacacatccttggctgaggatctgagattaagctgcgcaaagaaggcccataaacttcaaagcgaaaacctttatcgctcagacctgaactttatgcggggagtcgcgtgtgtaatccccggtacgctcgaaattgagggaagaaaaaaggcatccgaactgattagtgaatccaagtacagacagcatcctcattccttcaaatacacagccgtgacagacactcctaacctgctccacgctaagttctcgaaccaaataacgaatgagcggttgtacaaagcagctggtgaagacgcaaggcatgagtacaccatgaccctcggcctgcccgaattcataagggcgaaaactaacgccgctaatttaagcgatgctcgctataaagagtcatggaggaacctccgggctcagggctataaattgacaattgaggccctaccttttcaggccgctagagcatctggggacatagcgtctgacttcctgtacagacacgacttcgtcaaggaaagaggtaaactaatcggtcctcagagtgtcagggacgacccgagaatacagcattgcagaagaatgggccagctgcaatctgagttacagtacaggcggggagctacatctagccaagctcaatttcacttgccaatggatatggtgcatttagtgcatgccaaaaacgcccaagcgttggcatcagatcacgattatagaacccagtatcacaaatttaccgctctcccagaagacttgaagatggcctgggcaaagaaagcccacgctttgcagtctgagctccgctacaagtccgacttgatcggcatgaagggcatcggctggctcgcacttcgaagtccgcaaatggaatcagcgaaaaaagccggagaacttatcagcgagacaaagtacagaaagaaacctgatagtataaaattcactacagttgtagactcgccagatctcgtacacgctaaaaacagctacatgcactgtaatgaacggatgtaccggtcaggggatgcagagtcattacacagatatacactcataccagatcatccagatttcaccagggctcggcttaatgcgctgcatctgtcagataaggtttaccgaaactcatgggagcaaacccgcgctggtagctacgatttcaggctggacgctatccccttccagaccgcacgagcgtctagagaaatcgcttctgacttccgatataaagaggcgtttctgagagacaggggactgcagattggctaccgctccgtggacgacgatcctcgaatgaaacacttcctcaatgtggggagactacaaagtgataatgaatataaaaaggatttcgctaagtccaggagccagtttcacagtagcacagaccagccagggcttcttcaggctaagcggagccaacagttggccagcgacgtgcactaccggcagccgctgccacagccaacttgcgatccagagcagctaggtttacggcatgctcagaaggcccatcagctgcaatctgatgtcaagtataaatccgacctgaatctcacacggggtgtaggttggacccctccagggtcctacaaagttgagatggcccgtagggctgccgagcttgctaatgcgcgtggcctgggactgcagggcgcttatcggggtgccgaagcagtcgaggccggagaccaccagtcaggggaggtgaacccggacgccacagagatactgcatgtgaagaaaaaaaaggcacttctgctgtag

SEQ ID NO: 232131 - DNA, 5111 bp, synthetic construct
  misc_feature 1..5111: note = Description of Artificial Sequence: Synthetic coding sequence
  source 1..5111: mol_type = other DNA
atgaatgtgcagccttgctccaggtgcgggtatggggtgtatccagccgagaaaataagctgtattgatcagatctggcacaaagcctgctttcattgcgaggtctgtaaaatgatgctgtcggtgaataactttgtgagtcatcaaaagaaaccctattgccacgcccacaatcccaagaacaacacctttacttccgtctaccacacccccctgaacctaaatgttcgaacattccctgaggcaattagcggcatacatgaccaagaagatggagagcagtgcaaatctgttttccactgggacatgaaatctaaagacaaggaaggcgctcctaaccgacagcccctggctaacgaaagagcttactggaccgggtatggtgaggggaacgcttggtgccctggggcacttcctgatcctgagattgttcgtatggtggaggctaggaaatcattaggggaagagtacaccgaggattatgagcagccacgcggaaagggcagcttccctgctatgattactcccgcatatcaaagagccaagaaagctaatcagctggcctctcaggtcgaatacaaacggggtcacgacgagcgcatcagccggttttccaccgtcgtggataccccagagctgctacggagcaaggctggcgcacagctccagagcgatgtgcgctacaccgaagactatgagcagcaacggggaaaagggagcttccctgcgatgattacccccgcttaccagattgccaaacgcgctaacgagctggcctccgacgtaagatatcaccaacagtaccaaaaggagatgcgcggtatggcaggaccagccattggtgctgagggaattctcaccagggaatgtgcggaccaatacggacagggatatcctgaagagtacgaggaacaccggggtaagggtagcttcccagccatgataacgcccgcttatcagaatgcgaagaaagcacacgaactggcctcagatatcaaataccgccaggattttaataagatgaagggcgctgcccattaccatagcctcccggctcaggataaccttgtccttaagcaggcccaatcggttaataagctggtgtcagagaacaagtacaaggagaactatcagaatcacatgcgcggacgttacgagggcgtgggaatggatcgcaggactctccatgccatgaaggtcggaagcctcgcatcaaacgtggcatataaagcagactacaagcatgatattgtcgattataactaccctgccacacttacccctagttaccagacagctatgaaattagtgcccttaaaggacgccaactaccgacagagcattgacaaactcaagtacagttcagtcacagacacacctcaaatcgtccaagccaagattaatgcccagcagctctctcatgtgaactaccgtgcagattacgagaaaaacaaactgaactacaccttgccacaggatgttcctcagctggtgaaggcgaaaaccaatgctaagctgttttccgaggttaagtataaagaggggtgggagaaaacaaaaggaaagggctttgagatgaaattggatgcaatgtctctactggccgctaaggctagtggagagctggcttctaacgtacacctccttttaagcttgaagataaagtacaaagaggaatacgaaaagactaaaggcaaagcaatgggcactgctgacagccgtttgctgcactctctccaaatagctaagatgtcttctgaagtggaatacaagaagggcttcgaggagtctaagaccaggttccatctgcctatggatatggtgaacatccgccacgccaaaaaagcacagacactggcatccgacttggattacaggaaaaaactgcatgagtacacagtgctgcctgaggacatgaagactcagtgggcaaagaaggcatacgggctgcagtctgagctgcagtacaaagccgacctggcttggatgaagggagtcggttggctgacggagggctccctcaacctggagcaagccaagaaagccggtcaactggtaagtgaaaaaaattacaggcaacgggtcgatgagttaaaattcaccagcgttacggacagctcacagatggagcacgctaaaaagagtcaggagctacagtccggagtcgcatataaggctggtaatgagcagtccgtgcatcagtatacaatctcaaaggacgaacccctgtttttgcaggcacgcgctaatgccgctaacttgtccgagaaactttacaaatcatcttgggaaaaccagaaagccaagggctttgaacttcggcttgattccctaaccttcctggccgctaaggccaaacgggatctggcttcagaggtaaaatataaagaggactatgaacgttccaggggcaagttgatcggagcgaaggatgtgcagggagacagtcagatgagccactccctgcagatgagcaagttgcagtcagaactggaatacaagaaggggtttgaggatacaaagagccagtgtcacgtgtcactcgacatggtgcatttggttcatgcccgaaaagcccagcacctggccaccgacgtaggctacaagacagccgagcatcactttactgctctgcctacagatatgaaagttgagtgggctaaaaaagcgtacgggctacagtctgacaatcagtaccgcgctgatgttaaatggatgaagggtatgggatgggtggccacaggctccctgaacgtggaacaagccaaaaaagcaggggagctcatttccgagaaaaaataccggcaacatccagatgcacttaagttcacatcaatcaaagacacccctgaaatggtgcaagcccgtatctcatacactcaggctgtcgatcgattatatcgcgagcagggagagaacataaaacatcactatactcccacagcggacctgccagaagtgctgctagctaagcttaatgccatgaatatttctgagactcgctacaaggagtcttggtccaaactgagggatggcggttataaactgaggctggacgctctcccctttcaagcagctaaggcctccggcgaaatcatctctgattataagtacaaggaagcttttgagaaaatgaaaggtcagatgcttggctctcgatccttagaggatgatatttcactggcacacagcgtctacgccacatccttgcagagcgatgtgaattataagaaagggttcgagcattctaaagcacaattccacctcccactagatatggcagctcttgtgcacgccaagaaggcccaaaccctcgcgtccaaccaggactacaaacaccccctgccccagtatacctccctggcagaggacttacgcctgagctgcgctaaaaaggcacacaaactccaatccgagaacctgtatagatccgatctgaattttatgcgcggtgtggcttgtgtgatccccggaacactcgagattgaaggaagaaagaaagcctccgagctgatttccgagagcaagtatcggcagcatcctcattctttcaaatatactgccgtaacggatacccccaatctgttgcacgcaaagttttctaaccagatcacaaatgagcgactgtacaaggctgcgggagaggacgcaagacatgagtacactatgactctggggcttcctgaatttatcagagcgaagacaaacgccgctaacctgtccgatgcccgttacaaggaaagttggaggaacttgcgcgctcaggggtacaagcttacaattgaggccctgccattccaggccgcaagagccagtggggacatcgcctctgactttctgtataggcacgacttcgtgaaggaaaggggcaagctgattggtccccaatcagtcagggatgaccctagaatccaacattgcagacgtatgggccaactgcagtccgaactgcagtaccggcgaggggctacttcttctcaggcacaattccacctccccatggacatggtgcatctggtgcatgctaagaatgctcaggccctggccagcgatcacgattatcgcacacagtatcacaagttcacggcgctgcctgaggacttgaagatggcctgggccaagaaggcccacgcactgcagtccgagctgcgatacaaatcggatctaattggaatgaaaggaatcggctggcttgccctccgtagtcctcagatggaatccgccaaaaaagccggtgaactaatatcagaaaccaagtaccggaaaaagccagactccatcaagtttacaacagtggtggacagcccagacctcgttcacgccaaaaactcgtatatgcattgcaatgagaggatgtacaggagcggtgatgcagagagccttcatcgatacacactgattcctgatcaccctgacttcacacgcgctcgcttgaatgcactgcacctgtccgacaaggtgtacagaaactcttgggagcagacgagagctgggtcttatgactttagacttgatgcaatcccctttcagacagcccgagcatccagagagatcgctagcgattttcggtacaaggaggcattccttagagatagaggattgcagatcggttatcggagtgttgatgatgacccccgtatgaagcatttcttgaatgtcggccgtctgcagtccgacaatgaatataagaaagactttgccaaatccagatctcagtttcatagctctaccgatcagccagggctgctgcaggctaagagatcccagcagctggcatctgatgtccactacaggcagcccttgccgcagcccacctgtgatccagaacaactgggattgcgccatgcccagaaggcccatcagctgcaatcagacgtgaaatacaaatcagatctgaatctcactcgaggcgtgggctggaccccccctgggagttacaaggtggagatggctagacgggcagctgaactggctaatgcacgcggtcttgggctccagggcgcataccgaggagcagaggcagtcgaggctggcgatcatcagtccggcgaagtgaatccggatgcgacagaaatcttgcacgtcaaaaaaaagaaagctctgctactcta

SEQ ID NO: 232132 - DNA, 828 bp, synthetic construct
  misc_feature 1..828: note = Description of Artificial Sequence: Synthetic coding sequence
  source 1..828: mol_type = other DNA
atggctactgaactcgagtacgaatcagttttgtgcgtcaaaccagacgtgagtgtgtacagaattccaccaagggcaagcaatcggggttacagagccagtgactggaaactggatcagccagactggacagggaggcttcggataacctctaagggtaaaacagcctatatcaagttggaggacaaagtctcaggcgagttgtttgcccaggctcctgttgagcagtaccccggaatagccgtagaaacagtcactgatagtagtcggtacttcgtaattaggatccaggacggcactgggagatctgcattcattgggatcgggtttaccgaccggggtgatgcctttgattttaacgtgtctctgcaggatcatttcaagtgggttaaacaggaatctgaaatctccaaagagtctcaagagatggacgctaggcctaagctcgacctcggatttaaggaggggcagactataaagctgtgtatagggaatatcacaaacaaaaaaggcggtgccagcaagccgagaactgcgagaggcggtggacttagtctactccctcctccacccggaggaaaggttactatcccgccaccctcttccagtgtggcaataagtaatcacgtaacaccgcctcccatcccaaagtccaatcacggaggaagcgacgccgacatcttgctcgatctagatagtcctgccccagtgaccacacccgctccaacacctgtgtccgtcagtaatgacttgtggggcgacttttctactgcctcgtcatctgtgcccaaccaggccccacagccatctaattgggtacagttctag

SEQ ID NO: 232133 - DNA, 402 bp, synthetic construct
  misc_feature 1..402: note = Description of Artificial Sequence: Synthetic coding sequence
  source 1..402: mol_type = other DNA
atggacgcacggccaaagctggatctgggtttcaaagagggacagactattaagctctgcatcgggaatataaccaataagaaaggaggcgctagcaagccccgtactgcgagaggcggaggactatccctcctgccccctccacccggaggaaaagtcaccatccctccacccagctcttccgtggccatttctaaccatgtgaccccgcctcccatccccaagtcaaaccacgggggatccgacgctgatatcctgctggacttagacagccccgctccagtgactactccggcaccaacaccggtttccgtctctaatgacctgtggggcgatttctcaactgcatcctcaagtgttccgaaccaggcgccacagcccagcaattgggttcagttctag

SEQ ID NO: 232134 - DNA, 828 bp, synthetic construct
  misc_feature 1..828: note = Description of Artificial Sequence: Synthetic coding sequence
  source 1..828: mol_type = other DNA
atggcaaccgagctggagtacgagagtgtcctttgtgtcaaaccggacgttagcgtatacaggatccctcccagagcatctaaccgaggctacagagcatcagattggaagcttgatcaacctgactggacaggccgtctacgcattactagcaaagggaagaccgcgtacatcaagctggaagataaagtgagcggcgaactcttcgcccaggcccctgtggagcagtatcctggtattgccgtggagaccgttactgatagctctcgctatttcgtcattcggattcaggatggcacaggcaggtctgcatttataggaatcggcttcactgacaggggagatgcgttcgactttaatgtatccttacaggaccactttaaatgggtcaagcaggaaagtgagattagtaaagagtcccaagagatggacgccagacctaagctggacttgggattcaaagaagggcagacaataaagctgtgtattggaaacatcacgaacaagaaagggggagcctctaagccgagaaccgcacgtgggggtggtctttcccttctcccacccccacccggtgggaaagtgaccattcctccccctagctcctcagtggcgatcagtaaccatgtcacaccacctcctatcccgaagtcaaatcatggcggaagtgatgccgatatcctccttgatttagattcgccagcgcctgttacgacaccagcccctacacccgtctctgtgagcaacgacctttggggcgacttcagcactgcctcatcctcagttcctaatcaggcacctcagccctccaattgggtacagttctag

SEQ ID NO: 232135 - DNA, 558 bp, synthetic construct
  misc_feature 1..558: note = Description of Artificial Sequence: Synthetic coding sequence
  source 1..558: mol_type = other DNA
atggaagaatctggctacgagtctgtcctctgtgtgaaacccgatgtgcatgtttacagaataccaccgcgagctaccaatcgcggttacagagcagccgaatggcaactggatcaaccttcttggtctggtagattaaggatcacagcgaagggacagatggcctacattaaactggaggatcggacaagtggcgaactgtttgctcaagctcctgttgatcagtttcccggtacagcagtagagagcgtgaccgatagcagtcgatacttcgtcatacggatagaggatgggaatggtcgacgcgcattcatcggtatcgggttcggggaccgtggtgatgcatttgatttcaacgtcgccttacaggaccactttaagtgggtgaagcagcagtgcgaatttgcaaaacaagcccagaaccctgaccagggacctaagctggatctcggattcaaggaaggacagacgattaaattgaacatcgctgtaggtctgggcaacatcaaccggagatgttcctgcaccctggcaacagcacagtcctgccattgttag

SEQ ID NO: 232136 - DNA, 792 bp, synthetic construct
  misc_feature 1..792: note = Description of Artificial Sequence: Synthetic coding sequence
  source 1..792: mol_type = other DNA
atggaagagtcaggctacgaatccgtcctgtgcgttaagccagatgtccacgtatatagaatccctcccagagcaactaatcgcggataccgggctgcggagtggcagctagaccagccttcttggagtgggaggctgcggattactgccaaaggacagatggcgtatataaagcttgaagatcggacctctggcgagctctttgcccaggctcccgtcgaccagtttccgggaaccgcagtggagtccgttacggacagctcacggtatttcgtcataagaatagaagacggaaatgggaggcgagcatttatcggcattgggttcggagaccggggagacgcgttcgacttcaatgtagcactgcaggaccactttaaatgggttaagcagcagtgcgagtttgcaaagcaagcgcagaatcctgaccaggggcctaaactggacttagggttcaaagagggtcagaccatcaaacttaatatcgctaacatgaagaaaaaagagggggctgccggaaaccctagagtccgccctgcctccacaggaggcttaagtctgctgcccccaccaccgggagggaaaacaagcacgctcattcccccacctggcgagcaactagcggtgggaggaagcttggtgcagcccgctgttgccccttcgtctgggggtgctccagtgccctggccccagcccaatcccgcaacagcggacatttggggagacttcactaagtccaccggcagcactagcagccaaactcaaccagggaccggatgggtacagttttag

SEQ ID NO: 232137 - DNA, 792 bp, synthetic construct
  misc_feature 1..792: note = Description of Artificial Sequence: Synthetic coding sequence
  source 1..792: mol_type = other DNA
atggaggagtcggggtacgagagcgtcctgtgtgtgaagccggacgtgcatgtctatcgcatccctcctagggccaccaatcggggttaccgggctgccgagtggcagctcgaccaacctagctggagcggcagattgagaatcaccgccaaaggccagatggcctatattaaattagaagatcgaacatccggagagctatttgctcaggcaccagtggaccagtttcctggcacggccgtagagagcgtcaccgatagctcccggtacttcgtgatccgaatagaggatggaaatggaagaagagcattcatcggcataggcttcggggaccgaggcgatgctttcgactttaatgtagccctgcaggatcacttcaaatgggtcaagcaacagtgcgagtttgctaagcaggcccagaaccctgatcagggtcctaaactggacctcggcttcaaagagggccagaccataaagttaaatatcgccaacatgaaaaaaaaagaaggagctgccggaaaccctcgggtgcgccctgcttctacaggcggtctgtcactgcttccccctcctcccggtggcaagacctcgacgctgatccctcctcccggagaacagcttgcagtgggaggtagcctcgtgcagcctgccgtggcccctagttcaggaggcgctccagttccttggccccagcctaacccagccaccgctgatatatggggagacttcacaaagagcacggggtctacgagttctcaaacccagcccggaacaggctgggtccaattttag

SEQ ID NO: 232138 - DNA, 822 bp, synthetic construct
  misc_feature 1..822: note = Description of Artificial Sequence: Synthetic coding sequence
  source 1..822: mol_type = other DNA
atggaggaatccggctacgaatcagttctgtgcgtgaagcctgacgtgcacgtctaccgtattcccccaagagctaccaatcgcggataccgtgctgccgaatggcaactggatcaaccatcatggtcaggccgactccgcataacagccaaggggcaaatggcctatatcaagcttgaggacaggaccagcggcgaattgttcgcccaggctccagtcgatcagttccctggtaccgcagtggagtcagtgacagactcatcgcgttacttcgtgattagaatcgaggatggcaatgggcgtcgtgccttcatcgggattggattcggcgatagaggagacgctttcgatttcaacgtggctctgcaggaccatttcaagtgggtgaaacagcagtgcgagtttgccaaacaggctcagaaccccgatcagggacccaagttggacctgggatttaaagagggtcagactattaaattgaacattgccaatatgaaaaagaaagagggggctgctgggaatccccgtgtgcggccagctagtaccggcggtctcagcctcctgccgcctcctccaggcggaaagacctcaactcttattccccctcccggagagcagcttgcagtgggcggatccctggttcagcctgctgtggcaccttctagtgaccaactcccggcacggccaagccaggcacaggccggatcgagttccgacttaagcactgttttccctcatgtaacctctggaaaggccctgccccacttggggcagcgaaaggaggatgaggccctgctatcctggcccgtctttggggcatag

SEQ ID NO: 232139 - DNA, 714 bp, synthetic construct
  misc_feature 1..714: note = Description of Artificial Sequence: Synthetic coding sequence
  source 1..714: mol_type = other DNA
atggaggagtctggtgccgctgaatggcaactggatcagccgtcatggtctgggaggcttaggatcaccgccaagggccagatggcatacataaagctggaggatcgaacctccggtgaactattcgcccaagctccggtcgaccaattccctggaacggccgtggagtctgtgaccgactctagcagatattttgtgattagaatcgaggatggcaatggcaggcgggcttttatcgggattggctttggcgatagaggggacgccttcgatttcaatgtggcactccaggaccacttcaaatgggtaaaacaacagtgtgagttcgccaaacaagctcaaaatcccgaccaggggccaaagctggatctcgggttcaaagagggccagacaatcaagcttaacatcgcgaatatgaaaaaaaaggagggagccgctgggaacccgcgtgtgagacctgcttcaaccgggggattgtcccttctgccaccgccacccggaggaaagacctctaccttaattccgcctcctggagaacagttagccgtaggcggatccttggtgcagccagccgtggccccttccagcgggggagctcccgttccttggccccaaccaaatccagctaccgctgatatatggggggacttcacgaaatccactggctcaacgagtagccagacccagccaggcacagggtgggtccagttctag

SEQ ID NO: 232140 - DNA, 792 bp, synthetic construct
  misc_feature 1..792: note = Description of Artificial Sequence: Synthetic coding sequence
  source 1..792: mol_type = other DNA
atggaggagtctggctatgaatcagtgctgtgtgtgaaaccagatgtccacgtgtatcgaataccccctcgggcaacaaaccgaggctaccgggctgcggagtggcagctcgatcagccaagctggtccggcaggcttcgtatcacggctaagggccaaatggcatacattaagctagaggacaggacatccggcgagctgttcgcccaggcaccagtggaccagttccccggaaccgccgtagagagtgtgaccgattcctctcgctactttgtcatcagaatcgaagacgggaacggcaggagggcttttatcgggattggcttcggagacagaggagacgctttcgactttaacgtggccctacaggaccactttaaatgggttaagcagcagtgtgaattcgctaaacaagctcagaatcccgatcaggggccaaagttggatctgggttttaaagaaggccagacaatcaagttgaacattgctaacatgaaaaagaaagagggggctgccggtaatcccagggtcagaccagcgtcaacaggcggtcttagcctgctgccccctccacccggtggcaagactagcacactgataccacctcccggtgagcagctggcagtgggcggtagtcttgtccagcctgctgtggcacccagtagcggtggagcgccagtgccatggccacaacccaatcccgctaccgctgatatctggggcgactttacaaaatcaaccggctcgacctcctctcagacccagccgggaacggggtgggtccagttttag

SEQ ID NO: 232141 - DNA, 966 bp, synthetic construct
  misc_feature 1..966: note = Description of Artificial Sequence: Synthetic coding sequence
  source 1..966: mol_type = other DNA
atgtccgaacaatcaaaagatctgtccgaccctaatttcgccgctgaagcaccaaattcagaagtccactctagccccggagtgagtgaaggggtccccccaagcgccacattggccgagccgcaatcgccccctctgggcccaacggcagcaccacaggccgcacccccaccccaggcgcctaacgatgagggtgaccctaaagcactacagcaggctgctgaggaaggcagagcccatcaagccccttctgcagcccagccaggtccggcaccacccgcaccagcccaattggttcaaaaggcacacgaactaatgtggtacgtgcttgtgaaagatcagaagaagatgataatttggttccctgatatggtgaaggatgtcatcggctcgtacaaaaaatggtgcagatccatcttaaggcgcaccagtctgatcctagctagggtgttcgggctgcatctccggctgacctcgttgcataccatggaattcgctctggtgaaggcccttgagccagaggaactggaccgggtggctctgtctaatcggatgccaatgacagggcttctcctcatgatccttagccttatctacgtgaaaggacggggagcaagggagtccgctgtgtggaacgtactgagaattttaggactccgaccttggaaaaaacacagcacgttcggagacgtaagaaaactgatcaccgaggaatttgtccagatgaattacctcaagtaccaacgcgtcccctatgtggagccacccgaatacgaattcttttggggctccagagccagccgcgagatcacaaaaatgcagataatggagttcctggccagagtgttcaagaaagacccccaagcttggccctctcgctatcgagaggctctggaggaggcacgggcactgagggaggcgaaccctaccgcccattatcccagaagctcggtgagcgaagattag

SEQ ID NO: 232142 - DNA, 915 bp, synthetic construct
  misc_feature 1..915: note = Description of Artificial Sequence: Synthetic coding sequence
  source 1..915: mol_type = other DNA
atgctgcagaaaccacgaaatcggggaaggagcggaggtcaggccgagagagatcgggattggagccacagcggaaacccaggggcatccagagccggagaggatgcccgagtcttacgagatggctttgccgaggaagccccttctacttcgcgtggaccagggggaagccaaggcagccagggtccatcaccccagggcgcaaggcgggcacaagccgcaccagctgtgggaccaagatcccaaaagcagctggagctgaaggtgtctgaacttgtgcagtttctgctgattaaagatcagaagaagattcctatcaagagagccgatatcctgaaacacgttatcggcgattataaagacatcttcccagatttgttcaagcgcgctgcggaacggctccaatacgtgttcggctataagttggtagaactagagccaaaatcgaatacctacatcctcataaatacgctggaacctgttgaggaagatgcagaaatgagaggcgatcagggcacacctaccacagggctgctgatgattgtgctcggccttatttttatgaaggggaacactataaaggagactgaagcgtgggactttttacggagactgggtgtctatcccactaaaaagcacctaatctttggcgatcctaaaaaactgataacggaggactttgtcagacagcgttatttagagtacaggcggatacctcatactgatccggttgattacgaatttcagtgggggcctaggacaaaccttgagacttccaagatgaaagtgttgaagttcgtggccaaggtccacaatcaagatcccaaagattggccagctcagtactgcgaggctctggccgacgaagaaaatcgggcacgcccacagccatcaggacccgctccatcctcctag

SEQ ID NO: 232143 - DNA, 666 bp, synthetic construct
  misc_feature 1..666: note = Description of Artificial Sequence: Synthetic coding sequence
  source 1..666: mol_type = other DNA
atggctttggccctagccgctctggcagctgtggagcctgcctgcggatcaagatatcaacagcttcaaaatgaggaagagtctggcgagccagaacaggctgccggtgatgctccgcctccgtactcgagtatcagtgccgagagtgctgcatattttgattataaggacgagagcggatttccaaagcctcccagttacaacgtggccacaactctgccctcatatgatgaagccgagcggactaaggccgaggccacgatccctctggtccctggacgggacgaagatttcgtaggcagagacgactttgacgacgcggaccagttacgtatcggaaacgacggtatctttatgctgaccttttttatggcttttctgtttaactggattggattcttcctgtctttttgcttgacaacttccgctgccggaagatacggcgctattagcggctttggcctttcattgatcaagtggattttaattgtgaggttctcgacctacttcccaggatactttgacggccagtactggctatggtgggtcttcctggtcctgggttttctgctctttctcaggggtttcatcaattacgcgaaggtgaggaagatgcccgagacattttcaaacctgccacggacccgagtactgtttatatactag

SEQ ID NO: 232144 - DNA, 462 bp, synthetic construct
  misc_feature 1..462: note = Description of Artificial Sequence: Synthetic coding sequence
  source 1..462: mol_type = other DNA
atggccctggcccttgccgctctcgccgctgttgagccggcatgtggatccaggtatcagcagctgcagaacgaagaggaaagtggtgagcctgaacaagctgccggagacgcaccccctccctactcgagcatttccgccgagtcagcggcttactttgactacaaggacgagtcaggttttccaaagccaccaagttataacgtcgcaacaactctgccatcatgcttttacgacatatcacatctgatctttttcatcttctacctgagaaatatgaaaaaaaagtacaccaagatggtgaagctcctgcataagagcgcccctgcgcaatctgatagctgcaagtgtccatttatttgctgcgtctgtatcagccgcatatccatagggtcgagatccggctaccagtatatcatgcacaggagcgtggggtgcctgaaggccaagcaagaaaactag

SEQ ID NO: 232145 - DNA, 3138 bp, synthetic construct
  misc_feature 1..3138: note = Description of Artificial Sequence: Synthetic coding sequence
  source 1..3138: mol_type = other DNA
atgcatcagaaaacgcctgaaatttattcagttgagctttctggcacaaaggacatcgtgaaaacggataagggagacgggaaagagaaatacagagggttgaagaacaattgtctggaactgaagaaaaaaaaccacaaagaagaatttcagaaggaactgcacttagatgaccacaagctgagtaatcgcgagctagaagaaaagtacggtactgatataattatgggactcagcagcacccgcgctgctgagctgctggcacgggacggcccaaattcactcactccccctaaacagacccctgaaatcgtaaagtttttaaagcagatggtggggggtttctcgatcctactttgggtcggggcttttctatgttggatagcctacgggatacaatactctagtgacaaatcggccagtctgaataatgtttacctcggctgcgtgttagggctcgtcgtcatcctaacaggcatatttgcttactatcaagaagcaaaatccaccaacattatgtcatctttcaacaagatgataccacagcaagccctcgtaatcagggatagcgagaagaagacaattcccagcgagcagttagtagtgggggatattgtggaagttaaggggggagaccagatcccagctgatatccgcgtcctctcatcacagggctgtagagtggataacagcagcctcactggagaatctgagccccaacctaggtcttcagaattcacacacgaaaatcctctggaaacaaaaaacatctgcttctacagtaccacttgcctggaagctagtacttctcctgttggaactgtaaccgggatggtgattaatacaggggacagaactataatcggacatatcgcttcgcttgcaagtggtgtggggaatgagaagacccccattgcaatcgaaattgagcacttcgtccatatcgtagccggtgtggctgtgtccatcggcattctcttcttcatcatagccgtgagtctgaagtatcaagtgctagattcaatcatcttccttataggaattattgtggccaatgtgcccgaaggtctgctggccacagtgactgtgaccctcagcctcactgcaaaacggatggccaagaagaactgcctcgtgaaaaacctggaggcagtggaaaccctcgggagcaccagcattatctgcagcgacaaaacaggcacattgacgcagaaccgaatgaccgtggcgcacctctggttcgacaaccagatcttcgtggctgacacgagcgaagaccattccaaccaggtgttcgatcagagttctcgcacatgggcgagtctctctaaaatcattacactctgtaatagggccgagtttaaacccggacaggagaacgtgccaatcatgaagaaagccgttattggcgatgcctccgagacagctttgctaaaattcagtgaagtaattctcggcgatgtgatggaaattcggaagagaaaccgcaaggtggctgagattcccttcaattccacaaacaagttccagctttccattcacgaaatggatgatcctcatggcaagagatttctcatggtcatgaaaggggcacctgaaagaattttagaaaaatgctcaactatcatgatcaacggggaggaacatcccctagataagagcaccgccaagacattccatacagcttatatggaactgggcggattgggtgaacgcgtattggggttttgtcacctgtacctgcccgcagatgaatttcccgagacgtacagcttcgatattgatgccatgaatttccctacatccaatctttgctttgtgggactgctctctatgatcgatccccctcgtagcactgtgcccgatgctgtgactaagtgccggtccgcaggcataaaggtgattatggtaactggcgaccaccctataaccgccaaagctatagctaagtccgtggggattatcagcgccaacagcgagaccgtggaagatatcgcccatcggctgaatatagcagttgaacaggtcaacaagcgggacgccaaggccgcagtggtgaccggcatggagttgaaggatatgtcaagtgagcagctcgacgagatcctggctaattatcaggagatcgtctttgcgaggacttctccccaacagaaattgatcatcgtggaggggtgtcagcgccaagatgcggtggtggctgttaccggagacggggtaaacgactcacctgctttgaaaaaagccgacatagggatagccatgggtatcgctgggtcagatgctgcaaaaaacgctgccgatatggtactcttggacgataatttcgcgtccattgttactggagtagaagaagggcgactcatcttcgacaacttgaagaagaccatcgcttactcactgactaaaaatattgcggagctgtgcccctttctgatctacattatagtgggcctccctcttcctataggaacaatcactatcctttttatcgatttgggtactgatataattccttccatcgccctggcctatgaaaaagcggagtcagatattatgaatcgaaaaccaaggcataagaataaagatcggcttgttaatcagcccctggctgtctactcttacttacacataggcctcatgcaggccctaggcgcattcctagtttattttactgtatatgcgcaggagggttttctccctagaacattgatcaacctgcgtgtggagtgggagaaggattacgtgaatgatctgaaggatagttatggacaagaatggaccagataccaacgcgaataccttgagtggacagggtacaccgcattcttcgtaggtatcttggtccagcaaatcgcagacttgatcataaggaagacaagaaggaacagcatattccagcagggtctctttcggaataaggtcatctgggtgggcatcacgagccagattatcattggcctcatcctgtcttacggcttaggctctgtgacagccctctcctttacaatgctgagagcacagtactggtttgtggccgtcccacacgctatcttaatttgggtctacgacgaggttcgcaagttatttattcggctctatccgggatcttggtgggacaagaacatgtactattag

SEQ ID NO: 232146 - DNA, 1605 bp, synthetic construct
  misc_feature 1..1605: note = Description of Artificial Sequence: Synthetic coding sequence
  source 1..1605: mol_type = other DNA
atggcacagcttgggaagctcctcaaagagcagaagtatgatagacagcttcgcctctggggtgaccatggacaggaagctctggagtctgcccatgtctgccttatcaacgccacagccacaggaaccgaaatcctcaagaacctggtcctccctggcatcggcagtttcactataattgatggaaaccaggtcagcggagaggatgctggcaataacttcttccttcaacggagctccatagggaaaaaccgggcagaagccgcaatggagttcttacaggaactcaatagcgacgtctctgggagctttgtggaggaaagtccagagaatctgttggacaatgatcctagctttttttgccggttcactgtggtggtcgctacacagctgcccgagtcgactagcctgcggctcgccgatgtgctgtggaactctcagatcccactgctgatatgccgcacctacggactggtgggatacatgaggatcatcatcaaggagcacccagtcattgaaagtcacccggataatgccctcgaagatctccgccttgacaagcctttcccagaattgagagagcactttcagtcctatgatctagaccacatggaaaagaaagaccactcccatactccatggatcgtgatcatcgccaagtatctggctcaatggtattcagagactaatggacgtatccctaaaacctacaaagaaaaagaagacttccgggatttaatcagacaaggcatcctgaagaacgagaatggtgcacccgaagacgaggaaaactttgaagaagcaattaaaaacgtcaataccgcacttaatactacccagatcccttcatccatcgaggatatcttcaacgatgaccgctgcattaacattactaagcagaccccatctttttggatcctggccagggcacttaaggaatttgtggccaaggagggccaggggaatctgcctgttcgcggaacaatccccgacatgatcgccgacagtggcaagtacattaagctgcagaacgtgtatagagaaaaagcaaagaaggatgcggcagcagtcggaaaccatgtggctaaactgctccagtccatcggccaggccccagaaagcatctccgaaaaagagttgaagcttctatgcagtaacagcgctttcctcagggtggtgagatgcaggagcttggctgaggagtatggcttggacacgatcaacaaggatgagattatatcttctatggataatcccgataacgaaatagtgctgtatctcatgctgcgggctgtcgatagatttcacaagcagcagggtaggtacccaggagtatcaaactaccaggtggaagaagacatcgggaagctgaagagttgcctgactggctttttacaagaatacgggttatctgtcatggtgaaggatgattatgtgcatgagttctgtagatacggcgcagcagagccccacactatagctgcgtttctgggcggagccgctgctcaagaagtgattaaaatcattacaaagcagttcgttatctttaacaacacttatatttacagtggcatgtcgcaaacatccgccactttccaactgtag

SEQ ID NO: 232147 - DNA, 1587 bp, synthetic construct
  misc_feature 1..1587: note = Description of Artificial Sequence: Synthetic coding sequence
  source 1..1587: mol_type = other DNA
atggatgctcagcagactaagactaatgaggctaggctgtggggtgatcacggtcaggaggcattagaaagcgcccatgtgtgtctgattaatgcaactgccacgggaacggagatactgaaaaacctggttttgccagggatcggatcattcacaattatcgatggcaaccaggtatctggggaagatgccggaaacaatttctttctgcagaggagctccattggaaagaacagagcagaggccgctatggagtttctccaggaactgaattccgacgtttccggcagttttgtagaggaaagccccgagaacctgcttgataatgaccccagctttttctgccgattcacggtcgtggtggctacgcaacttcctgagagtacatctctaagattagcagacgtcctttggaactcccagataccactcctcatctgccgcacctacggactcgttggatacatgcggatcatcatcaaggagcaccccgtaattgaaagccatcctgacaacgcccttgaggatctgcggctagataagccatttccggagctcagggaacacttccaaagctatgacttagaccatatggagaaaaaggaccactcccataccccatggatagtgattatcgccaagtacctggctcaatggtatagcgagaccaatggacgcattccaaagacatataaagaaaaggaagatttccgcgacctgatccgccagggcatattgaagaacgagaacggggctccagaggacgaagagaatttcgaggaggccatcaaaaacgtgaatactgcattgaatactacccaaatcccttcctccattgaggacatcttcaatgacgaccgttgtattaacatcactaagcagactcccagcttctggatcctcgctcgggcattgaaggaattcgtggcgaaagaagggcagggaaacctgccagtgaggggaactataccagatatgattgccgactccggcaaatacatcaagctgcaaaatgtgtaccgcgagaaagccaagaaggatgcggctgccgtcggcaaccacgtcgccaaactgctgcaatctattggccaagcccctgaaagcattagcgaaaaggaactgaaacttctctgctccaacagcgctttcctcagagtcgtgagatgccggtcacttgcagaggagtacggattagatacaatcaataaggatgagataatcagtagtatggacaaccccgacaacgagattgtgttatatcttatgttgcgggctgtagatcgcttccacaaacagcagggtaggtaccctggcgtaagcaactatcaggtggaagaggacatcggcaagttaaagtcttgtctgactggatttcttcaggagtacggactttctgttatggtcaaagatgattatgtccacgagttctgcaggtacggagccgcagagcctcatacgattgcggctttcttgggcggagctgcagcccaggaagtgatcaaaattattaccaagcaatttgtgatttttaataatacctacatttattcaggcatgtctcagacaagcgccacattccagctttag

SEQ ID NO: 232148 - DNA, 1338 bp, synthetic construct
  misc_feature 1..1338: note = Description of Artificial Sequence: Synthetic coding sequence
  source 1..1338: mol_type = other DNA
atggagttcctccaagagctcaattcagacgtgagcgggtcttttgtcgaggaatctccagaaaatctcctcgacaatgatcctagcttcttctgtcgcttcacagttgtggtggccacgcagctgcccgagtccacttctctacgcttggctgacgtgctctggaattcccaaatcccacttctgatttgccggacatacggactggtgggatatatgcggattatcatcaaggaacaccctgtgatcgagtcacatccagataatgcattggaggacctgcggctggacaagccattcccagaactgagagaacatttccagagctatgatcttgatcacatggagaaaaaagaccacagtcataccccatggatcgtcatcatagccaagtatttagcccaatggtactccgagaccaacgggaggatccctaaaacttataaagaaaaagaggattttagagatctgatccgccaggggattctcaagaatgagaatggagccccagaggacgaggagaactttgaagaggctattaagaatgttaatacagccctgaataccacacagatacccagtagcatcgaagatatatttaatgatgaccgatgcattaatattacaaagcagactccgagtttctggatcctcgcgagggccctgaaggagttcgtcgccaaggaaggacaagggaacctacctgtgcggggaactatccccgacatgatcgccgacagcgggaagtacattaagttacagaatgtctaccgcgaaaaagccaaaaaggacgcggcagcagtcggcaaccacgtggctaagctgctacagtccatcggccaggcacctgagtcaataagcgagaaggagttgaagctgctgtgcagtaacagcgcgttcctcagagtggtcaggtgtaggagcttggccgaggaatacggactggatacgataaacaaggatgagattatttcatccatggacaatccagataacgaaatagtgctatacctgatgctccgggctgtcgacagattccacaagcaacagggacgatatcccggagtttctaattaccaggtcgaagaggatatagggaagctcaagagctgtctgacgggattcctccaggagtatggtctctctgtgatggtgaaggacgactatgtccatgaattttgtcggtacggagccgcagagcctcatacaatagctgcatttttaggcggagctgccgcacaggaggtaataaagatcatcaccaagcaattcgtgatcttcaacaatacctatatctacagcggcatgtctcagacgtctgccaccttccaattatag

SEQ ID NO: 232149 - DNA, 2901 bp, synthetic construct
  misc_feature 1..2901: note = Description of Artificial Sequence: Synthetic coding sequence
  source 1..2901: mol_type = other DNA
atggaaccgcaggttaccctcaacgtgacttttaaaaatgaaatccaaagtttcttggttagtgacccagagaatacaacttgggctgatatcgaggccatggtgaaagtctcctttgatctcaataccatccagattaaatacctcgatgaggagaatgaagaggtcagtattaattcccagggcgagtacgaagaagccctcaaaatggctgtgaagcaaggaaatcagctgcaaatgcaggtgcacgaaggccatcacgtggttgatgaagcgccaccaccagtggtgggggcaaagagactggcggctcgtgcgggaaagaagccactagctcactattcctcactggtgcgcgtgctgggctcagatatgaagactcccgaagaccccgctgttcagtccttcccacttgtgccttgtgatacagatcaaccacaagataagcctcctgactggtttacttcatacctggaaactttccgggaacaggtcgtaaacgagactgtggaaaaactcgaacagaaactgcacgagaagctggtgctgcaaaatccctccctgggtagctgtccttcggaggtctcgatgccaacctcggaggagaccttgtttttgccagagaatcaattctcttggcacatcgcatgtaataattgccagagacggattgtgggcgtccgctaccagtgcagtttgtgcccttcttacaacatctgcgaagattgcgaggcagggccttacggtcatgatactaatcacgtgcttctgaagcttcgcagacccgtcgtaggtagctcagagcccttttgccacagcaaatactcgactccacgcctccctgcagccttggagcaggttcgcctgcagaaacaggtggacaagaatttcctgaaagcagagaaacagagactgcgcgcagaaaagaagcagaggaaggccgaagtaaaggaactgaaaaagcagctcaagctgcaccggaaaatccacctctggaattcaatacacggtctgcagagccccaaaagcccactcggcaggccagaatccctgctgcagtccaataccttaatgctgccccttcagccctgtacaagcgttatgccaatgttgagcgccgcttttgtggacgagaacttacccgacggaacgcatctgcagccaggcaccaagttcatcaagcactggcggatgaagaatacaggcaatgtgaaatggtccgcggacacaaaactaaaattcatgtggggcaatttgacactggccagtacggagaagaaagacgtgctggtcccgtgcctgaaagccggtcatgttggggtcgtctctgtcgaattcatcgctcctgctttggaaggcacttacacatcccactggagattgtcccacaaaggccagcagttcggaccaagggtgtggtgtagcataatcgtcgacccatttccatctgaagagagccccgacaacatcgaaaagggaatgatatccagtagcaaaactgatgatctgacttgtcagcaggaagagacatttctacttgccaaagaagaacggcagcttggcgaagtcaccgaacaaactgagggcacagctgcctgtattcctcagaaggctaagaatgtggctagcgaacgcgaattatacataccatctgttgatttgctaaccgcgcaggacctgctgtcgttcgagcttctcgatatcaacatcgtacaggaactggagcgggtgcctcacaacacacccgttgatgtgacaccttgcatgtcaccactaccgcatgattcacccctcattgagaagccaggattgggccaaatcgaggaggaaaacgagggggctggattcaaggctctgccagacagcatggtgagcgttaagcggaaggctgagaacattgcttccgtcgaggaggcggaggaggatctctccggcacccagttcgtatgtgaaactgtgatccggtcgctgaccttggacgccgctcctgaccataatccgccttgtcgacagaagagtctgcagatgacctttgcgttacctgaagggcctctgggcaatgagaaggaagagattatacacattgcagaggaggaggctgtcatggaggaagaagaagacgaggaagacgaggaggaagaggatgagcttaaagatgaagtgcagtcccagagctctgcctcatccgaagactacataatcattctccccgagtgtttcgacacaagtcggccactgggggattccatgtatagttctgccctgtcccagcctgggcttgagaggggggctgaaggaaaaccaggagtggaggccggtcaagagcccgctgaggcaggggaacgcctcccaggcggtgagaatcaaccgcaagagcacagtatttcagatatcctgaccactagccaaacactcgagacggttccgcttattcccgaagtcgtcgaactaccacccagtctcccaagatctagcccctgcgtccaccaccacggaagtcccggagtcgacctcccagtcaccatccccgaagtgtccagcgtaccagatcagattcgcggagagccgagaggatcctcaggactggtcaatagtagacagaagagctatgatcattcacgtcatcatcacggctcatctatagcaggaggtctcgttaaaggggcacttagtgtagcggcaagcgcttacaaggccttgttcgctggcccacccgtgactgcgcagcccattatttcggaggatcagacagccgctctgatggcacacttatttgaaatgggcttctgcgatcgccagctgaacttgcggcttttgaaaaaacataactacaatatcctgcaggtagtgacagaactgcttcaacttaataacaatgattggtatagtcaacggtattag

SEQ ID NO: 232150 - DNA, 2814 bp, synthetic construct
  misc_feature 1..2814: note = Description of Artificial Sequence: Synthetic coding sequence
  source 1..2814: mol_type = other DNA
atggaaccccaagtcaccctgaatgtcacttttaaaaatgagattcaatcatttcttgtatcagatccggagaacacgacatgggccgacatcgaagcaatggtgaaagtctcctttgatttgaacaccatccaaataaaatacctggatgaggaaaacgaagaagtaaagatagtactgctgggagaatatgaggaggcactcaagatggccgtgaagcagggcaaccagctccagatgcaggtgcacgagggtcaccacgtggtggatgaggcaccaccacctgtggtgggcgcaaaaaggttagcagcccgagccggtaagaagccattagcccattatagtagtctggtccgggttttgggatctgatatgaaaacaccggaggaccccgcagtccagagtttccctctggtaccttgcgacacagaccagccacaagataagcccccagactggtttacatcctaccttgagactttcagggaacaggtggtcaatgagacggttgaaaaactggagcagaagctgcacgagaagctcgtcttacagaacccaagcctcggcagttgtccgtccgaagtgagtatgccgacttccgaggaaactctgttcctgcccgagaatcagttctcttggcacattgcatgcaacaactgccagcggagaattgttggcgttcgctatcagtgcagtctctgtccgtcatacaatatttgcgaggattgtgaggcagggccatacggacacgacactaatcatgtcctgctgaagctgcgtagaccggtcgtcggctcctcggagcctttctgccacagcaagtatagcacacctcgtctacctgcagctctggaacaagtcaggcttcagaaacaggtggacaaaaatttcctaaaggcagagaagcagcgcctgagagcagaaaagaaacaaaggaaggcagaggtcaaagagctaaagaagcaactgaaactgcaccgcaaaatccacctctggaattcaatccatggattacagtctccaaagagtccactgggacgaccggagtctctattgcaatccaataccctgatgttgccattgcagccgtgtacatccgtaatgcccatgctaagcgctgccttcgtcgacgagaacctgcctgatggaacccacctccagcctgggacaaaatttatcaaacattggcgtatgaagaacacaggaaatgtgaagtggtccgctgacaccaagctgaagtttatgtggggcaatcttactcttgccagcaccgagaagaaagatgtactggtcccatgcttgaaagcaggccacgtgggcgtcgtcagcgttgaatttattgctcctgccttagaaggcacttataccagtcattggcggctttctcacaaaggacagcaattcggcccacgagtgtggtgctctatcattgttgacccttttccaagtgaagaatctccagataatattgaaaaggggatgataagctccagcaaaactgatgatctcacttgccagcaggaagagactttcctcttggctaaagaggagcgacagctgggcgaggtgacagaacaaaccgaaggcactgctgcctgcattccacaaaaagcaaagaacgtagctagcgagagggagctatatattccaagtgtggacctcctgacggctcaggacttattgtcgtttgaactgttggatatcaatattgtgcaggaactcgagcgagtccctcataatacgcctgtcgacgtcaccccttgcatgtccccccttcctcacgactcacccctgatcgagaagccgggattgggccaaatagaggaagaaaacgagggagccggttttaaggccctgccggattcaatggtgtccgtaaagaggaaagctgaaaatatagcttctgtcgaggaagctgaggaagatctatccgggactcagttcgtatgtgaaaccgttattaggagtctgaccctggatgccgcaccagatcacaacccaccctgtcgccaaaagtcactgcaaatgacgttcgcattgcccgagggccctctggggaacgagaaggaagagattattcatatcgctgaagaagaagccgttatggaggaggaggaagatgaggaagatgaggaggaggaggacgagcttaaggatgaggttcaaagccagtcctccgcatccagcgaagactacatcattatcctgccagagtgttttgatacatcgcgaccactgggcgattctatgtacagcagcgcactgtcacagcccggactggagaggggggctgaaggcaagcctggcgtggaagctggacaggagccagcggaagccggagagcgtctgcccggaggggagaatcagccccaagaacacagcattagcgatatactgactacatctcaaacgctggaaacagtgcctcttattcctgaagtggttgaactgcccccttccctcccacgatcttccccgtgtgtccatcaccatgggtcaccaggtgttgacctcccagtgactatccccgaggttagttccgttccggatcagattcgcggagaacctcgcggatctagtggattagtcaattctcgacaaaaatcgtatgatcactctcgtcaccatcatggcagcagtattgctggcggactggttaagggggctttatccgtagcagcctcggcatataaagctttgtttgcgggtcctcctgtgaccgcccagggactttggggtctgttgtcattcctccacctagccaagaagtgcttctttttaaaggccccaagcgaagcttttagttggttctag

SEQ ID NO: 232151 - DNA, 2901 bp, synthetic construct
  misc_feature 1..2901: note = Description of Artificial Sequence: Synthetic coding sequence
  source 1..2901: mol_type = other DNA
atggaaccccaagttacattaaatgtaacttttaagaatgaaatccagagcttcctcgtgtctgaccctgagaacacaacttgggcagatattgaggcaatggtcaaggtgtcgtttgaccttaatacaatccagatcaaatatttggatgaagagaacgaggaggttaagattgtgttgcttggagaatatgaggaggcccttaaaatggccgttaagcagggaaatcagctccagatgcaggttcacgaaggccatcatgtcgtagatgaggcgcctccaccggttgtgggcgctaagcggctggccgcaagagcgggaaagaaacccctggctcattatagcagcctcgtcagagtgttgggaagcgacatgaaaacaccagaagaccccgctgtacagagcttccccctagttccgtgcgataccgatcagccccaggataaaccacccgattggttcacttcctatcttgaaaccttccgggagcaggtggtgaatgaaactgtggagaagttggagcagaagttgcatgaaaagctcgtccttcagaacccctctttaggatcttgtccttctgaagtctccatgcccacgagtgaagagaccctgttcctccccgaaaaccagtttagctggcacatcgcatgtaacaattgccagcgcaggatcgtgggagtgcgctatcaatgctccttatgtcccagctacaacatttgcgaagactgcgaggcagggccatacggacacgatacaaatcacgttctgctgaagcttcgaaggccggtagtcggatcctctgaacctttttgtcatagcaaatacagtactcctcgcctcccagcagcccttgaacaggtccgcttgcagaaacaagtagacaaaaatttcctcaaggctgagaagcaacgactgcgggctgagaagaagcagagaaaggccgaggttaaggaactcaagaagcagctaaaattgcaccgcaagattcacctgtggaacagcattcacggtctgcagtctccaaagtctccactggggcgtccagagtcactgctccaaagcaacacactgatgctcccgttacagccttgcacatccgttatgcctatgttgtcggccgcttttgtggatgagaatttgcctgacgggacccatcttcagccaggcacaaaattcatcaaacattggagaatgaaaaatacaggtaacgtgaagtggagcgccgatacaaaactaaaatttatgtggggaaatctgactcttgcctccacggagaaaaaggacgtactggtgccatgccttaaagcaggacacgtcggagtggtaagcgtcgagttcattgccccagccctggaaggaacttacaccagccactggcgtctaagccacaaaggacagcagtttggacctagagtctggtgttcaattatcgttgacccttttcccagtgaggaatcacccgataacatcgagaagggaatgatctcatcatctaaaaccgacgacctgacctgccagcaggaggaaacttttctgctagctaaagaagagcggcagctgggcgaggtaacagagcagactgagggtaccgccgcatgtattcctcaaaaggcaaaaaatgtggctagcgagcgcgagctgtacatacccagtgtcgacttactaacagcacaggacttgctgtccttcgaacttctggacattaatatagtacaagaacttgagagggtgcctcacaatacccctgttgatgtgacgccctgtatgtctccactgccccacgatagcccattgatcgagaaaccaggactggggcagattgaggaagagaacgaaggcgctggattcaaggctttgcctgattccatggtgtctgtgaagcggaaggccgagaatatcgcctctgtggaggaggccgaggaggacctctcggggacacagtttgtctgcgagacagttatccgctccctaactctggacgctgcccctgatcacaaccccccatgtagacagaagtccctgcaaatgactttcgcgctgccagaggggccactggggaatgagaaggaggagatcatccacatcgctgaagaggaggccgtcatggaagaagaggaggacgaggaggacgaagaagaagaagatgagctcaaggacgaggtacagtcgcaatcctccgcatcttcagaggattacatcatcatactgcctgaatgcttcgacacttctagaccgctgggtgattctatgtatagttccgccctgagtcagcctgggttagaacgaggcgcagaggggaagccaggcgtggaggctggacaggagccagcggaagcaggggagcggctgcccggtggcgaaaatcagcctcaggagcatagcatcagcgacatcttgactacatcccagaccctagagactgtcccgctgatcccagaagtggtggagctccctccgagcctccctcgctcttccccctgtgtacatcatcacgggtctccaggggttgacctccccgtgacgatcccagaagtgagctcagtccccgatcaaattaggggcgaacctagaggcagctctggcctggtcaactcgagacagaagtcctacgaccattctcggcatcaccacggctcaagtatcgccggtggcctggtcaaaggtgccctgtctgtcgccgcaagcgcatataaagccctgttcgcaggcccacccgtcactgctcagcccatcatctccgaggaccaaactgccgctctaatggctcaccttttcgagatggggttctgcgatcgccagctgaacttacggctgctaaaaaagcataactataacattctgcaggtggtgacggaactcctccaactgaataataatgattggtatagccaacgctactag

SEQ ID NO: 232152 - DNA, 2901 bp, synthetic construct
  misc_feature 1..2901: note = Description of Artificial Sequence: Synthetic coding sequence
  source 1..2901: mol_type = other DNA
atggaacctcaggttactctcaacgttactttcaaaaatgaaattcaaagctttctggtctctgatcctgagaacacgacttgggctgacatcgaagctatggtaaaagtttctttcgatcttaacacaatccagattaaatatctggacgaagaaaatgaagaagttagcattaattctcagggcgagtacgaagaggccctaaaaatggccgtaaaacaaggtaaccaactgcagatgcaggtccacgaagggcatcacgttgtcgatgaggcaccgcctcctgtcgtaggcgcaaagaggctggccgctcgagccggaaagaagcccctcgcacactactcaagtctggtcagagtcttaggatctgatatgaaaacccccgaggacccagccgtgcagagcttccccctggtcccatgcgatacagaccaaccacaggacaagccacctgattggttcacctcttatttagaaacattcagagaacaagttgtgaatgaaacagtcgagaaactcgaacagaagttgcacgagaagttggtgctgcagaatccctcattaggtagctgtccttccgaagtttccatgcctacatcagaagagacgctcttcctgccagagaaccagttcagctggcatattgcctgcaataattgtcagcggaggattgtaggggtcagataccagtgttcactgtgcccctcatacaatatttgcgaggactgtgaggcgggaccctatggacacgatactaatcacgtgttgctaaagctgcggaggcccgtggtcgggtcttcagaacctttttgtcattcaaaatacagcacacctagattgccagccgctctcgagcaagtccgcttacaaaaacaagttgacaagaactttcttaaagccgagaaacagaggctgagggccgagaagaagcaacgaaaagccgaagtcaaagaattgaaaaagcagttgaagcttcatcgaaagatacatctgtggaactctatccacggtctgcagtctcccaaaagcccgttggggaggcctgaaagcctgttgcaatcaaatacattgatgctgcctttacagccatgcacctctgttatgcccatgttaagtgcagcctttgttgacgagaacctacctgatggaacacacctgcagcctggcaccaaatttatcaagcactggcggatgaaaaataccggcaacgtgaaatggagcgcagatacgaagctcaagtttatgtggggcaacctcacactggcgtcgacagaaaaaaaggacgtgctggtcccctgtcttaaagcgggtcacgtgggggtggtgagtgtggagtttatcgcgccagctctggaaggcacttacacaagccattggagactctctcacaagggccaacagtttggcccacgggtgtggtgtagtataatcgtcgatcctttcccctccgaggaatcaccagataacatcgagaagggcatgatcagctctagcaagacggatgatcttacctgccagcaagaagagacttttctgctggccaaagaagagaggcagctcggtgaagttaccgaacaaaccgagggaaccgctgcatgcatcccccagaaggcaaaaaatgtggccagtgagagagaactttatatccccagtgtggacttactgactgctcaggacttactgagtttcgagctactggacatcaacatcgtccaagagcttgagcgggtgccacacaacacccctgttgatgtgacaccctgcatgtccccactcccccacgattctccgcttatagagaagcctgggctgggacagattgaggaggaaaatgaaggcgctggctttaaggccctccccgattctatggtgtccgttaaaaggaaggccgaaaacatcgccagtgtcgaggaggccgaggaggatttaagcggtactcagttcgtgtgtgaaacggtcattagatcacttactcttgatgctgcaccagatcacaacccaccatgtcgacagaagagcctccagatgaccttcgccctacctgaaggtccccttggaaacgagaaagaggagatcatacatatcgcagaggaggaggccgtgatggaggaggaggaggatgaggaggatgaggaggaggaggatgagctgaaagatgaagttcagagtcagtcttctgcctcgtccgaagactatatcataatactaccagagtgcttcgacacctcacgacccctcggggattcgatgtacagcagtgccctgagccagcccggtctggagcggggagctgaaggaaagcctggtgtcgaagccggtcaggaaccagccgaagcaggggaacgtctgcctggtggtgaaaatcagccccaggagcactctatcagcgatatactcacaacttcccagacattagaaaccgttcccctaatcccagaagtggttgagttacccccaagtctcccaaggagtagcccctgcgtgcaccatcacggaagtcccggtgtagatctgcctgtgacgatccccgaggtatcttcagtgcctgatcagattagaggggaaccaagggggagcagtggtctggtgaacagtcgccaaaagtcctatgaccatagccgccaccaccacggaagcagcatcgccggtggtctagtgaagggggctctttctgtggccgcatctgcttataaggccctgttcgctggccctcccgtgactgcacaaccgattatttctgaagaccagacggctgccttgatggctcacttgttcgaaatgggtttctgcgaccgccagctgaatctgagactgttaaagaagcacaattacaacatcctgcaggtcgtcactgaattattgcagctcaacaataatgactggtattcacaaagatactag

SEQ ID NO: 232153 - DNA, 654 bp, synthetic construct
  misc_feature 1..654: note = Description of Artificial Sequence: Synthetic coding sequence
  source 1..654: mol_type = other DNA
atgtatagttcagcactatcccagcctgggctggagcgcggtgcggaaggaaagcctggtgtcgaagctggacaggaaccagccgaggctggcgaacgtctccctggcggagagaatcagcctcaggagcattcaatttctgacattctcactacctcacagaccctagaaaccgttcccctcatcccagaggtcgtggagttgccgccatccctgcctcgcagcagtccttgtgttcaccaccatggctctcctggggtggacctcccagtaaccatcccggaggtgtcttctgtgccggaccagataagaggagaaccacgtggctctagtggccttgtcaactcaaggcagaagagctatgaccactctagacatcaccatggatcaagcatcgccggaggcctggtcaagggtgcgctgtctgtggccgctagtgcgtacaaagcattgttcgccggaccgcctgtcacagcacagccaataatcagcgaggaccagacagcagccctgatggctcacctgttcgaaatgggattttgtgataggcagcttaacttgagattgctcaaaaagcacaactacaatattcttcaagttgttaccgaactgctgcagctgaacaataacgactggtatagtcagagatactag

SEQ ID NO: 232154 - DNA, 2514 bp, synthetic construct
  misc_feature 1..2514: note = Description of Artificial Sequence: Synthetic coding sequence
  source 1..2514: mol_type = other DNA
atggagccccaggtgaccttgaacgtcacctttaagaatgaaatccagtcgttcctggtgtctgacccagaaaacacgacctgggcggacatagaagctatggtgtccataaattcccaaggcgaatacgaagaggctcttaagatggcggtcaaacagggaaaccagctgcagatgcaagtgcacgaagggcatcatgtggttgatgaagctcctccccctgtggtgggggctaaaagactagcagccagggctggtaagaagcccctggcccactacagcagtctcgtaagggtcctgggcagtgatatgaaaacccctgaggatccagctgtgcaaagtttccctcttgttccctgtgacactgatcagccccaggacaaaccccctgactggtttacttcgtacttagagacatttcgggagcaggtggtgaacgagaccgtggagaaactggaacagaagttgcacgaaaaactcgtgttgcagaatccctctcttggttcatgcccgtcagaggtcagcatgcccacgtctgaagagaccctctttttgcctgagaaccagttctcatggcacattgcatgcaacaactgccagaggaggattgtcggagttcgctaccaatgctccctgtgcccgtcttataatatctgcgaagactgtgaagccggaccgtacggccatgacaccaatcatgttcttcttaagcttcgaagacccgtggttggctcctctgaacctttctgccacagcaaatactcgactcctcgactgccggcagctcttgaacaggtgagactgcagaagcaggtggacaaaaattttctgaaagctgaaaaacagagacttagggcggaaaaaaaacaacgcaaggctgaagtcaaagaactgaagaaacagctgaagttacatagaaaaatccacctgtggaactctatacatggactacagtcgccaaaatcacctctcggaagacctgaatccctgctgcagtccaacactctgatgctgccactgcagccctgtacttctgttatgccaatgctctcagctgccttcgtggatgagaacctgcctgacggcacccatctgcagccaggtaccaagttcattaagcattggcggatgaagaacacaggcaatgtgaaatggagtgccgataccaaactgaagtttatgtggggcaacttgacactggcgtcaacagaaaaaaaagatgttcttgtgccctgtctgaaggctggccatgttggcgtcgtaagtgtagagttcatcgctcctgcacttgaaggaacgtacacatcacactggcggctgagccacaaggggcagcagtttgggcctcgtgtctggtgttccatcatcgttgacccctttccctcagaagaatctcctgacaacattgaaaaggggatgatctcttcatccaagaccgacgacttaacttgccagcaggaggaaacattcttactggccaaagaggagcggcagttgggcgaagtaactgagcagactgaggggaccgcagcctgcattcctcagaaggctaaaaacgtcgcgtcagagcgcgagctttacatcccctccgttgatctccttacggcccaagatctgctcagcttcgaactcctcgatatcaatatagttcaggaactggagagggtaccacacaacaccccggttgacgtaacaccctgtatgtccccattaccccacgacagtcccctgattgaaaagcccggtctcgggcagattgaagaggaaaacgagggcgctggcttcaaggcactccctgactctatggtctctgtcaagagaaaagcagagaacatcgcgagtgtggaggaagccgaggaggacttgagcgggacacaattcgtctgtgaaaccgtgattcggtccctgacattagacgctgcccctgaccacaatcctccctgcaggcagaagtctctgcaaatgaccttcgccctgcccgagggtcccctcggcaacgaaaaggaagagattatccacatcgctgaggaagaggccgtaatggaagaagaggaggatgaagaagatgaagaagaagaagatgagttgaaggatgaagtccagtcccagagctccgcaagttctgaggattacataataatcttgcctgagtgtttcgacacctctagacccctgggcgatagcatgtacagtagtgcgctctcacagcccggactcgaacgtggagccgagggcaaaccaggagtagaggcaggtcaggagccagcagaggccggagaacgccttccgggtggagagaatcaaccccaggagcactccattagtgacatcctcacaacatcccagacactcgaaaccgtccctctgatacccgaagtcgttgaactccctcctagcctgccaaggtcttccccttgcgttcaccatcacgggtctccaggcgttgatctgccggtgactataccagaggtcagctctgtccctgaccagatccggggagcgaataatttctag

SEQ ID NO: 232155 - DNA, 2262 bp, synthetic construct
  misc_feature 1..2262: note = Description of Artificial Sequence: Synthetic coding sequence
  source 1..2262: mol_type = other DNA
atgcccatggacctcattttggtggtttggttttgcgtctgcacagccagaactgtcgtgggatttggtatggaccccgatctccagatggatatcgtgaccgaactggatttagtcaacacaactttaggcgtcgcacaggtaagtggaatgcacaatgccagtaaggcgtttctgttccaggacatagagcgtgaaatccacgccgcacctcatgtctctgagaaactaattcagctgttcagaaataagtccgaattcacaatactcgccaccgtacaacagaagccgtctacttccggggtgatcttgtctatcagagagctggagcacaggatctacgaacgcgtgatagatccaccagatacaaacctgccacccggaatcaatttgtggctgggacaacgcaaccaaaaacacggtctgttcaagggtatcatccaagacggaaagatcatcttcatgccgaatggatacattacacaatgtcccaacctaaaccatacatgtcccacttgttctgatttcctgagtttggtgcagggcataatggacctgcaggaattactggccaaaatgactgccaaacttaactatgcggaaacccggctgtcccagctcgagaactgccactgtgagaagacatgccaggtctcggggctactttaccgtgatcaggatagctgggtcgatggcgatcattgccgtaattgcacctgcaaatccggtgccgtggagtgtcgcaggatgagttgtccccctctcaattgcagtccagatagtctccccgtgcacatcgccggtcagtgttgcaaggtgtgcaggccgaagtgtatatatggcggaaaagtgctggcagaaggacagcggatcctgactaaaagctgccgtgagtgtcgtgggggagtgctggttaaaattaccgagatgtgccctccgcttaactgtagcgagaaggaccatattttacctgagaatcagtgctgcagagtgtgcaggggccataacttctgcgccgaaggacccaagtgtggcgaaaattctgagtgcaagaattggaatacgaaagcaacttgcgagtgcaagtcaggatatatctccgtgcaaggggactctgcgtactgcgaagacatagacgagtgcgctgcaaagatgcattactgtcacgccaatacagtgtgcgttaacctgcccggtttgtacagatgtgactgcgtacctggctatatccgcgtggatgacttttcctgcactgaacacgatgagtgtgggagcgggcagcataactgcgatgagaacgcaatttgtacaaacacggtgcaaggacatagttgtacatgtaagccgggatatgtgggaaacggtacaatttgccgagctttctgcgaagagggctgccgctatggaggaacttgcgtagcgcctaacaaatgtgtgtgtccatccgggtttaccggtagccattgcgagaaagacatagacgaatgttcggaagggattatcgagtgtcataaccattcaagatgtgtcaatcttccaggctggtaccattgcgagtgccggtccggatttcacgatgacgggacttacagtctgtccggtgaatcgtgtatagatatagatgagtgcgcactcaggacccacacatgctggaatgactctgcatgtatcaatctcgcaggcggattcgattgcctgtgcccttctggccctagctgcagcggggattgtcctcatgagggaggtcttaaacacaatggacaggtgtggaccctcaaagaagatcggtgttcggtctgcagctgcaaagatggtaagattttttgccggaggacggcctgtgattgtcagaatcccagtgccgacttgttctgctgtccagaatgcgacaccagagttacatcacaatgtttggaccagaacggtcataagctgtatcgaagtggtgataactggactcattcctgtcagcagtgcaggtgcctggagggagaggtcgattgttggcccctgacttgtccaaatttatcttgtgagtacacagccatcttggagggggagtgttgtcctagatgcgtgtcagacccctgcctggccgataacatcacctacgacatcaggaagacatgcctcgattcttacggggtctctcgcctgtccggatctgtgtggacaatggccggatccccctgcaccacctgcaaatgcaaaaatggcagagtgtgctgttcagtggacttcgaatgccttcagaacaactag

SEQ ID NO: 232156 - DNA, 2433 bp, synthetic construct
  misc_feature 1..2433: note = Description of Artificial Sequence: Synthetic coding sequence
  source 1..2433: mol_type = other DNA
atgcccatggaccttatactcgttgtctggttctgtgtttgtacagccaggacagtggtcggcttcggcatggatccggatcttcagatggatattgtgaccgagttagatctcgtaaacacaaccctgggagtggcccaggtatcaggcatgcacaatgcttctaaggcctttctctttcaggacattgagcgagagatccatgccgcaccacatgtttccgaaaagttgatacagttgtttcgtaacaagtccgaatttacaatcctggccacagtccaacaaaaacccagcacctcaggagtcatcctgagcatacgcgagctggagcattcatatttcgagctagagagctccgggctgcgcgacgaaatcagatatcattacatccacaacggcaagcccagaaccgaggccctgccttacagaatggccgatggacagtggcataaggtcgctttgtcagtatccgcctcgcatcttctgctgcacgtggactgtaataggatctacgaaagagtgatcgatccgcctgatacaaacctcccccctggcatcaacctgtggctggggcagcgaaaccagaaacatggattattcaagggcattattcaggacgggaagattatctttatgcctaacggttacattactcagtgccctaacctcaatcacacgtgtcctacttgtagtgactttctgtccctcgtgcagggtatcatggacctacaagaattactggcgaagatgaccgctaaactgaactacgccgagacgagactctcccagctcgaaaattgtcactgtgagaaaacctgccaagtgtccggacttctgtaccgcgatcaagattcctgggtggacggtgatcactgtcgcaattgcacctgtaagtccggagctgtagaatgtagacggatgtcctgtccaccccttaattgtagcccggacagcttgcctgttcacatcgccggacagtgttgcaaagtgtgtcgaccgaaatgcatctacggcggtaaggtactcgccgagggtcagcgcattctgacgaagagttgtagggagtgtagaggcggtgtgctggtaaaaatcactgaaatgtgcccacccctgaactgctccgaaaaggaccacatacttcctgaaaatcagtgttgtcgcgtgtgtaggggacataatttctgcgctgagggaccgaagtgtggcgaaaactcggaatgcaagaactggaacaccaaagctacttgcgaatgtaagtcaggttatatctccgtacaaggtgactcggcgtactgcgaggacatcgatgagtgtgcggctaagatgcactactgccacgctaacacagtgtgtgttaatctgccagggctttacagatgtgattgcgtcccaggttatataagagtggatgatttttcttgtacagaacatgacgagtgcggctctggtcagcacaactgtgacgaaaacgctatttgcaccaatactgtgcaagggcactcttgcacatgtaaacctggctatgtcggtaacgggacaatttgccgggcattttgcgaagagggttgtcgctacggaggaacgtgcgtagcccctaacaaatgcgtatgcccaagtggatttactggttcccactgtgagaaggacatcgacgaatgtagtgagggcataatagaatgtcataatcactctagatgcgtgaatctcccagggtggtatcattgtgaatgcagatccggatttcatgacgacgggacgtattcgcttagtggcgagtcttgtatcgacattgatgagtgtgcattgcgcacacacacctgctggaacgactctgcatgtatcaaccttgctggcggttttgattgcctatgtcctagcggcccttcatgttcaggcgactgcccccatgaagggggactgaagcataacggccaagtgtggacactgaaggaggacagatgtagcgtgtgttcctgcaaggatggcaaaatcttctgtaggcgcacagcctgtgattgccagaacccatcagcggatctgttttgctgccccgaatgtgacacacgggtgactagccagtgtctcgatcaaaacggtcacaaactgtaccgttctggtgacaactggacacattcatgccagcaatgccgttgtttggaaggggaggtggactgctggcccctgacatgccccaacctgagctgcgaatacactgctatcctcgagggggagtgctgtccacgctgcgtttcggatccatgtcttgctgataatattacatatgacattcgtaagacttgtctggacagctatggggtgtctcggctgagtggctctgtatggaccatggccggatctccctgcaccacatgtaaatgcaagaacggaagggtttgctgcagcgtcgacttcgaatgcctgcaaaataactag

SEQ ID NO: 232157 - DNA, 2292 bp, synthetic construct
  misc_feature 1..2292: note = Description of Artificial Sequence: Synthetic coding sequence
  source 1..2292: mol_type = other DNA
atgccgatggacttgatcctggtcgtgtggttctgcgtttgtacggcccgtaccgtagtcggcttcgggatggacccagaccttcagatggacatcgtgacggaacttgatctggtgaacacaaccctgggagtagctcaagtgagcggaatgcacaatgcatcgaaagcctttctgtttcaggatatcgaacgcgaaatccacgcagcccctcatgtatccgaaaagttaatccagctgttccggaataagtctgagttcacaatcctcgctaccgtgcagcagaagccctccacctccggagtgatcctgagcatacgcgaactagaacactcttactttgaattggaaagcagtggactgcgcgacgaaatccggtatcactatattcacaatggtaaaccacgtactgaggccctaccgtaccggatggccgacggccagtggcacaaagttgcccttagtgtctcggccagccaccttctcctgcacgtggattgcaataggatctacgaacgagtaatagatcccccagacaccaacttaccccctgggatcaacttgtggctggggcagcggaaccaaaaacatggcctgtttaaggggataattcaggacggtaaaataattttcatgccgaatggctatatcacccagtgtccaaatctgaatcatacgtgcccaacttgctctgacttccttagccttgttcagggcattatggacctgcaggagctgctggccaagatgaccgcaaaactgaactatgccgagactaggctttcccagctcgaaaactgccattgtgagaaaacatgtcaggtgagcggccttctttaccgggatcaggattcatgggtggacggagatcactgcaggaattgtacgtgtaaaagcggcgctgttgaatgtaggcggatgtcctgcccaccactgaattgttcccctgattccttgcccgtgcacattgctgggcaatgctgtaaggtttgtagacccaagtgcatctacggaggcaaagtactggctgaaggtcagagaattctcaccaagagttgcagggaatgccgtgggggtgtgttggtgaagattacagagatgtgtccccctctcaattgctcagagaaggatcatattctcccagagaatcagtgttgccgggtctgcagggggcataatttctgtgctgaaggccctaaatgcggtgaaaattctgagtgtaaaaactggaataccaaggccacctgcgaatgcaagagcgggtatatttccgtgcaaggagattcagcttactgcgaggacatcgacgaatgcgccgctaagatgcactattgccacgccaacacagtttgtgtgaatctcccgggactttaccgttgtgactgcgttcctggctacatccgcgttgacgattttagctgcacagaacacgatgaatgtgggtctggacaacacaattgtgacgagaacgctatctgcacaaatactgtccagggacattcgtgtacctgcaagcctggctatgtgggaaacgggaccatctgccgcgctttttgtgaggaagggtgccggtatgggggaacttgcgtggctccaaataaatgtgtctgccccagtggatttaccgggtctcattgcgaaaaagatatcgatgaatgtgccctgcggacccatacgtgctggaatgacagcgcgtgcattaacctcgccggaggttttgactgtctgtgtcccagtggcccttcttgctcaggcgattgcccacatgaagggggacttaaacataacggacaggtatggacgctgaaagaagataggtgctctgtgtgttcctgcaaggatgggaagatcttctgtaggagaacagcctgtgactgccagaaccccagcgccgacctgttttgttgccccgaatgcgacacacgtgtgaccagtcagtgcctggaccagaacgggcataagctgtatagatctggtgataactggactcattcctgccagcaatgccgctgtcttgagggggaagtagattgttggccgctcacatgtcctaatttgtcttgcgaatatacagcaatcttggagggagaatgctgcccacggtgcgtgtctgacccttgcctcgccgacaacattacatacgacatccggaagacgtgtcttgattcttacggcgtgtcacggctgagcggctcagtgtggacaatggcaggtagcccctgcacaacgtgtaagtgtaagaacggccgagtgtgctgttccgtggacttcgagtgcttgcagaataactag

SEQ ID NO: 232158 - DNA, 2520 bp, synthetic construct
  misc_feature 1..2520: note = Description of Artificial Sequence: Synthetic coding sequence
  source 1..2520: mol_type = other DNA
atgtcaattagaaggctattaatcctgatcttgaaaatcgggcgacgatggaccgagttaattcgtaccatggaaagccgcgtgcttctgcgaactttctgcctgatctttggtctgggggcagtctgggggttaggggtggatccatccctacaaatcgacgtgctcactgaattagaactcggggagtcaaccacaggtgtgcgacaggtgccgggtctgcacaacgggaccaaagccttcctgttccaggacacacccagatcgatcaaggccagtaccgccacagccgagcaatttttccaaaagctcaggaataaacatgagttcacaatcttggtaacactgaagcaaactcatctcaactcaggggtaattctctcgattcaccatctcgatcaccgctacctagaattggagtctagcggacataggaatgaggtcaggctccactatcggagcggtagccatcgcccacacacagaggtatttccatacattttagctgacgacaaatggcacaagctaagcttagccataagcgcaagccacttaatcctgcacatcgattgtaacaaaatttatgagcgggtggtggaaaagccaagtacagatctacctctgggcacaacattctggttgggtcaaagaaacaacgcccacggatatttcaagggaatcatgcaggatgtccagctgctggtgatgccacaagggttcatcgctcagtgtcccgatctgaataggacctgccccacctgcaacgatttccatgggttagttcagaagatcatggaactgcaggatattttggcgaagactagtgccaagttgagccgggcagagcagcgcatgaatcggcttgaccagtgctattgcgaaaggacatgcacaatgaagggcacaacttatagagagtttgaatcttggatcgatggctgtaaaaattgtacatgcctaaacgggaccattcagtgcgagacactaatttgtccaaaccccgactgtccactgaaatctgctctcgcctatgtggacgggaagtgctgcaaagagtgcaaatctatctgtcagttccaggggagaacatattttgaaggagaacgtaatactgtctatagctcatcaggtgtctgcgttctgtacgaatgtaaggaccagacgatgaaattggtggagtcatccggctgtcccgcacttgactgtccagaatcacaccaaataacccttagccactcctgttgtaaagtttgcaagggctacgacttctgttccgaaaggcacaattgtatggaaaattcgatctgtcggaatctgaacgacagagccgtctgctcttgcagggatgggttccgggctttaagagaagataatgcctactgcgaggacatcgacgagtgcgcagagggaaggcactattgccgtgaaaataccatgtgcgttaataccccgggatcctttatgtgcatctgcaagactggctacattcgaatcgatgattactcctgcacggagcacgatgagtgtattactaatcaacacaactgtgacgaaaatgcgctttgttttaatactgtggggggtcataactgcgtatgcaagccgggatatacaggcaatggcaccacctgtaaggctttttgtaaggacggctgtcgtaacggtggcgcatgtatcgcagcaaacgtctgcgcctgtcctcaaggatttacaggcccaagttgcgaaactgatattgatgaatgttcagatgggttcgtgcagtgcgatagtagagctaactgtattaatctccctggatggtatcattgtgagtgcagagatggctatcacgataacggcatgttctccccaagcggcgagagttgtgaagatatagatgagtgcggaaccggccgacacagttgcgccaatgatactatctgtttcaacctggatggcggatatgactgcagatgcccccatggtaaaaattgcaccggggactgcatccatgatggcaaggtgaaacacaatggtcagatttgggttctggaaaatgacaggtgcagtgtgtgctcctgccaaaacgggttcgtgatgtgcaggaggatggtttgcgattgtgagaatccaaccgtagacttgttttgttgtcccgagtgcgacccgaggctgagctcacagtgtttgcatcagaatggtgagacgctatacaattcaggcgacacctgggtacagaattgccagcagtgtagatgtctgcagggagaggttgactgctggcccctcccctgccctgacgttgaatgcgaattcagtatattacccgaaaatgagtgctgtccgaggtgcgtgactgacccttgccaggcagataccattcgaaatgatattaccaagacttgtttggacgaaatgaatgtcgtgcgcttcacagggagtagctggattaagcacggcaccgaatgcacactctgtcagtgtaagaatggccacatctgctgctctgtggatcctcagtgcttgcaggagttatag

SEQ ID NO: 232159 - DNA, 2448 bp, synthetic construct
  misc_feature 1..2448: note = Description of Artificial Sequence: Synthetic coding sequence
  source 1..2448: mol_type = other DNA
atggaaaccggcctgggggcaccattattcaaggcgtggctgcttattagcgtctggggcctcggggtcgatccatccctacagatcgacgtcttaaccgagctggagctgggcgaatctaccacaggagtaaggcaggtgccagggctccataatggtactaaggcttttttattccaggatacccccaggagtattaaggcaagcacagctacggctgaacagttttttcagaagctcagaaacaaacacgagttcactatcctggttacattgaagcaaacccatcttaactcaggagtcattttgtctatccaccacttagaccaccgatacctggagctagagtcaagtgggcatcgcaatgaagtacgtctgcactatcgcagtggctctcaccgacctcatactgaagtgttcccttacatcctcgcagatgataagtggcataaactgtccctggcgatcagcgcgtcccacctgatcctgcacatcgattgcaacaagatatacgaaagggtcgtagagaagccatctacagatttgcccttagggactaccttctggctcggccagcgaaataatgcccacggctacttcaagggcattatgcaagatgtacagttgttggtcatgccacagggttttatcgctcaatgtccagatctgaacagaacctgtcctacctgtaatgatttccatgggttggtgcaaaaaatcatggaactccaggacatcctagccaaaacatcggccaagttgtcccgtgccgagcaacggatgaaccgcctggatcagtgttactgtgagcggacctgcaccatgaaaggtacaacttaccgggagtttgagagctggattgatggatgtaagaactgtacttgcctaaacgggaccatccagtgtgagactctgatttgtcctaatccggactgtccactgaagtccgcgctcgcttacgttgatggaaagtgctgcaaggaatgcaaaagcatttgtcagttccaaggcaggacatacttcgagggagaaaggaacactgtctactcgtcatccggagtgtgtgtgttatatgagtgcaaggaccagactatgaagctggtggaatcctcaggatgcccagctctcgattgcccagagtcacaccaaataaccttgagtcatagctgctgtaaagtatgcaagggttacgacttctgtagtgaacgccacaactgtatggaaaactctatttgtcggaacttgaatgatcgagccgtctgctcttgccgggatgggttccgcgcactgcgggaagacaatgcatactgtgaggacatcgatgaatgtgctgaggggaggcattattgtcgtgagaataccatgtgcgtgaacacaccgggatctttcatgtgcatttgcaagaccggctacattaggatcgacgattactcctgtactgagcacgatgaatgcattaccaatcagcacaattgcgacgagaacgctctgtgtttcaacactgtgggcggtcacaactgcgtgtgcaaacccggatataccggtaatggaactacctgtaaggcattttgcaaggatgggtgccgaaacggaggcgcttgcatcgctgctaacgtctgcgcctgcccacaggggtttaccggcccaagctgcgagactgacattgacgagtgcagcgatgggtttgtgcagtgtgattcaagagcaaattgcattaacctgcccggttggtatcactgcgaatgtcgggatggctatcatgacaacggaatgttctcccccagcggggagtcttgtgaagatatcgacgagtgcgggacagggcgacatagctgcgctaatgacacgatctgtttcaacctcgatggcggatacgattgtcgctgcccacacggcaagaattgcacgggggactgtatccacgacggtaaggtgaaacacaacgggcagatatgggtgcttgagaacgaccgctgctcggtctgctcttgtcagaacggctttgttatgtgcagacgtatggtgtgcgactgtgagaatcctaccgttgacttattctgctgtcccgaatgcgatccgaggctgtcgtcccagtgtcttcatcagaacggggagaccttgtacaactcgggcgacacctgggtccagaattgccagcaatgccggtgcttacagggtgaggtcgactgctggccactgccctgcccggacgttgaatgcgaatttagcatcctgccggagaacgaatgctgtccaagatgcgtaaccgatccgtgtcaggctgacacgataaggaacgacattaccaagacatgcctggatgaaatgaatgtcgtgcggttcactggctcatcatggatcaagcatggtactgaatgcacactatgccaatgcaaaaacggtcatatctgttgttccgtagacccccagtgtctgcaggagctttag

SEQ ID NO: 232160 - DNA, 2451 bp, synthetic construct
  misc_feature 1..2451: note = Description of Artificial Sequence: Synthetic coding sequence
  source 1..2451: mol_type = other DNA
atggagtcgcgcgtgcttttaagaacgttttgcctcatattcggtctgggcgctgtgtggggactcggagtagatccaagtctgcagatcgacgttctcacggaacttgagctgggcgagagcactactggcgtgcgccaagtacccggacttcacaacgggaccaaggctttcctctttcaggacactccacggagcatcaaggcctccaccgccaccgctgagcagttctttcaaaagctccggaataagcatgagtttacaatcctggttactttgaagcaaactcacctgaatagtggggtgatcctgtcaatccatcacctcgaccaccgttatctggagcttgagtcgagtggccaccgcaacgaggtgcgactgcactacagatcagggagccatagaccccacaccgaagtttttccatatatcctggcagatgataagtggcacaagctgagtcttgccatttcagcctcacacttgatccttcatatcgactgcaataagatctacgaaagggtggtggagaagccgtccaccgacctgcccctgggcaccacattctggctggggcagcgaaacaatgcacacgggtacttcaagggaattatgcaggacgtgcagttgctcgtgatgcctcaaggattcatcgcccagtgcccagatctgaatcggacatgcccaacctgtaacgactttcacgggctggttcagaagattatggaacttcaggacattctcgctaaaacctcagccaagctctcacgggcagagcagcgaatgaacaggctagatcagtgttattgtgagcgcacttgtacaatgaagggtactacatacagagaatttgagtcatggatcgacggctgcaaaaactgcacctgcctaaacggcacaatccagtgcgaaactctcatttgtccaaacccagattgccctctgaaatctgccctcgcttatgtggacggaaagtgttgcaaggagtgcaaaagcatttgtcagttccaggggcgaacatacttcgaaggcgagaggaatactgtgtactcaagcagcggcgtttgcgtgctgtacgagtgcaaggaccagaccatgaaactagtggagtcttctgggtgccctgcactcgactgtccagagtcacatcaaattacgctttcccacagttgctgtaaggtctgtaaggggtacgatttctgcagcgaacggcataattgtatggagaattcaatttgcaggaatctcaatgatcgtgccgtctgttcttgtcgggatggcttcagggcgctcagagaggacaatgcatactgcgaggatatagacgagtgtgctgagggtaggcactactgtcgcgagaatacaatgtgcgtgaatactcctggctctttcatgtgtatttgcaagactggatatattcggatcgacgactattcatgcaccgaacacgatgaatgcatcactaatcagcacaattgtgacgagaacgccttgtgttttaacactgttgggggtcataactgcgtgtgcaagcccggttacacaggcaacggaaccacatgtaaagctttttgcaaagacggctgtagaaacggaggtgcgtgcatcgctgctaacgtgtgtgcttgcccccagggattcacgggccctagttgcgagactgatattgacgaatgtagcgacggttttgttcaatgcgattctagagctaattgtatcaacctgcctggttggtatcactgcgagtgccgcgatggttaccatgacaatggaatgttcagcccttctggggagtcttgtgaggatattgacgaatgtggaaccgggagacactcctgtgccaacgacactatatgttttaatttggatgggggttacgattgcagatgcccccatgggaagaactgcacgggcgattgcattcacgatggaaaggtaaaacataacggacagatatgggtgcttgaaaacgacagatgctcggtgtgctcctgccagaatggattcgtaatgtgtcgcagaatggtgtgcgactgcgaaaatcctactgtcgacctgttttgttgtccagaatgtgatccacgccttagcagtcagtgtcttcatcaaaatggcgagaccctctacaactctggcgacacctgggtccagaattgtcagcagtgccgctgcctgcagggtgaagttgattgttggccactcccttgtccggacgttgaatgtgagttttcaatcctgcccgagaacgaatgctgcccacgctgcgtgacagacccgtgccaggccgacaccatccgcaatgacataaccaaaacctgtctggatgagatgaatgtagtgagattcaccggtagtagctggattaagcacgggaccgaatgtacactctgccagtgtaaaaacgggcatatttgctgctccgttgacccacagtgtctgcaggaactgtag

SEQ ID NO: 232161 - DNA, 2601 bp, synthetic construct
  misc_feature 1..2601: note = Description of Artificial Sequence: Synthetic coding sequence
  source 1..2601: mol_type = other DNA
atggggtttcccccactactgaaggggcaggcctctgctactcggagcagcctggcctcatgcagctgggtagtcttttttctgagctgtctcagtagacatgccccagagattgagggaggccgtcggtggaccgagctgatccggactatggaatcccgcgtgctccttcggacattctgcctgatttttggtctgggtgcagtatggggtcttggagtcgatccgtccctgcaaattgacgtgcttacagagctggagttgggcgagagcaccacaggggtaaggcaagtgccagggttacacaatggaactaaggcattcttgtttcaggatactcccagatccataaaagcgtctaccgcaacagccgaacagtttttccaaaagcttcggaacaagcacgagttcacaattctggttacacttaagcagacgcatctgaattctggcgttattttatcaattcaccacctggaccaccgctatctcgagctcgaatcaagtggccatagaaatgaggttaggctgcattacaggtccggatctcaccggcctcacacagaggtgttcccttacattctggctgacgataaatggcacaagttgagcttggctatcagcgcatctcatttgattttgcacatcgattgcaataagatctacgagcgcgttgttgagaaaccatctaccgatctgccactagggacgactttttggctcggacagcggaataacgctcacgggtacttcaagggcattatgcaggacgtgcaattgttggtaatgccccaaggttttatcgcccagtgcccggacctcaacaggacttgcccaacctgtaacgatttccatgggctcgtccagaagatcatggagctgcaggatattttggccaaaactagcgctaaactgagccgcgctgaacagaggatgaaccgactagatcagtgctactgtgaaaggacatgtaccatgaaaggtacgacataccgggaatttgaatcttggatcgacggctgcaagaattgtacgtgcttgaacggcaccatccagtgtgagaccctgatttgtcctaaccccgactgtcccctgaaatccgctctggcttacgtggatggtaagtgttgcaaggagtgtaaaagtatctgccagttccaggggcgaacatactttgagggagagcggaacactgtctacagctcttccggagtttgcgtcctctatgagtgcaaagaccagacgatgaagcttgttgagtcttccggctgcccggctctcgactgtcctgaaagccatcaaatcaccctgtctcactcctgctgtaaggtctgtaagggttacgacttttgctctgagcggcacaactgtatggaaaatagtatctgtcgcaatctaaacgacagggccgtatgctcttgccgcgatggcttccgcgcacttagagaagacaacgcatactgcgaggacatcgacgaatgtgctgagggtcggcactattgtagagaaaacacgatgtgcgtgaacaccccaggctcttttatgtgcatctgtaagacaggctatattaggattgatgactatagctgcactgaacacgacgagtgtatcaccaatcagcacaattgcgacgaaaatgctctctgcttcaatacggtgggtgggcacaattgtgtttgcaaaccaggttacactggcaacggcactacttgtaaggccttttgtaaggacggctgtcgcaatggtggcgcttgtatagcagccaacgtctgtgcctgtccccagggctttaccggaccttcttgcgaaaccgatatcgatgaatgcagcgatgggttcgtacagtgcgactccagagccaattgtattaatctgcctgggtggtaccattgcgaatgccgcgacggataccacgataatggcatgttctctccgtctggagaaagctgcgaagacatagatgagtgcggcaccggcagacatagctgtgctaatgacacgatctgcttcaacctggacggcggatacgattgccgatgcccacacggaaagaattgcaccggggactgcatacatgatgggaaagtgaaacacaacggccagatctgggtattggaaaatgaccgctgtagtgtgtgctcttgtcagaatggcttcgtgatgtgtcgacgaatggtctgtgactgcgagaacccaactgtggacttattctgttgccccgagtgtgacccaagacttagttcgcagtgcttacatcaaaatggtgaaacgctgtacaacagcggagacacgtgggtgcaaaactgccagcaatgtaggtgtctccagggtgaagtcgattgctggccactcccctgtcccgacgtggaatgcgaattttcgatcctgcccgagaacgaatgctgtccccgatgcgtcaccgacccatgtcaagcagacactatcagaaatgacatcaccaaaacctgtctcgacgaaatgaacgtggtacggtttacggggtcttcttggatcaagcatggaaccgagtgcacgctctgtcagtgcaaaaatggccatatttgctgttccgttgaccctcaatgcctacaggaactctag

SEQ ID NO: 232162 - DNA, 2451 bp, synthetic construct
  misc_feature 1..2451: note = Description of Artificial Sequence: Synthetic coding sequence
  source 1..2451: mol_type = other DNA
atggaatccagggtcttgttgaggactttttgcctcatctttggactgggggctgtgtgggggcttggcgtggatcctagcctacaaatcgatgtactgactgaactcgaactgggtgagagcacaaccggtgtgagacaggtgccaggacttcacaatggtacgaaggcctttctcttccaagatacaccacgatctattaaggcctccaccgccactgccgaacagtttttccagaagttacgcaataagcacgagtttactatccttgtgactctgaagcagacccatctgaactcaggtgtcatcttgagtatacaccatctggatcataggtacctcgagctggaaagttcaggacatcggaacgaggtaaggctgcactacaggtcaggctcacatcgccctcacacagaagtgtttccctacatcttagctgacgataagtggcacaagctgtctcttgctatatccgcttctcatctgatacttcacatcgattgtaataaaatttatgaaagggttgtggaaaaaccttcaacagatttacccctagggacaaccttttggctggggcagagaaataacgcacacggctattttaaggggattatgcaagacgtgcaattgctcgttatgccacaggggttcattgctcagtgccccgatttgaatcgcacatgccccacttgcaacgacttccacggccttgtccagaagattatggaactgcaggatattcttgccaagacatctgcaaaactcagtagagccgagcagcgcatgaaccgcttggatcagtgttattgtgaacgcacatgcacgatgaagggtaccacttaccgcgagtttgagagctggattgatggctgtaagaattgtacctgcctaaacggaacaatccagtgtgaaacgctgatctgtcctaatccagactgccctctgaagtccgccctggcctacgtggacggcaaatgttgcaaggagtgcaagtccatatgccagttccagggccgtacgtatttcgaaggagagcgcaatacagtctactcatccagcggcgtgtgcgttctgtatgaatgtaaagaccagaccatgaaactggttgagagttcaggttgtcccgctcttgattgtcctgagtctcaccaaattacgctgtcgcattcatgctgcaaggtctgtaaaggatacgacttttgttctgagcgtcacaattgtatggagaattccatctgccgcaatctcaatgatagggcggtttgttcgtgccgagatggatttcgtgcgttaagagaggacaatgcctactgtgaggatattgacgagtgcgcagagggacggcattattgccgggagaacacaatgtgtgtcaatactcccggatccttcatgtgtatatgcaagacgggatatattcgcattgacgactattcttgtactgaacatgatgaatgcatcacaaaccagcataactgtgatgagaatgccctatgtttcaacacagtcgggggacacaattgcgtgtgtaaacctgggtatactggcaacggtactacatgcaaggcgttctgcaaggacggatgtagaaatgggggagcatgcattgctgccaatgtgtgtgcttgcccccaagggttcactggccctagctgtgagacggacattgacgaatgttcggatggcttcgtgcaatgcgacagtagagccaactgtatcaacctgccaggctggtatcattgcgagtgtcgggacgggtaccatgacaacgggatgtttagcccctccggagaatcctgcgaagatattgatgagtgcggcaccggacggcactcttgtgcaaatgatacaatctgcttcaatcttgatggtgggtacgattgccgctgtccgcatgggaaaaattgcaccggcgactgtattcatgacggaaaagtgaaacataatggtcagatttgggtgctcgaaaatgatcggtgttccgtgtgttcctgtcagaatggctttgttatgtgtaggcggatggtgtgtgactgcgagaaccccacggttgacctgttctgttgccctgaatgcgatccaagattaagtagccagtgcctgcaccagaatggtgagaccttatataactcaggcgacacatgggtgcagaactgtcagcagtgtcggtgcctacagggagaagtcgattgctggcctctgccgtgccctgacgtggagtgtgaattctctatcttgcctgaaaatgagtgttgtccacgatgcgtcacagatccctgccaggccgacactatccgcaacgacattactaaaacctgcctggacgagatgaacgttgtcaggttcaccggaagcagctggattaaacacggcacggagtgcaccctttgccagtgcaaaaacgggcacatatgttgttcagtcgatccgcaatgcctccaggaattgtag

SEQ ID NO: 232163 - DNA, 1734 bp, synthetic construct
  misc_feature 1..1734: note = Description of Artificial Sequence: Synthetic coding sequence
  source 1..1734: mol_type = other DNA
atggaaactggactcggggctccgttgttcaaagcctggctgcttattagtgtgtggggtctgggggtcgacccctctctgcaaatcgatgtcttgaccgaactggaactcggagagtctacaacaggagttaggcaggtccctggactccataatggcacaaaggcattcttatttcaggacacacctcggtccatcaaagcttcaacggccacagcagaacaattcttccagaagttgagaaacaagcacgaattcaccatattggtgaccctcaaacagactcacttgaatagtggggttatcctgtccattcatcacctagaccaccggtacctggaactcgaatcaagcgggcaccggaacgaggtacgcctgcattaccgaagtggatcacaccgaccacacactgaggtttttccgtacatcctggcagatgacaagtggcacaaattgtctctggcgatttcagctagtcatctcatacttcacatagactgcaataagatctacgaaagagtagtggagaaaccctcaacggatctgccactggggaccaccttctggctggggcagcgcaataacgcccacggttacttcaaaggaattatgcaggacgtgcagctactggtgatgccacaggggttcatagcccaatgtcccgacctaaacaggacctgccctacctgtaatgattttcatggattggtgcagaaaatcatggaactgcaagacattctcgctaaaacttccgccaaactcagtcgcgcagaacagcggatgaataggctggatcagtgttattgtgaacggacatgcaccatgaaggggaccacttatcgggaattcgaatcctggatcgatggatgcaagaactgcacatgcctgaacggaactatacagtgcgagacactaatttgtcctaatccagactgcccactgaagagtgctctggcatacgtggatggcaagtgctgcaaagagtgcaaatcgatatgccaatttcaggggagaacatattttgaaggggaacgcaataccgtctactcaagttccggcgtctgcgtcctctacgaatgcaaggaccaaactatgaagctggtggagagttccggctgtcccgcactcgactgtccggagtctcaccagataacactctctcactcctgctgcaaggtctgcaagggctatgatttttgcagcgaacggcacaattgtatggaaaatagtatttgccgaaatctgaatgatcgtgctgtatgctcatgccgcgatggcttccgcgctctgcgggaagacaacgcctattgcgaggatatagacgagtgcgccgaaggaaggcactattgcagggaaaataccatgtgtgtaaacaccccaggcagcttcatgtgcatatgtaagacaggctacattcgcatcgacgactatagctgtaccgagcacgacgagtgtattacgaaccagcacaattgcgatgaaaatgccctctgttttaacacggtcggcggtcataattgcgtgtgcaaacctggctataccggaaacggaaccacgtgtaaagctttctgtaaagacggctgcagaaacggcggagcttgtattgccgctaatgtgtgtgcctgcccacagggattcaccggcccttcatgtgagaccgatatagacgaatgctccgatggctttgtgcagtgtgattccagggcgaactgcatttgcttggtccccttatag

SEQ ID NO: 232164 - DNA, 333 bp, synthetic construct
  misc_feature 1..333: note = Description of Artificial Sequence: Synthetic coding sequence
  source 1..333: mol_type = other DNA
atggagacaggcttgggcgcaccactgtttaaagcctggctgcttatcagcgtctgggggctgggtgtggacccttctctgcagatcgacgttctaacagaattggaattgggggaaagcactaccggagtgcggcaggtccctggcctgcataatggaactaaggcttttttgttccaggatacaccccgatctatcaaggccagtaccgcaaccgctgaacagttctttcaaaagctccgcaacaaacacgagtttactatcctggtgactttgaaacaaacccacctgaactccggggtcatcttgtctatccaccacctggaccactag

SEQ ID NO: 232165 - DNA, 2448 bp, synthetic construct
  misc_feature 1..2448: note = Description of Artificial Sequence: Synthetic coding sequence
  source 1..2448: mol_type = other DNA
atggagacggggctcggtgctcctctcttcaaagcttggttattaatctcagtttgggggttgggcgtggaccccagcctgcaaattgacgtgctgaccgagttggagcttggcgaatcaaccactggcgtgaggcaggtgcctgggcttcataatggcaccaaagctttcctgttccaggataccccaagaagtataaaggcaagcactgcaacagccgaacagttctttcagaagttgagaaataagcacgagttcaccattctcgtaacattgaagcagacccacctgaattccggtgtgattcttagtatccaccacctcgatcacagatacctggagctcgaatcatccggccatagaaatgaggtgcgattgcattaccgtagcggcagccatcgcccacacactgaggtcttcccttacattctcgctgatgataagtggcacaaactgtcactggcaatctccgccagccatttgatcttacacatcgattgcaataaaatttatgaacgggttgtggagaaaccttccactgacttgccgttgggaacaactttctggctcggacagcggaataacgcacacggctactttaaaggcataatgcaagacgtgcaattactggtaatgcctcagggctttattgcccagtgccctgacctgaacaggacctgcccaacttgcaacgactttcacggcttggtgcagaaaatcatggaactccaggacatcctggctaaaacgtcagccaagcttagcagggcagagcagagaatgaacaggcttgatcagtgttattgcgaaagaacatgtaccatgaaaggaactacttaccgagaattcgaatcttggatcgatgggtgcaagaattgcacctgcttaaatggcacgatacagtgcgaaacattaatctgcccaaacccagactgcccactgaagtcagccctggcgtatgttgatggaaagtgctgcaaggaatgtaaatctatatgtcaatttcagggtagaacttattttgaaggcgaacgtaatactgtgtatagctcaagcggcgtgtgcgtcctgtacgaatgtaaggatcagactatgaaactggtggaatcctctgggtgccctgcgctcgactgtcccgaaagccatcaaattacccttagccactcttgctgcaaagtgtgcaaggggtacgacttctgctcagaaaggcacaactgcatggagaattccatatgtagaaaccttaatgatcgcgcagtatgtagctgcagggacggttttcgtgcactacgtgaggacaacgcctactgcgaagatatcgatgagtgtgccgagggcaggcattactgccgggaaaacacaatgtgtgtgaacacacctggctcctttatgtgcatctgtaagacaggctatattcgtatcgatgactacagctgtactgaacacgatgagtgtattaccaaccaacacaactgcgacgaaaatgctttatgttttaacaccgtaggtgggcacaactgtgtgtgtaagcccggatatactggaaatgggacgacctgtaaagccttctgcaaagacgggtgcaggaatgggggagcctgcatcgcagcaaatgtgtgtgcttgccctcaaggtttcacgggaccctcatgcgagacagacatcgacgaatgctctgacggctttgtgcagtgcgactcgagagccaattgcatcaatctgcctggatggtaccactgcgagtgccgggacggctaccacgacaatggtatgttcagcccaagcggtgagtcgtgcgaagatatcgatgaatgcggcacaggcaggcacagttgcgccaacgataccatctgttttaacctggatgggggatatgattgccggtgccctcacgggaaaaactgtaccggggattgtatccatgacggcaaagtaaagcacaacggccagatctgggttctagagaacgaccgctgttcagtgtgtagttgccaaaatggcttcgtcatgtgcagaagaatggtctgcgactgcgagaaccccacagtagatcttttttgctgtcccgagtgtgaccctcgtctcagttctcaatgtctccaccagaatggcgaaacattgtacaacagtggggatacttgggtgcagaactgccagcaatgtaggtgcttgcagggagaagtggactgctggccactgccctgccctgatgtggaatgtgaattctccatcctacctgaaaacgagtgctgtcccaggtgtgtgaccgatccttgccaagccgataccatcagaaacgacatcaccaagacatgtctggacgaaatgaacgtagtgcgattcactgggtcaagttggatcaagcacggcactgagtgtaccctatgccagtgcaagaatggtcatatctgctgctcagtagaccctcagtgccttcaggaactctag

SEQ ID NO: 232166 - DNA, 69 bp, synthetic construct
  misc_feature 1..69: note = Description of Artificial Sequence: Synthetic coding sequence
  source 1..69: mol_type = other DNA
atggaatctcgcgtactgctgcgcacgttctgcctgatcttcgggctcggagccgtgtggggtctctag

SEQ ID NO: 232167 - DNA, 966 bp, synthetic construct
  misc_feature 1..966: note = Description of Artificial Sequence: Synthetic coding sequence
  source 1..966: mol_type = other DNA
atggaatcacgagttcttttacggacattttgtcttattttcgggcttggagcagtttggggactgggagtggatcccagcctgcagattgatgtgctaacagaactggaactcggcgaaagtactacaggtgtgcggcaggtgcccggactacataacggaaccaaggcctttctgtttcaagatactcctagatcgattaaagcctccacggccacggccgagcagttctttcagaaactaagaaataagcatgagttcacaatcttggttacactcaagcaaactcacctcaattctggcgtgattctctccatccatcacttagaccaccgctacctcgaacttgagagctctggacatcgcaacgaagtcaggctgcactaccgatccggatcccatagaccgcataccgaggtgttcccttatattttagctgacgacaaatggcacaagttatctttagctatttcagcatcccatttgatcctgcacatcgactgtaataagatctatgaacgagttgtcgaaaaaccgtctacagatttgcctctgggaacaactttctggctcggccagaggaataacgctcacgggtacttcaagggaatcatgcaggacgtgcagctgctagtgatgccccaaggttttattgcacagtgtccggacttgaatcgtacttgccccacatgcaacgacttccatggtctagtccagaagatcatggaactgcaggatatcttagccaaaacttcagctaagctgtcccgggcagagcagaggatgaataggcttgaccagtgctattgcgagcgcacatgtaccatgaaaggtacaacctatcgcgaatttgagtcctggatcgatggctgtaagaattgtacctgcctaaacggcacaatacagtgcgagactttaatctgccccaaccctgattgccccctcaaatccgccctcgcttactag

SEQ ID NO: 232168 - DNA, 4386 bp, synthetic construct
  misc_feature 1..4386: note = Description of Artificial Sequence: Synthetic coding sequence
  source 1..4386: mol_type = other DNA
atggctgctgagaggggcgctcgaagactgctgagcaccccgtccttctggctctattgcctcttgctgctaggtaggcgggcaccaggagccgctgctgcccgttctggaagtgcaccgcagtcgcccggagccagtatcagaacatttacccctttttacttcttggtggaacccgtcgataccttgtcagtccggggatcttcagtcatccttaattgtagcgcatattcagagccttcgcccaagatcgaatggaaaaaggatgggacctttctcaacctggtctctgatgataggcgccagctgctgcctgatggctctttgttcattagtaacgttgtgcactccaaacataacaagcctgacgagggatactatcaatgcgtcgccacggtggagtccctcggaacaatcatctcgaggaccgccaagcttatcgtggctggtctcccccgtttcacaagtcaaccagaaccatctagcgtatatgccggtaacaatgccattctgaactgcgaagttaatgcagacctggtccccttcgtccgatgggaacagaaccggcagccattgttgttagatgatcgcgtaatcaagctgccctccggtatgttagtaatctccaacgctaccgaaggagacggtggtctttaccgctgcgtggtcgagtccggcggtcccccaaaatatagtgacgaggtggagctcaaagtgctgcctgaccctgaagtgatttccgatctcgttttcctcaaacaaccttcccccctggtacgcgtcattgggcaggatgtggttctgccatgcgtggcctccgggctgcctaccccgacaatcaagtggatgaagaacgaagaggctcttgacaccgaaagttctgagcggctggtccttctagctgggggaagcttggagatctcggacgtcacagaggatgatgctggcacatatttctgcatagcagataacggcaatgagactattgaagcgcaggcagagctcacagttcaggctcagcccgagttccttaaacagccgaccaacatttacgctcatgaatccatggatattgtgttcgagtgcgaagtgactggcaagcctacccccacagtgaagtgggtcaagaatggcgacatggtgatcccttccgattattttaagattgtgaaggaacataacctgcaagtactgggtttggtgaagtctgatgagggcttctatcagtgtatcgctgaaaacgacgtcggaaatgcacaagctggggcacaattgatcatcctggagcacgctcctgcaacaacagggccactgccttctgcgcctagagacgtggtggcttccctagtctccacccgctttattaagctcacctggcgcacaccagcgagtgatccgcacggggacaacctgacatacagcgtcttttatacgaaagagggtatagctcgagaacgagtggagaacacatctcatcctggcgagatgcaggttaccatccaaaacctgatgccagcaaccgtctacatcttcagggtaatggcgcaaaataagcatggtagtggcgagtcatcagccccattgcgagtggagactcagcctgaagtccagctgcccggacctgccccaaatttgcgggcttatgcagcctctcccaccagtatcaccgttacatgggagactccggttagcgggaatggtgaaatacagaactataagctgtactatatggaaaaaggaaccgataaagaacaagatgtggacgtttcgagccattcatatacaattaatgggcttaagaagtacaccgagtattcattcagagtggttgcctacaataaacacggacccggagtgagtactcctgacgtggccgtgcggacactgtcagatgtgccatcagccgctccccaaaaccttagtctcgaagtgcgtaatagcaagtccataatgatacactggcagccgccagccccagctacccagaatggacagatcacagggtacaagatcagataccgaaaggcctcacgcaaatccgacgtcacagagacacttgtgagtggcacacaactgtcacaattaattgaagggctggaccgaggaacagaatacaatttcagggtggccgctctcactataaacggaaccgggccagccacagactggttgagcgctgaaactttcgagtcggatctggacgagactagagtgcccgaagtccccagctctttgcatgttagacctttagtcacctctattgtagtgtcgtggacaccccctgagaatcagaatattgttgttagggggtacgccattggttatggtattggaagccctcacgcgcaaaccattaaggtggactataagcagaggtactacactattgagaatctggatccttccagtcactatgtcatcaccctgaaggcttttaacaatgttggcgaggggatccctctttacgaatcggcagtcactaggccacataccgacacatcagaggtggatctgttcgtcatcaacgccccttatactcccgtgcccgatccaacaccaatgatgcctcctgtgggggtccaggcttctatcctatcacatgacacaatcagaataacatgggctgacaatagcctgccaaaacaccagaagataacagactcccgctactatacggtacgctggaagacgaatatacccgctaatacaaaatacaagaacgccaacgccaccactttgtcttatctggtaactgggctaaaaccaaacaccctatacgaattttccgtcatggtgaccaagggacgtagatcgtcaacctggagcatgactgctcacggcaccacatttgaactcgttccaaccagcccccctaaggacgtgaccgtagttagcaaggaggggaaaccgaagacaatcatcgttaattggcaaccaccttccgaggccaacgggaagattaccggatacataatttactatagtacagacgtcaatgcagagatacatgattgggtgatcgaaccggtggtcggaaaccgcttaacacatcagattcaggaactaaccctcgataccccctactatttcaaaatacaggccagaaactcaaagggaatgggtccaatgtctgaggctgtgcagttcagaacccccaaagccgattcttccgataagatgcccaacgaccaggcgagtgggtcaggtggcaaaggatctaggttaccggatctgggtagcgattataagcctccaatgagtggttctaactcccctcacggcagccctactagtcccctggacagcaacatgctgctcgtgatcatcgttagtgtgggcgtaattaccattgttgttgtcgtcattattgccgtgttttgcacaagacgcactacttctcaccagaagaaaaaacgcgcagcatgcaagtctgtaaacggctcacacaagtacaaagggaattcgaaagacgtcaaacccccagacctgtggattcaccacgagcggttggagctgaaacccatcgataaatctcctgacccaaaccctattatgacagacacacctattcccaggaattcacaggacatcactcccgtggacaatagcatggattctaacattcaccagaggcgaaacagctaccgagggcatgagtctgaagattccatgtccaccctggccggaagacgaggcatgcgacctaagatgatgatgccatttgactcccagccacctcagccagtgataagtgcccatccaattcatagcctagacaaccctcatcaccatttccactccagctccctagccagccctgcccgaagccatctttatcaccccggatctccttggccaataggtacttctatgtccctgtcagacagagctaatagcaccgagagcgtccggaacacaccttctacagacactatgcctgcaagtagcagccagacttgttgtacggaccaccaggacccggaaggcgctacaagtagttcttatctggccagctcccaggaagaggactcaggacagagtctcccaactgctcatgtacgccctagccaccccttgaaaagtttcgctgtgcctgcaattcccccacctggcccaccaacttacgaccccgcactaccttctacccctctcctgtctcagcaagctttgaaccatcatatccactcagtcaagactgcttcaatcgggacattagggagaagcaggcccccaatgccagttgtggtgccgtccgcgccagaagtgcaagagacaaccaggatgctcgaggactcagaatcttcttacgaacccgacgagcttaccaaggaaatggctcacttagaagggctgatgaaagatctcaatgctattactactgcctag

SEQ ID NO: 232169 - DNA, 4386 bp, synthetic construct
  misc_feature 1..4386: note = Description of Artificial Sequence: Synthetic coding sequence
  source 1..4386: mol_type = other DNA
atggctgcggagaggggagccagaaggcttttgtctaccccttccttctggctctattgtctactccttctggggagacgcgcaccaggggcagccgctgcacgaagtggcagcgcgcctcaatcacccggagcgtctatacgcacatttacacccttctatttcctcgtagagccagtcgacacgctatcagtccgaggctcctctgtaatattgaattgtagtgcctattcagagccttcgccaaagattgagtggaaaaaggacggtacgttcttgaacctcgtctcagatgatagacgccagctgttgcccgacggatccctgttcatcagcaatgtggtgcattctaagcacaataagcctgatgagggctactatcagtgcgtcgccacagttgagtccctggggactataatttctcggaccgccaagctgattgtggccggtctcccgaggtttacgtcccagccagagccatcttcagtgtacgccggtaataatgcaattctgaattgcgaagtgaacgcagacctggtaccgttcgtacggtgggagcagaacagacagcccctgcttctggacgaccgcgtgattaaacttccctctggcatgctcgtgatttctaatgccacagagggcgatgggggactgtaccggtgcgtcgtggagtccgggggtcctccaaagtactccgacgaggtggagctaaaggtcttaccggatccagaagttatctccgaccttgtgtttctgaagcaaccctcgcccctagtgagagtgatcggacaagacgttgttctcccatgtgtcgccagcggcctgcccaccccaaccattaaatggatgaaaaatgaggaggcccttgatactgagtcaagtgagcggctggtactgctcgctggaggtagcctggaaattagcgatgttacagaggacgacgccggaacatacttttgcatcgccgacaacgggaacgaaacaatagaagcccaggcagagctcaccgttcaggcgcagcctgaattccttaagcagccaactaacatatacgcccacgagtcaatggacattgtgttcgaatgcgaagtcaccgggaagcccacgccaacagtcaaatgggtgaagaacggagacatggtgattccatctgattatttcaagatcgttaaggagcacaacctccaggtcctcgggctagttaagtcagacgaaggcttttatcagtgcatcgcagaaaatgatgttggcaacgcccaagcaggtgcccagctcatcattctagaacatgcccctgctacaactggtccactcccttccgcaccccgtgatgtcgtcgcctctctggttagtactcgattcatcaagctcacgtggcgcacaccggcttcagatccgcatggtgataacctgacctattccgtattttacaccaaagaaggcatcgcaagagaacgggtcgagaatacctcccatccaggcgagatgcaggtcactatacagaatctaatgccggctacagtttacatcttcagagttatggcccagaataagcacggtagtggcgaatcgtcagccccattgcgggtggaaacccagcccgaggtccagctacctggtccagccccaaacttacgggcttatgctgccagccctacatctatcaccgtgacatgggaaactcctgtgagcggaaacggtgagatccaaaattataagttgtactatatggagaagggaaccgacaaggaacaggatgtcgatgtgagttcacatagttacaccatcaacgggctaaaaaagtacacggagtacagctttcgcgttgttgcgtacaataagcatgggccaggcgtctctactcctgatgtcgctgtgaggacattatctgatgtgccatcggcggctccgcagaacttatcacttgaagtgagaaactctaagtctatcatgatacactggcagcctcctgcccctgccacacagaacggccagatcactggatacaaaatcaggtacaggaaagcttcgcggaagtccgacgtcactgaaacacttgtgagcggtactcagctctcacagctgatcgaagggctggaccggggtacagaatataacttccgggtcgccgctttaacaatcaatgggacaggacctgccacagattggctctccgccgaaacctttgagtcagacttggacgaaacacgggtcccagaagtcccctccagcctgcatgtgcggccactggtcacgagcatagtcgttagttggactcctccggagaaccagaatattgtggtgagaggatatgccattgggtacggaatcggatcccctcacgcccaaactattaaggtcgattacaagcagagatattacactattgaaaacctcgacccctcctcccactatgtgattaccctcaaggcttttaacaacgtcggggaggggattcctctctacgaaagcgcggttactcgcccacataccgacacctcggaggtcgacctgtttgtgattaatgcaccgtacacccctgtgcccgaccctacacctatgatgccccctgttggggtccaggcttccatactgagtcacgataccattagaataacttgggccgataactcacttcctaagcaccaaaaaatcacagacagccggtactataccgtgcgctggaagaccaatattccggcaaacaccaaatacaaaaatgccaacgctaccacgttatcttatttagtgactggactgaagcctaacacactttacgaatttagcgttatggttaccaaggggaggcggtcatccacctggtcaatgaccgcccatggcacaaccttcgaactcgtgcctacctctcctccaaaggacgttaccgtcgtgtcgaaagaaggaaagcccaaaactataatcgtcaattggcagcctccatctgaggccaacggtaaaattaccgggtacattatttactattcaaccgacgttaacgcggagatccatgactgggtgatcgagccagtggtggggaacaggctgactcatcaaattcaagaactcacactcgataccccctattactttaaaatccaggccaggaactctaaggggatgggacccatgtctgaagctgtacagttcaggactcccaaggccgattcctctgataagatgcctaatgatcaggcatctggcagtggaggaaagggctcaaggttgcccgaccttgggagcgattataaacccccaatgtccggctccaattctccacatggctcacctacgtcccccctggattccaatatgctcctggtgattatcgttagcgtgggggttataaccatcgtcgttgtagttattatcgccgtgttctgcacaagaagaacaacctcccatcagaagaagaaacgggcagcatgcaaatccgtgaatggatcccataagtacaaaggcaattccaaggacgttaaaccccctgacctctggatccatcatgagagactggagctaaagcctatcgacaaaagccctgaccctaacccaatcatgaccgatacacctatcccacgcaatagtcaggacataacccctgtggacaacagtatggacagcaacatccatcagcggagaaattcctatagaggacacgagagcgaggactctatgtcaacactggccggtaggcggggaatgagaccaaagatgatgatgcccttcgactctcagccaccccagccggtcatcagcgcacatcctattcatagcttggacaatccccaccaccactttcactccagttcgttggccagcccggcacgctcacatctctaccatccaggttccccgtggccaattggcacttccatgagtctgagtgatcgagctaatagcaccgaatcagtgcgtaatacgccatctacggacacaatgcccgcttcctcctctcaaacatgctgtacagatcaccaggaccccgagggagccaccagctcgagctatctggcaagctcccaggaggaagacagcgggcagtccctcccaacagcgcatgttaggccgagccacccacttaagtccttcgccgtcccagccatccctccccctgggcctcccacatatgacccggcactcccttcaacgcccctcctgtcacagcaagctctgaatcatcacatccatagtgtcaaaacggcaagtatcggaacgctgggtaggagccgacccccaatgcctgttgtggtgccatccgcgccagaagtccaggaaactaccaggatgctggaggatagcgagagctcctatgaaccagatgagctgacaaaagaaatggcgcacctggaaggactgatgaaagaccttaatgccatcaccactgcctag

SEQ ID NO: 232170 - DNA, 3519 bp, synthetic construct
  misc_feature 1..3519: note = Description of Artificial Sequence: Synthetic coding sequence
  source 1..3519: mol_type = other DNA
atgaagaatgaggaggccctcgatacagaatcttcggaacgactggtcctcctcgcgggtgggagcttagagatctctgacgtcacagaagacgatgcgggtacgtatttttgtatcgcagataatggcaatgagacaatcgaggcgcaggcggagctgactgtccaggctcaaccagagtttctgaaacaacccactaacatctacgcacacgaaagtatggacatagtctttgagtgcgaagtcaccggaaagcccactcctacagtaaagtgggtgaagaacggggatatggtgattccatccgactacttcaagattgtgaaagagcataatctacaggtccttgggctcgtaaagagtgatgagggattctaccagtgtatcgctgaaaacgacgtaggaaacgctcaggcaggggcacaactcattatactggagcatgacgtggccatccctactctgcccccaacttctctgacatctgctaccacagaccacctcgctccagctacaacgggtcccttacccagcgcaccccgagatgtcgtcgccagtcttgtcagcacccgctttataaagctaacctggaggacaccagcttctgatccccacggagataacctgacgtactctgttttctataccaaggagggcatcgccagggagagggtagagaatactagccacccgggagaaatgcaagttaccattcagaacttaatgccagccacagtttatatttttcgggtgatggcccagaataagcacgggagcggtgagagcagcgctcccctgcgtgtcgagacacagccagaagtgcagctccctggtccagctcccaatctgagggcttatgctgcctcccctacctccatcacagtgacctgggaaacacctgtgtcgggaaatggggaaattcagaactacaaattgtactacatggagaagggcaccgataaggagcaagacgtggatgtttcttcccactcatatacgataaatggcctgaaaaagtacactgaatatagctttcgagttgtcgcgtataacaagcacgggcctggggtcagcaccccagacgtcgccgtcagaactctttccgacgtgcctagcgccgctccacagaatctgtcactagaagtgcgcaactccaagagcattatgatccattggcagcctccggcaccagctactcaaaatggtcagattactggctataagattagataccggaaggcaagccggaagagtgatgtgaccgaaactcttgtgtctggtacgcagctctcgcagttaattgagggactcgatagggggactgagtacaactttagggttgctgcactcacaataaacggaacagggccagccaccgactggctcagcgccgaaaccttcgagtccgatctcgatgagacccgggtccccgaggtcccttcatccctgcacgtgagaccgttggtaactagtatcgtagtgtcctggaccccccctgaaaaccagaatatcgttgttcgcggatatgcaataggctacggaatcggctcaccacatgctcagacaattaaagtggattataagcagcggtactatactatcgaaaacctagacccgagcagtcactatgttattacattgaaagcctttaacaatgtgggagaggggatcccactatatgagagcgcagtgaccaggcctcacaccgtgcccgatcctactcccatgatgcccccagtgggggtccaagcttctatcctgtcacacgataccatccgaatcacttgggccgataacagcctgcctaagcaccagaagattactgacagtcggtattacactgtgcggtggaagaccaacattccagcaaatacaaaatataagaacgctaatgctactacactgtcttacctcgtaacaggcctaaagccgaacactctctatgagttttctgtgatggtaactaaaggtagaaggtcatccacatggtccatgacagcccacggaacgacctttgaattggtcccgactagcccaccgaaggatgtgactgtggtatcgaaagagggaaaacctaagactattattgtcaactggcagcctccttccgaggccaatgggaaaattaccggctacattatatattactctaccgatgtaaacgcagaaatccacgactgggtgatagagcctgtggttggcaatcgacttacgcatcagatccaggagcttacccttgacaccccctattactttaaaatccaggcgcgtaacagcaaaggcatgggtcctatgtcagaggctgtgcagtttaggacgcccaaagcaagcgggtctggtggaaaggggagccggcttcctgatctcggttctgattataaaccacctatgagcgggtcaaatagtccccatggatcaccgacgagccccctggattccaacatgttgctggtcatcatcgtgtccgtaggagtgatcaccatagtggtagtggtgattattgctgttttctgtactagacgcaccacatctcaccagaaaaagaaaagagctgcgtgtaagagcgtaaatggctcccataagtacaagggcaattctaaagacgtaaagcctcctgatctgtggattcaccacgaacgactggagcttaagcctattgacaagtcgcctgaccccaatccgataatgaccgacactccaatccctagaaactctcaggacattacaccagttgataacagtatggacagcaacatccatcagcggcgtaattcgtatagaggccatgagtcggaggacagtatgtccaccctggctggccgtaggggtatgcgcccaaagatgatgatgccctttgatagccagccccctcagccggtgatctcagctcacccgatccattcattggataacccccatcatcactttcattcttcttctttagccagtcctgcaaggagccacctttaccacccaggctctccatggcccattgggacttcaatgtccctctccgatcgagctaacagcacggaatccgttcgtaatacgcctagcaccgacactatgcctgcaagctccagtcaaacatgctgtacggatcatcaggacccggaaggggcaacatcttcatcttatcttgcttcctcccaggaggaggattcagggcagtctctgcccactgcccacgtccgaccttcacatccgctaaaaagctttgccgtgcccgcaattccaccccctggtccacctacgtatgacccagctttaccttctacccccttgctgtctcagcaagccctgaatcaccatatccactctgttaagacggctagcattggcacgctgggcagaagtcgcccacccatgcccgtcgtggtgccaagcgcgcctgaggtgcaggaaaccacccgcatgcttgaggattcggagtctagctacgagccggatgagctgacgaaagagatggcgcacttagaaggcctgatgaaggatctgaatgctatcacaacggcttag

SEQ ID NO: 232171 - DNA, 4353 bp, synthetic construct
  misc_feature 1..4353: note = Description of Artificial Sequence: Synthetic coding sequence
  source 1..4353: mol_type = other DNA
atggctgccgaaagaggagcgcgacggttactgtctacaccatctttctggctgtactgcctgctgctactcggtaggcgggcaccgggagctgccgctgcgagaagcggctcagctccccagagccctggtgcgtccatcaggacttttacgccattctatttcctagttgagccagtggacacgttatcagtgaggggttctagcgtcatcttgaattgttccgcctacagcgaaccttcccccaagatcgagtggaagaaagatggcactttcctcaacctggttagtgacgatcgacgtcagcttttgccagacggaagcctctttatcagtaacgttgtccactcaaaacacaacaagccagacgaaggctattatcagtgtgtagcgaccgtggaatctctgggaacgattatatcaagaaccgctaaactgattgtggccggtctaccacggttcacatcgcagcctgaaccaagctccgtctacgccggaaataatgccattctgaactgcgaagtgaacgcggacttggtccctttcgtgcgatgggaacagaaccgtcagcccctcctgctcgacgatcgtgtcatcaagctgccctcagggatgttagtcatcagcaatgcaactgagggggacgggggactgtatcggtgtgtggttgaatccggaggacctcctaaatactcagacgaggtggagctgaaggttctgccagacccagaggtgatctctgacctcgtgtttctgaaacagccaagccctctcgtgcgagtgatcgggcaagatgtagtgttgccgtgcgtcgctagcggattaccgacacctaccattaagtggatgaaaaatgaggaggccctggataccgaatcctccgagagacttgtgctgctcgcagggggtagcttggagattagtgacgttaccgaagacgacgctggcacctatttctgtatcgccgataacgggaatgagaccattgaggcacaggcggagttgacagtccaggcccagccagaattcctcaaacaacctaccaatatttatgcccatgagagcatggatatcgtgttcgagtgcgaggtgacggggaaacccacccctactgtcaagtgggtcaagaacggtgacatggtgatcccgtcggactattttaagattgttaaggagcataacctgcaggttttgggcctagtgaagtctgacgaaggattttaccagtgtatcgcagagaacgacgttggaaacgctcaggcaggcgctcaattaatcatactggaacatgctccggcaactacgggacccctgccctccgcccctcgagatgtggtggcctcattggtgtccacaaggttcataaagctcacctggcggaccccggcaagtgacccccacggggataacttaacttactccgttttctacaccaaggaaggcatcgccagagaacgggtggaaaacacgagccatcctggggagatgcaggtcacaattcagaacctaatgcctgctaccgtatacatttttagagtaatggcacagaacaagcatggctctggagaaagcagcgcacccctccgggtcgaaacccagcctgaggttcagctccctggcccagctccgaaccttcgggcatacgctgcatccccaacatccatcactgtaacgtgggagacacccgtctccggtaatggagaaatacagaactacaagctgtactatatggagaagggcaccgacaaggagcaggacgtcgatgtgtcttcacacagctacaccattaacggtctgaaaaaatacactgagtattccttccgggttgtggcttataacaagcatggacccggagtcagtaccccggatgtggctgtgaggaccctgtctgacgtgcccagtgcggctcctcagaacctgtcactggaagtcaggaacagcaagtcaattatgatccactggcaacctcccgctccagcgactcagaacgggcagatcacagggtacaaaatcagataccgcaaggccagcaggaagtcagatgttacagagactttggtgtcaggtactcagttgtcacagctgattgagggattagatcggggtaccgaatacaattttcgcgtggctgccctgaccattaacgggaccggtcccgcaaccgactggttgtccgcagagaccttcgagtcagatttggatgagaccagggtgccagaggtgcctagctcgctccacgtgcgcccactggtgacaagcatagtcgtctcctggaccccccctgaaaatcagaacatagtcgttaggggctatgccatcggctatggcatcggctccccccacgctcagacgattaaggtggattacaaacaacggtactatactatagaaaacctggatccatcatctcactacgtgatcacactgaaggcatttaacaacgttggagagggcatccctctatatgaaagtgcagtgacccggccacataccgacacatctgaggtggatctgttcgtcattaacgctccatacacccccgttccagaccctacacctatgatgccgccagttggagtacaggcatccatactgagtcacgacacgattaggatcacttgggccgataactctttgcctaaacatcagaagatcaccgattctaggtactacacagtgcgatggaagaccaatattcccgctaatactaaatataagaatgccaatgccactaccttaagctatctcgtgacgggcctgaagccaaacaccttgtatgagttctccgtaatggttacaaagggaagaagatcttcaacatggtctatgactgcgcacgggacgacattcgaattggtgccaacaagtccccctaaagacgtcacggtggtcagcaaggaaggaaaacccaagacaataattgtcaattggcaaccaccaagcgaggcgaacggaaagattacagggtacatcatttattatagtaccgatgtgaacgcagaaatccatgattgggtaattgaacccgtagtgggaaataggttgacgcatcagatccaggaactgaccttagatactccctattattttaagattcaggccagaaactctaaggggatgggcccaatgtctgaagcggtccaattcagaactcccaaagcctccggttctggtggcaaaggctctcggctacccgatctcggcagtgattacaagccgcctatgtccggttccaacagcccacacggtagccctacatcccctttagatagtaacatgctcctcgtgatcattgtgagtgtcggtgtgataacaatcgttgtggtggtcattatcgctgtattctgcacacgacggacgacgagccatcaaaagaagaaacgcgcagcttgcaagtccgtgaatggatctcacaagtacaagggaaacagtaaagatgtcaagcctccggacctctggattcatcacgagagactggaactgaagcctatcgataaatctcctgatcctaatcccatcatgaccgatacacccataccgcgaaattcacaggacatcaccccggttgacaatagtatggattccaacatccatcaacgtcgtaactcttaccggggtcacgaatctgaggatagcatgtctaccctggcagggagacggggtatgaggccaaagatgatgatgcccttcgactcccagccaccccagcctgtgatttccgcccaccctatccattctttggataatccccatcaccactttcattctagttctttggcctcaccagccaggtcacacctttaccacccaggaagtccctggccaatcggtacttcaatgtcgctttccgatagggcaaattcaaccgagtcagtgcggaataccccctctaccgacaccatgcctgcctctagttcccagacttgctgcactgaccatcaggaccctgagggcgcaacaagcagtagttatttagcctctagccaggaggaagattccggtcaatcactgcccaccgctcatgtgcggccaagccaccccttgaagtctttcgccgtacccgcaattcctcctccaggaccccctacctacgaccctgctcttcctagtacccccctgctctctcaacaagcccttaaccaccatatccattccgtcaagacggctagtatcggtactttgggcaggtcacgccctccaatgcctgtcgtcgtgccctccgccccagaggtgcaggagactactagaatgctcgaagattctgagtcctcttacgaaccagacgagcttaccaaggagatggcacatctggaaggccttatgaaggacctgaacgctattaccacagcctag

SEQ ID NO: 232172 - DNA, 4227 bp, synthetic construct
  misc_feature 1..4227: note = Description of Artificial Sequence: Synthetic coding sequence
  source 1..4227: mol_type = other DNA
atggcagccgaacggggtgctcgcaggttactctctaccccatctttttggctctattgtcttctgctgctcggcaggcgggcaccaggcgctgctgcagctcgaagcggcagtgcgcctcagtcaccaggcgcatccataaggaccttcacgcccttctacttcttagttgaacctgttgatactctctcggtgcgtgggagctccgtcattctgaattgctccgcctacagcgaaccctctccaaagatcgaatggaaaaaagatggcacttttctgaatcttgtcagtgacgaccgcagacagctgttgcctgacggatcactgttcatctcaaatgttgtgcactcaaagcacaataagcccgacgaaggatattaccagtgtgtggctactgtggagtccctggggaccatcatatccaggaccgcaaagctgattgtggctgggctccctaggtttaccagtcagccagagccatctagcgtgtatgcagggaataacgccatcttgaattgcgaggttaacgccgatctagtcccctttgtaagatgggagcaaaaccgccagcctctcctgctggacgatcgcgtgatcaagttaccttcgggcatgctggtaatttccaacgcaaccgagggagacggaggcctgtacagatgtgttgtggagtccggcggacctccaaaatattcggatgaagtcgagctgaaggtacttcccgaccccgaggtgattagtgaccttgtgttcctgaaacagccctcacctctggtgcgcgtgatagggcaggacgtcgtcttaccatgtgtagcatccggcctgcctacacccactatcaagtggatgaaaaacgaagaagccttagatactgaatcctcagaacgcttggtactgctggctggcggttccttggaaataagtgatgtgactgaagatgacgccggtacatacttttgtatcgccgataatggcaacgaaaccatcgaggcgcaggctgagcttactgtccaagcccagcccgagttcctgaagcaacccacgaatatatatgctcacgaaagcatggacattgtgttcgagtgcgaggttactggcaagccaacaccaaccgtgaaatgggtgaagaacggggatatggtgattccctctgactattttaagattgttaaggagcacaatttgcaagtgcttggcctcgtgaagagcgatgaggggttctaccagtgtatcgccgaaaatgatgtcggtaacgcccaagccggtgctcagctgatcatcctcgaacatgcgccagcaactacgggcccactgccttccgcaccaagggacgtggtagctagtctggtcagcacccggtttattaaactcacctggcgcacacccgcatctgaccctcacggggataatctaacttactctgtgttctataccaaggaaggcattgccagggagcgcgttgaaaacacaagtcatcctggcgagatgcaggtgactattcagaacttgatgccagcgactgtgtacatcttccgcgtcatggctcagaacaagcacggtagcggagaatcttctgcacctctccgtgtagaaacccagccagaggtgcaactgcccggtcccgcaccaaatttaagggcctacgcggcttcacctactagtataacggttacttgggaaacacccgtctccggtaacggggaaatccagaattacaagttgtattatatggaaaaaggtaccgacaaggagcaggacgtcgacgtttctagccattcctacactatcaatggtttaaagaagtatacagagtacagcttccgggtagtggcctacaacaaacacggcccaggtgtgtccacgcctgacgtggccgtgcgaaccctctctgacgtacccagcgccgctccccagaacctcagcctcgaggtccggaatagtaagtccattatgattcactggcagccacctgcgccagccacccagaatgggcagataaccggctacaaaataaggtacaggaaggcgagcagaaagtcagacgtcactgagacacttgtttcaggtacccagctgtcccagttgattgaaggtctagatcgcggtactgagtataacttccgcgtggctgccctaaccataaacgggacagggccagccacggactggctgtccgccgaaaccttcgagtccgatctcgatgagaccagggtaccagaggttccctcgagtctgcacgtgcggccactggtgacgtccatagttgtttcttggacaccaccagaaaatcagaatatcgttgtgaggggctacgccatcgggtacgggatcgggtccccccacgcccaaactattaaggtggactataagcaaaggtattacaccattgaaaatcttgatccctcttcgcactatgtgatcacattgaaagccttcaataacgtcggcgagggaatcccgctgtacgaatctgctgtcactagaccacacacagatactagtgaggtcgatctcttcgtgattaacgcaccctacactcctgtgcccgatcccacacctatgatgcctcccgtgggtgtgcaggctagcattctttcccatgatacgatccgtattacatgggcggacaactcactcccgaagcaccagaaaataacggacagcaggtactataccgtaaggtggaagaccaatatcccagccaatacaaaatacaaaaacgctaacgctactacactcagctatctggtcaccggcctgaaaccgaatactctgtatgaattcagcgtaatggtcaccaagggcaggcgctcatctacctggagcatgaccgcccatgggactaccttcgaattagtgccaacttcccctcccaaagacgttacagtggtgtcgaaagaaggtaagcctaagacaattatagtgaactggcagccaccaagcgaggcgaatgggaagatcaccggctacattatctactactctacggacgtaaatgccgagatccacgattgggtcattgaaccagtggtcgggaacagactaacacatcagattcaggagctgacccttgacacaccctactatttcaaaattcaggccagaaattcaaaggggatgggcccaatgtccgaggcagtgcagttcaggactccgaaagcagattcctccgacaagatgccaaacgatcaggcaagtggtagtgggggaaaaggctctagactgccagaccttggaagcgactacaaaccacctatgagcggcagcaacagcccccatgggtccccaactagccccttggatagcaacatgttgctcgttataattgtgtccgttggtgtcataaccattgtcgtggtcgtgattatcgcagtcttctgtacccggcgaactacaagccatcaaaagaagaagcgggcagcttgcaaatcagtaaacgggagccacaaatataaaggcaacagcaaggatgtaaagccaccggacttatggattcatcatgagagactggagctcaagccaattgacaaatcccccgacccaaatccgattatgactgacacgcccatcccccgaaactctcaggatataacccccgtggacaacagcatggatagcaacatccatcagagacgcaactcataccgcggtcacgaatctgaggattcaatgagcaccctggccggtcgtcgtgggatgcgccctaagatgatgatgcccttcgactctcaaccgccacagcagagcgtacggaatacgcccagcaccgacaccatgccagcttcatcatcccagacgtgttgcacagaccatcaggatccagagggagctactagcagttcttatctcgcttcctctcaggaggaagatagtgggcagagcttgcccaccgcgcacgtgagacctagtcatccacttaaaagcttcgctgttcccgcaatccccccacccggaccacctacttacgatcctgcacttccatctacgccgctgctgtcccaacaggccctcaatcatcacatccatagtgtgaaaacagcctctattgggacactggggcgatcccgcccacctatgcccgtggttgttccttccgcccctgaggtacaagagactacccgtatgcttgaagatagcgaatccagttatgaacctgatgagctcacgaaagagatggcacatttggaaggactcatgaaggacctcaatgccatcaccacggcctag

SEQ ID NO: 232173 - DNA, 1074 bp, synthetic construct
  misc_feature 1..1074: note = Description of Artificial Sequence: Synthetic coding sequence
  source 1..1074: mol_type = other DNA
atgcaatccgtccaatcaacttcattctgccttcggaagcagtgcctctgcctgacattcctgttgctgcatctgctcggacaggtggcggctacccagcgctgtcctccccaatgtcctggcagatgccccgcaacaccccctacttgtgctcctggagtgcgggctgtgctcgatggttgttcttgctgtctggtgtgcgctcggcagcgtggggagagttgtagcgacctggaaccttgtgacgagagtagcgggctttactgcgaccggagtgcagatccttcaaaccagaccggcatttgtaccgctgtggaaggagacaactgtgtgttcgatggagtgatttacagatctggagaaaaattccagccatcatgcaaatttcaatgcacttgccgggacggccagatcggctgtgtgcctaggtgccagctggacgtgctgctccccgagcctaattgcccggctccacgtaaggtcgaagttcccggagaatgctgtgagaagtggatctgtggccctgatgaggaagacagtctcggagggttgactctcgcggcttacagaccagaagccactctcggggttgaagtctcagattcatcagtgaactgtatcgagcaaacaacagagtggactgcttgcagtaagtcgtgtggcatgggctttagcacgcgagtcaccaaccgaaatcggcaatgcgaaatgctcaaacagacgaggctgtgcatggtccggccatgcgaacaagagcccgagcagcccacagacaagaaagggaaaaagtgtctgcggacgaagaagtctctcaaagctatccatcttcagtttaaaaactgcacgtccctgcatacttataaaccgagattctgcggggtctgctcagacgggagatgttgtactcctcataataccaaaaccatccaggctgaattccaatgttctccaggacagatcgtgaaaaaaccagtgatggtgattggcacctgtacatgccacaccaactgcccgaagaataacgaagctttcctacaggaactagaattaaagacaacaagaggtaaaatgtag

SEQ ID NO: 232174 - DNA, 2202 bp, synthetic construct
  misc_feature 1..2202: note = Description of Artificial Sequence: Synthetic coding sequence
  source 1..2202: mol_type = other DNA
atgcttgccaggcgtcaaagggaccccttacaggcgctgcgcaggcgcaatcaggaactgaagcagcaggtcgactctctcctcagtgagtcacagttaaaagaggcacttgagcctaacaagagacagcacatatatcagagatgcatccagctcaaacaggctatcgacgaaaataaaaacgcactgcaaaagcttagcaaggcagatgagagtgcccctgtggctaactacaaccagaggaaggaagaggagcacacactgctcgataagctcacacaacagctccagggtcttgccgtgactatatcaagggagaatatcaccgaggtgggagcacccactgaggaggaggaagaatccgaatctgaggatagtgaggactcgggaggcgaagaagaggacgctgaggaggaggaagaggagaaggaggaaaatgagagccacaagtggtccactggggaggagtacatagcagttggcgattttaccgcccaacaggttggggatctgactttcaaaaagggagaaattctgctagtgattgagaagaagccggatgggtggtggattgccaaagacgcaaagggtaacgaaggactcgtgcctcggacttacttggagccttattccgaggaagaagagggtcaagaatcaagcgaggagggtagcgaggaggacgtcgaggccgtggacgaaaccgctgatggagccgaggttaaacagagaactgatccacattggagcgcggtgcagaaagcgatatccgaggctggaatcttttgcctggtgaatcatgtctctttctgttacctcatcgtcctgatgcgtaaccggatggagacggtcgaggatactaacggatctgagactggtttcagagcctggaacgtgcaaagtaggggaaggatttttctggtgtcgaaaccagtactgcagcagatcaacactgtggacgtcctcacgacaatgggggctatacctgctggttttcgaccttccacactgtcccagcttttagaggaaggtaaccagttcagggcaaattatttcctgcagcctgaactcatgcccagccagctggcctttcgagacttaatgtgggacgctaccgaagggacaataagatcccggccaagccgcatctctctgatattaactctttggtcttgtaaaatgatccctttgccgggaatgtctatacaagtgctctcacgacacgtcagactgtgtctgtttgatggcaacaaggtactgtctaacattcacaccgtcagggccacatggcagcctaagaaacccaaaacttggaccttttccccacaagtgactagaattctcccctgcctgttggacggggactgctttatcagatctaatagtgccagcccagatcttggaatcctatttgagctggggatcagttacattagaaacagcactggagagcggggtgaactgtcttgcgggtgggtttttctcaaactgttcgacgcctccggtgtcccaattccagccaaaacctacgagttatttttgaacggtggcactccttatgaaaaaggcatcgaagtcgatccgagcattagccgcagagcccatgggtctgtgttttatcagattatgactatgcgcagacagcctcaactccttgtgaagctgaggtcactcaataggagaagccgcaacgtcctgtccctgcttcccgagacacttatagggaacatgtgtagtattcacctgctcatcttctaccgccaaattttgggagatgttctgctcaaggaccgcatgtctctccaaagcacagacctgatctcccaccccatgctggccacgtttcctatgttactagaacagccagacgtgatggatgccctcagatcttcctgggcgggaaaagaaagcaccctgaagagatcggaaaagagagataaagaattcttgaagtcaactttcctgctcgtctatcacgactgcgtcctgccccttctccactccacacgcctgccacccttccgatgggcggaggaagagaccgagacagcgagatggaaggtcatcactgatttcctgaagcagaaccaagagaaccagggcgcactgcaggcccttttatctcccgatggcgtccatgaaccttttgatttaagcgaacagacgtacgactttctcggggagatgcgcaaaaacgctgtttag

SEQ ID NO: 232175 - DNA, 1845 bp, synthetic construct
  misc_feature 1..1845: note = Description of Artificial Sequence: Synthetic coding sequence
  source 1..1845: mol_type = other DNA
atgctggcccgaaggcagagagatcctctgcaggccctgaggcgcaggaaccaagagctgaagcagcaggtcgattcactcctttccgaatcgcaacttaaagaagcgctggagcctaataaaaggcagcatatctaccagcgagtcggagctcctaccgaggaagaggaagagtccgaatcagaagactctgaggacagtggaggagaggaggaagatgccgaagaagaggaggaggagaaagaggagaacgaaagtcataagtggtcaaccggcgaggagtacatcgctgtgggcgatttcactgcacagcaggtcggcgaccttacattcaagaaaggcgagattttgctggtgattgagaagaagcctgatgggtggtggattgcaaaggacgctaagggaaacgagggcctcgttccacggacctacctggagccgtatagtgaggaggaggagggtcaagaatccagcgaggaaggatctgaggaagatgtagaggccgtcgatgagaccgctgatggggctgaagtgaaacagagaactgacccgcactggagcgcagttcagaaagccattagcgaaataaacactgtggatgtgcttactacaatgggcgctatccctgccggattcaggcccagcaccctcagccaactgctggaggaaggtaaccagttccgggctaactattttcttcagcctgagctgatgccgtcccagttggcatttagagatttgatgtgggacgctaccgaaggaaccatcaggtcccggccaagtagaattagcttgatcctcaccctgtggtcttgtaaaatgatccctcttccgggaatgtcgatacaggtgctttcacgccatgttcgtttatgcttattcgacggcaataaagtgctttcgaatatccatactgtgagggccacatggcaacctaaaaagcctaagacatggacgttttcgcctcaggtgacaaggatcctcccttgtttacttgacggggactgtttcattaggtctaatagcgcttcgcccgatttggggattctgtttgagctggggatttcctatatccgcaactctactggggaaaggggcgaactttcttgcggatgggtatttctcaaactgttcgacgctagcggcgtgccaataccggcaaaaacgtatgagcttttcctcaacggcggaaccccatacgaaaaggggatagaagtcgacccctccatctcccggagagcccacgggagtgtgttttaccagattatgaccatgcggaggcagcctcagttgctcgtgaaattgagaagcttaaaccgccgatctagaaatgtcctttcactcctgccagagacgttaattggaaatatgtgcagcattcacctgctcatcttttatagacagatcttgggcgatgtcttgctgaaggatcgtatgtccctgcaaagtactgacttgatctctcatcctatgctggctacgttcccgatgctgctggagcaacctgatgtgatggatgccctgagatcatcctgggccggtaaagaaagtacgctaaagcgttccgaaaagcgagataaggagttcctgaaatccacttttctcctggtgtatcatgactgcgtgctcccattgctccattccacccgactgcctccctttagatgggccgaagaggagaccgaaactgctaggtggaaagtaatcaccgatttccttaaacagaatcaggagaatcaaggggctttacaggcactcctgtctcccgatggggtgcacgaaccattcgacctgtcagaacagacctatgacttcctgggcgaaatgaggaagaacgccgtctag

SEQ ID NO: 232176 - DNA, 2199 bp, synthetic construct
  misc_feature 1..2199: note = Description of Artificial Sequence: Synthetic coding sequence
  source 1..2199: mol_type = other DNA
atgctggccaggcggcagagggacccactgcaagcactccgcaggcggaatcaagagctcaaacagcaagttgactcactcctctctgagagtcagctgaaggaggccttggagcccaacaagagacagcacatctaccagcgatgcattcagctgaagcaggctatcgacgaaaacaaaaatgccctccaaaaactaagcaaggccgatgagagtgcgccagtggctaattataaccagagaaaggaagaggaacatacccttttggacaaacttacccagcagttgcagggcctggctgtgactatctcacgagagaatatcaccgaagttggggctccaaccgaggaagaggaggagagcgagtctgaggactccgaagattctggtggggaggaggaagacgctgaggaggaggaagaggagaaggaggagaatgaaagtcacaaatggagcactggcgaagagtacatagccgtgggagactttacagctcagcaggtgggtgacctgactttcaagaaaggggagatccttttggtaatcgagaaaaaacctgatggttggtggatagccaaggacgcgaagggcaacgagggcctggtacctcggacatatctcgaaccttactcggaagaagaagaaggccaggagagcagtgaggagggaagtgaggaagatgttgaggccgtggacgaaaccgcagatggcgcagaagtgaagcagcgcaccgatccccattggtcagctgtgcaaaaagcgatttctgaggctggcatcttctgcctcgtgaaccatgtttcattctgttacctcattgtgctgatgcgaaacaggatggagactgtcgaggataccaatggatctgaaacgggtttccgcgcttggaatgtgcaatccagaggccgaatcttcctcgtgtctaaacccgttctgcagatcaacacagttgatgtgctcaccaccatgggcgctatacccgcaggtttcaggccaagtacgctgtcccaacttctggaggaaggcaaccagttccgggcaaactactttctgcaaccggagctcatgccctcgcagctggcgttcagagacttgatgtgggatgcaactgaaggaacaattcgatcccggccttcacggatttcactgatcctaacactttggagctgtaagatgattcctctgcctggcatgtcaatccaggtgctgtcaagacacgtgaggttatgcctgtttgacgggaataaggttttgagtaacatccacacagtcagggcgacatggcagccaaaaaagcctaaaacatggacgtttagccctcaggtgacacgcattttgccctgcctcctggatggtgattgcttcatcaggagcaatagcgcaagccccgacctgggaattctgttcgaactggggatttcctatatccgcaactccacaggagaacgcggagagctctcctgcggctgggtgtttctgaaactgttcgacgctagcggggtaccaatccctgctaagacttacgagctgttcctgaacggcggtaccccctacgaaaaaggcatcgaagtggaccctagtatcagccgaagagcccacggcagcgtgttctaccaaataatgactatgcggaggcaacctcagctactcgtgaagcttcgcagcttaaatcggagatcaagaaacgtattgagcttactccctgagactctcattgggaatatgtgctccatacacctgctaatcttttacaggcaaatcctgggggatgtgcttctcaaagaccgtatgagcctccagagtactgatctgattagtcaccctatgctggcaacgtttcctatgcttttggaacagcccgacgtgatggacgctctcaggagctcttgggcgggaaaagagtccaccctgaaaaggagcgagaagcgcgataaagagttcctcaaatccactttcttactcgtctatcacgactgcgtgctgccgcttctccattctactcgactccccccattccggtgggctgaggaagaaactgagaccgcgaggtggaaagtgatcacagacttcttaaagcagaatcaggaaaatcagggagcattgcaggctctccttagcccagacggggtgcacgagcccttcgacctctccgagcagacctatgacttcctgggcgaaatgcggaagaacgcagtttag

SEQ ID NO: 232177 - DNA, 2034 bp, synthetic construct
  misc_feature 1..2034: note = Description of Artificial Sequence: Synthetic coding sequence
  source 1..2034: mol_type = other DNA
atgttggccagacgccaaagagacccacttcaggcgctcaggcgtagaaaccaagaacttaagcaacaagtagactcgttactgagtgaatcacagctcaaagaggcattggaacccaataaacgccaacacatatatcaaagatgtatccagctgaagcaagcaatcgatgagaataaaaacgctttacagaagttaagcaaggcggatgagtctgccccagtggcaaactataatcagaggaaagaggaagaacacacgctgctcgataagctgacgcagcagctgcaagggctggccgtgacaatctcccgggagaacataaccgaggtgggcgcacctacagaagaggaagaagagagcgagagtgaggactcagaggacagcggaggcgaagaggaggacgcagaggaggaggaggaagaaaaagaggaaaatgaatctcacaaatggagcaccggcgaagaatacatcgcggtcggagacttcaccgcacaacaggtgggcgacctgactttcaagaagggagagattctgctggtgattgagaaaaaaccagacggatggtggatagccaaagacgcgaaggggaacgagggtctggtgccaagaacttacctcgaaccatattccgaggaagaggaggggcaggaaagcagtgaggaggggagtgaggaggatgtggaggcagtcgatgagacagctgacggagccgaagttaagcaaagaaccgacccacactggtccgctgtacagaaggcaatttcagaacaaattaacacagtagatgttctgacgacgatgggcgcaatcccagccggatttcggccaagtaccctatctcagctccttgaagaagggaatcagttcagggcaaactattttctgcaaccagaattgatgccgagccaactggccttccgcgaccttatgtgggatgctacagaagggacaattaggagccgacccagtcggatcagtctcattctgacactttggagctgtaaaatgattccactgcccggtatgtccatccaggttctcagccgccatgttcgactgtgcttattcgatggtaacaaagtcttgtccaacatccatactgtgagggcgacatggcagccaaagaaacccaaaacctggacattttcaccgcaggttacccggattctgccctgcttactcgatggcgattgcttcatcaggtcaaattctgcctccccagatctgggcatcctgtttgagctggggatctcctacataaggaactccaccggcgaacggggagaactatcgtgcggatgggtattcctgaagttgttcgatgcctccggtgtgccaatcccagccaagacgtacgagctattccttaatggcggtaccccttatgaaaagggaatagaagttgatccatccatatcaagaagggcccacggaagcgttttctaccaaatcatgaccatgaggcggcagcctcagctgctagtgaagttgcgctccctcaaccgacggagtaggaatgtgctgtccctcctacctgagaccctcatagggaatatgtgctccattcatctgctgatcttttacagacagatcttgggcgacgtcctcctaaaggacaggatgtccttacagagcaccgatttgatcagtcacccaatgctggctacatttccaatgctgttggaacagccagatgtcatggacgctctgagaagctcatgggccggtaaagagtctactctcaagagaagcgaaaagagagacaaagaatttctcaagagtacgttccttctggtctaccacgattgtgtacttccactgctgcacagtacccgactgcccccttttagatgggccgaagaagaaacagagaccgccagatggaaggtcatcacagatttcctcaagcagaatcaagaaaatcagggcgcacttcaagccctgctcagtcccgatggtgtccatgagccattcgacctgtcagagcaaacatacgattttctaggcgagatgagaaaaaatgccgtatag

SEQ ID NO: 232178 - DNA, 2115 bp, synthetic construct
  misc_feature 1..2115: note = Description of Artificial Sequence: Synthetic coding sequence
  source 1..2115: mol_type = other DNA
atgggcacagcttcttcactggtttcaccagcgggtggggaggtcatcgaggatacttatggcgctggaggaggtgaagcttgtgagattcctgtcgaggtgaagcctaaagccagactccttcgcaattccttccgcagaggagccggtgccgctgccggagcgggtccagggagcttgcccaggggggtcggcgctggaggtctgctgggtgctagtttcaaatccaccggcagttccgtgcctgaactcgagtatgccgctgctgagtatgagagactgaggaaagagtacgagatctttagggtatcaaagaaccaggaactcctatctatgggtaggcgagaggccaagttggacacagagaacaagcggctgcgggcagaactccaagctctccagaagacgtatcagaagattttacgcgaaaaagagagtgccctggaagctaagtaccaggcaatggaaagggccgctaccttcgagcacgatagagacaaagtcaagcgtcaattcaaaatatttcgtgagacgaaggaaaatgagattcaggacctgcttcgagccaagagggaattggaaagtaaactgcagagactccaggcccaggggattcaggtcttcgatccaggtgagtctgactccgacgacaattgtaccgatgtgacggcagcgggaacccagtgcgagtactggaccggtggggctctggggtctgagccgtctatcggtagcatgatccagttgcagcaatcttttcgtggccctgagtttgcacattctagcatcgacgtggaggggccatttgccaatgttaatagggacgattgggatattgccgtggcctcacttctgcaggtgacgccacttttcagccacagtctgtggagtaacaccgtgaggtgttacctgatctacacagacgagacacagccggagatggacctgttccttaaggactattctccaaaattgaagagaatgtgcgaaaccatgggctacttttttcacgcggtttacttccccatagatgttgagaatcaatacttgacagtcagaaaatgggagatcgaaaagagttctcttgtcattctgtttattcatctgaccctcccctcactgctcctggaagattgcgaagaggccttcctcaaaaacccagagggtaagcccaggctgatctttcacaggctggaagacggtaaggtgagcagcgattctgtgcagcagctgatagatcaggttagtaacctaaataaaaccagtaaagcaaaaataatcgaccatagtggagacccggcagagggtgtttacaaaacctatatctgcgttgagaagattatcaaacaggacatcctgggcttcgagaacacagacctggagactaaagatctgggatccgaggactcaattccggaggaggacgacttcggagacgttctttgggatatccatgacgagcaggagcagatggaaactttccaacaggctagtaattctgcccatgagcttgggtttgagaagtattaccaacgcctgaatgatctggttgccgcacctgcccctattcctccactgctggtcagcggtgggcctggctccggcaagtccctcctgctgtccaagtggattcagttgcagcaaaagaatagcccaaacacgctaattctgtcacactttgtcggcaggcccatgtctacatcctctgaaagctcattgattatcaaaagactgacactgaagctgatgcaacactcctggtctgtgtcggccctcactctcgaccccgcaaaactcctggaggagttccctcgttggctggaaaagctttccgctcgccaccagggcagtatcatcatcgtgattgactctatcgatcaggtgcagcaggtcgaaaaacacatgaagtggttgattgaccctctccccgtaaatgtccgagtgatcgtgtccgtgaacgtggagacatgtcccccagcgtggcgtctgtggcccaccctgcatctggacccattatcgcccaaggatgctaaatctatcatcattgctgagtgtcacagtgtagatataaagctgagtaaggagcaatgctgggagtctcggcagttccgctag

SEQ ID NO: 232179 - DNA, 3993 bp, synthetic construct
  misc_feature 1..3993: note = Description of Artificial Sequence: Synthetic coding sequence
  source 1..3993: mol_type = other DNA
atgggaaccgcaagcagcctcgtgagtccagcaggcggtgaggtgatagaagacacatatggagccggaggcggagaggcctgcgagatacccgtcgaggtaaagccaaaggccaggctgcttcggaactcctttaggcgaggggcaggagcagccgctggcgctggacccggatcgctgccaaggggcgtaggcgctggagggctgctgggagcttcattcaaatccaccgggtctagcgtcccagaactggagtatgccgcagcagagtacgaacgactcagaaaggagtacgagatctttagggttagcaagaatcaggaattactgagcatgggtcgccgagaagccaaattagataccgaaaataaaaggctcagagctgaactgcaagcgctccagaaaacttatcagaagatactgagggaaaaagagtcggctctagaggccaagtaccaggcaatggagcgcgctgcaactttcgagcacgatcgggataaggtgaaaaggcagttcaagatatttcgcgagaccaaggaaaatgagattcaggatttgctaagagctaagagggaacttgagtccaaactgcagaggctgcaggcacaggggatccaggtgttcgatccaggagaaagcgattctgacgacaactgcactgatgtcaccgccgctggaacgcagtgtgagtactggactggcggtgctctgggctcagaaccttccataggatccatgattcagcttcagcagtcatttaggggacccgagtttgctcatagttccattgatgtggagggcccttttgctaatgtgaaccgggatgattgggatattgcagtggcatctcttctgcaggttacacctctgttttctcattccctgtggtctaatactgtgcgatgttacctaatctacacagatgaaactcagccggagatggatctatttctcaaagattattccccaaagcttaagcgcatgtgcgagacgatggggtacttcttccacgcggtctatttccctattgatgtggagaatcagtacctgaccgtgcggaagtgggaaattgagaaaagctcactggtgatcctgttcatccatttaaccctgcctagcttgctcctcgaggactgtgaggaagcattcttgaagaaccccgaaggtaaacctcgattgattttccaccgactggaggacggtaaagtgagttccgacagtgtgcaacagctgattgatcaagtaagcaatctgaataagacatctaaggctaagatcattgaccactcaggtgacccggctgaaggggtttataaaacttacatctgcgttgaaaaaatcatcaaacaagatatccttggcttcgaaaataccgacctggaaaccaaggacctgggcagcgaagactccattccagaagaggatgatttcggtgatgttttatgggacatccatgatgagcaagaacagatggagactttccaacaggcaagcaactccgctcacgaattggggtttgaaaaatattaccagaggctgaacgatcttgtcgcggctcccgctcccatccctcccctcctggtgtcaggagggccagggtccggaaaatctctgctactttctaagtggatccaactgcaacagaaaaactcccctaacacactgattctcagccatttcgtgggaaggccaatgtccacaagtagcgaatccagccttattataaaaaggctgacactgaaactcatgcaacactcctggtctgtgtctgccttaacactggaccccgctaaactcctggaagagttcccacgttggctcgagaaactgtcagctcggcatcagggttccatcatcattgttattgattccattgaccaagttcaacaggtagagaaacatatgaagtggcttatcgacccgctgcccgtaaatgtcagagtaatcgtctctgtgaatgtcgagacgtgccctcctgcgtggaggctatggccaactctgcatttagaccccctctctcctaaagacgcaaaatcaattatcatcgcagagtgtcactccgtcgatataaagcttagcaaggagcaggaaaagaagcttgaacggcactgcaggagcgccacaacctgcaatgcattgtatgtaacacttttcggaaagatgatcgctagggccggacgagccggaaatttagataagatactgcatcagtgcttccagtgtcaagacacgctgtctctgtaccggctggtgcttcacagcattcgcgaatcaatggccaacgatgtggacaaggaactcatgaaacagatactttgtttggtcaacgtctcccataatggtgtctccgagtccgagctgatggagctctaccccgagatgtcttggacctttctgacttcacttatacacagcctctataagatgtgtctgctgacgtacggctgcgggctattacgattccagcatcttcaagcttgggaaactgtcagactagagtacctggaggggccaaccgtcacctcgtcatatcgccagaagctcattaactacttcacgctacaactgtcgcaggatagagtgacctggcggtcagctgatgaactcccctggctcttccagcagcagggctcaaagcagaaactccatgattgtttgttaaacctgttcgtgtcccagaatctatacaagcggggacacttcgctgaactgctatcctactggcaattcgtgggcaaggataagtccgcaatggctacagagtacttcgacagcctaaagcaatatgagaaaaactgcgaaggcgaggacaatatgtcctgtttggcagatttatacgaaaccttgggcagatttctgaaggacttaggactgctgagtcaagccattgtaccactgcaacgcagtctggaaattagggaaaccgccctcgatccagatcaccccagagttgcacagagcctccaccaactcgcttcagtttacgtgcagtggaagaagttcggcaacgccgaacagctttataaacaagcccttgagataagcgagaacgcatacggagcagaccacccctacaccgccagggagctggaagcactcgccaccctgtatcagaaacagaataaatacgagcaggctgagcatttccggaaaaaaagctttaagatccaccaaaaagccataaagaaaaaagggaatctgtacgggtttgcactgctgagacgcagagcgctgcagcttgaagaattgacgctcgggaaggacactccagacaatgcaaggactctgaatgaattgggagtgctatactatctgcagaacaacctggagactgccgatcagtttcttaaacgatcactcgagatgcgggagcgcgtcctggggccagatcacccggactgtgctcaatctctgaataacctggcggctctgtgcaatgaaaaaaaacagtacgacaaggctgaggagctttacgagagagcccttgacatcagacgacgggctctagcccctgaccacccgtcgctagcttacacagtcaagcacctggcaattctgtataaaaagatggggaagttagacaaagccgtgccgctgtatgagctggctgtggagatcagacagaagagtttcggacctaagcacccgtcggtggcaaccgccctcgtgaacctggccgttctctattcgcagatgaagaagcacgtagaagctctcccgctgtacgagcgcgctttgaagatttatgaggactctttgggacgaatgcacccaagagtgggcgagactctcaagaacctagcagtgttgagctatgagggaggagacttcgaaaaggccgcagagctgtacaaaagagcaatggagattaaggaggcggaaaccagtcttcttggcggtaaagcccctagtagacattcatcctctggcgataccttcagtttgaaaacagcacatagccctaacgtttttttgcagcagggccagagatag

SEQ ID NO: 232180 - DNA, 720 bp, synthetic construct
  misc_feature 1..720: note = Description of Artificial Sequence: Synthetic coding sequence
  source 1..720: mol_type = other DNA
atggggaccgcaagttcgttggtttcaccagctggaggagaagtgattgaagacacctatggcgcaggcggaggtgaggcatgtgagattcccgtggaagtgaagccaaaagcgagactgctgcggaactctttccgtcgtggggcaggcgcagctgcaggcgcaggcccaggcagcctgccacggggtgtgggagcgggtgggctgctgggcgcatcgttcaagtcaaccggatctagcgtgcccgagctagaatacgctgccgctgaatatgagcgactacggaaagaatacgaaatctttcgtgtttccaagaaccaggagctgctgagtatgggtcgccgagaggctaaactggacaccgagaataaacggcttcgcgcagaattacaggccctgcagaaaacttatcagaagatcctgagggaaaaagaaagcgccctggaagcaaaataccaagccatggagagagccgcaacatttgagcacgatagagataaagtaaagagacagtttaagatcttcagagagactaaagagaatgagatccaggatcttctccgggctaagcgggagttggaatccaagctgcagagacttcaggcccagggcatccaagtgttcgaccctggagagtccgacagtgatgacaattgcaccgatgttaccgtgagtctagagagcgaccaacatcccggtatattcatagctaatttctag

SEQ ID NO: 232181 - DNA, 453 bp, synthetic construct
  misc_feature 1..453: note = Description of Artificial Sequence: Synthetic coding sequence
  source 1..453: mol_type = other DNA
atgggcactgcttctagtttggtgtctcctgctgggggtgaggtgatagaggacacctatggagcaggcggaggagaggcttgcgaaatccctgtggaggtgaaacccaaggctaggcttctcaggaactccttcaggcgaggtgcaggtgccgcagcaggagccggtcctggttcccttcctcggggtgtcggagctggaggcctcctcggcgcttccttcaagagtaccggatctagcgtgccggagctggagtatgctgccgcagagtacgagcggctccggaaagagtacgaaatttttcgggtgtcaaagaatcaggaattactgtccatgggcagacgcgaggccaaactggacactgaaaacaagcggctgagggccgagttgcaggggctcgccgcagtagccagaagccgattaactgccacctggaactcctgggcccaatag

SEQ ID NO: 232182 - DNA, 1914 bp, synthetic construct
  misc_feature 1..1914: note = Description of Artificial Sequence: Synthetic coding sequence
  source 1..1914: mol_type = other DNA
atcatcgcaaatgcgggtcgggcaggaaacttagataagatcttgcatcagtgtttccaatgtcaagatacactgagcctgtatcggctcgtcttgcacagtattcgcgagagcatggccaatgatgttgacaaggagttaatgaagcagatcctttgcctggtcaacgtgtctcataatggggtatcggagtctgagctgatggagttgtacccagaaatgagctggacattcctcacctcccttatccattcattgtataagatgtgtctgctgacctacgggtgcggcctgctgaggttccagcatttgcaggcttgggagaccgtccggttggaatatcttgaaggaccaacagtgacaagctcatacaggcagaagcttatcaactactttaccctgcaactgtcgcaggaccgggtcacatggagatcagccgatgagttgccgtggttatttcaacagcagggcagcaagcagaaactgcacgactgcctccttaacctctttgtatcccaaaatctgtacaaacggggacactttgcagaactgctgtcttattggcagttcgtgggcaaagataaaagtgcaatggcaaccgaatatttcgactccctgaaacagtatgaaaagaattgcgagggagaagataacatgagctgcttggcagatctgtacgaaactttgggccgattcctgaaagacctggggctcctttcacaagccatcgtgcctctgcaacggtcccttgaaataagagaaacggcccttgatcctgaccacccaagagtggctcagtccctgcaccagctcgcctctgtgtacgttcagtggaaaaagttcgggaacgccgagcagctatacaagcaggccctggagatctccgagaatgcttacggggcagaccacccttacacagctagggaactcgaagctctggctaccctgtatcagaagcagaacaagtacgagcaggccgaacacttcaggaaaaaaagctttaagatccaccagaaggcaattaaaaagaagggcaacctatatggcttcgcccttctccgacgccgagcactgcagctggaggagctgactctggggaaagatacccctgacaatgctagaacccttaacgaattgggcgtgttgtactatctgcaaaacaacctggagactgccgatcagtttctcaagaggtccctggaaatgcgcgaacgagtgttggggccagaccatccagactgtgctcagagcctgaataatctggcagcactgtgtaatgagaagaaacagtacgataaagctgaagaattgtacgagcgggctctggacataaggaggcgcgcactcgccccagaccatcccagccttgcatacacagtaaagcacctggccatcctctacaagaagatgggcaaacttgacaaagcagttccactgtacgaattggcggtggaaatccggcaaaagagctttggccctaagcatcccagcgttgccactgcactggtcaatctggcagtgctctactcccagatgaaaaagcacgtcgaggcactgccactttacgaaagagcccttaagatttatgaagactccctcggacgcatgcaccccagagtgggagagaccctgaagaatctggccgttctctcgtacgaaggcggtgatttcgagaaggcggctgagctgtataagcgagccatggagattaaagaggccgaaactagcctgctggggggaaaggctccgtcccggcatagcagctctggcgatacgtttagcctgaaaactgcacacagccctaacgtttttctgcaacaggggcaacgcaaggtccagtctaatctactctcacccgaaggcctgtctaatatctgcgcccaagaaaagacaacaaggtttaccagcagctag

SEQ ID NO: 232183 - DNA, 1236 bp, synthetic construct
  misc_feature 1..1236: note = Description of Artificial Sequence: Synthetic coding sequence
  source 1..1236: mol_type = other DNA
atgagctgcctggccgacctgtatgaaactctcggcagattcctaaaggacctcggcctgctcagccaggccatcgtgcccctacagaggtcactcgagatacgggagaccgctctggaccccgaccatcctcgcgtggcccagagcttgcatcaactggcctcggtatacgtacaatggaagaaatttggaaatgccgagcagctttacaaacaggcgttagagatctctgagaacgcgtatggtgctgatcacccctacaccgctcgcgaattagaagctcttgctacgctgtaccagaagcagaataagtacgagcaggccgaacactttagaaagaaaagcttcaagattcatcaaaaggccattaaaaagaagggcaatctgtatggattcgctctgcttcggagaagagcactgcagttggaggaactgacgttgggaaaagacactccagataacgccagaactctgaatgaactcggcgtgctttattatcttcagaacaacttggaaacagccgatcagttcctgaagcgtagcctggaaatgagagaacgggttttaggtcccgaccatcctgactgcgcccagtcccttaacaatctggcagccctttgcaatgagaagaaacagtatgacaaggcagaagagttatacgaacgcgcattagacatccgcaggcgggctcttgcaccagaccatccttcgctggcttacacagtgaaacatttggcaatcctttataaaaaaatgggaaagcttgacaaggcagtgccactgtacgagctcgcagttgaaatccgccagaaatcttttggcccaaagcaccccagcgttgccacggctcttgtgaacctggccgtgttgtattcccagatgaagaagcacgtggaggctcttcctttgtatgaacgagccctaaaaatctacgaggatagcctaggacgaatgcatccccgtgtgggagaaaccctcaagaatttagccgtcttgtcctacgaggggggtgatttcgagaaggccgctgaattgtataagagggccatggagatcaaggaagccgagaccagtctgttaggtgggaaggctccttccaggcactcatcatctggcgacacgttctcacttaagaccgcccacagtccaaatgtgttcctacagcagggtcaaagagccggtaaatccaatccaacgttctacctgcagaagggcttccagacttacgtcctttag

SEQ ID NO: 232184 - DNA, 4281 bp, synthetic construct
  misc_feature 1..4281: note = Description of Artificial Sequence: Synthetic coding sequence
  source 1..4281: mol_type = other DNA
atgaacgactggcacagaatttttacgcagaatgtgctggtgccccctcaccctcaaagggcacggcagccgtggaaggagagcacggctttccagtgcgtgctcaaatggctagacggcccagttatccggcagggggtgctggaggtgctgagcgaggttgagtgccacctgcgagtgagcttctttgatgtgacctatagacacttctttggacgcacatggaagacaaccgtcaaaccaactaagcgccctccatccagaatcgtgttcaatgagcccctgtacttccacacgagtctaaaccacccccatatcgtggctgtggtggaggtggttgccgagggtaagaagcgcgatgggtctctccagacactgagctgcggctttggcatcttgagaatttttagcaaccagcccgatagccccatttctgcatctcaggataagcgactgcggctgtaccatgggacacctcgcgcactgctgcatccactccttcaagatcccgctgaacagaaccggcatatgactctcatcgaaaattgcagccttcagtacacactaaagccacatcctgctttggaacccgcattccacttgctgccagaaaacctgctggttagtgggctgcagcaaattcccggtctgctccccgctcacggtgagagcggcgacgccctgaggaagcctagactgcagaaacctattacagggcacctggacgacctcttcttcactttataccccagcctcgagaaatttgaggaggaactgctcgagttgcacgtgcaggaccacttccaggaagggtgtggaccgctggatggtggcgctctggaaattctggagaggagactgagagtgggggtgcacaacggcctcgggttcgtccagcgcccacaggtggtggtactggtaccagaaatggatgtggccctgacacggtctgcctcgttctctaggaaagtcgtcagttcctcaaagacaagcagtggatcgcaggctctggtcctgaggtccaggctgcggttacccgagatggtgggacaccctgcattcgcggtaatcttccagctcgagtacgtcttttcaagccccgcaggggtcgatggaaatgccgcttctgtcaccagcctctctaacttagcctgcatgcacatggtccgatgggcagtgtggaacccactgctggaggcagattccggaagggtgaccttaccattgcaaggcggtattcagccaaatccctcacactgccttgtgtacaaggtgcccagcgccagcatgtccagtgaagaggtgaaacaggttgagagcggaaccctgcggttccaattctccttgggcagtgaagagcatctcgatgccccaactgagcctgtctccggccctaaagtagaacgcaggccctctcggaaacctccaactagcccaagctcgcctccggcacccgtgcctcgggtgctcgccgctccacaaaactccccagtcggccctggtctctcaatttcccagctggccgctagccctaggagccctacgcagcactgtctggcgaggcctacttctcagctcccccatgggtcccaggcctctcccgcacaggcacaagagttcccactcgaagctggaataagccacctggaggcggatttaagccagaccagcctagtgcttgagacttcaattgctgagcagctgcaggaactgccattcaccccgcttcatgctccaatcgtagtagggacacagacacgctccagtgccggtcagcctagccgcgcttctatggtactgctgcagagctctggcttccctgagatcctggacgccaacaagcaaccagccgaggctgtatcagcgacggaacccgttacgtttaatccccagaaggaagaaagcgactgtctccagagcaacgaaatggtgctgcagtttcttgcgttctctcgagtggcacaggactgtaggggaacgtcctggcccaaaacagtctattttacctttcaattctaccgcttccctccggctacaacacctcggctgcagttggtgcagctggacgaggctgggcagccttcatctggtgctctgactcacatcctggtgcctgtttcaagggatggtaccttcgacgccggtagtcccggtttccagcttcggtacatggtgggtcccggattcctcaagcccggtgagcgaaggtgtttcgccaggtatctcgctgtgcagaccctgcagatcgatgtctgggatggggacagcctgctgctcattggttccgccgctgtccagatgaaacaccttctgaggcaggggagacccgcagtacaggccagccacgaattggaggttgtcgccacagagtatgagcaggacaatatggtggtctcaggtgatatgctcggcttcgggagggtcaagcccatcggggtccattctgttgtaaagggacgcctgcatctcacgttagctaatgtgggtcacccttgtgaacagaaggtgcgcggatgcagcaccttgcccccatctcgatcaagagtcattagtaacgatggggcttccaggttttccggaggctccctgctgacgacggggagcagtaggcggaagcacgtcgtccaggcacagaagctcgccgacgtcgacagcgaactcgccgcaatgctcctcacacacgccagacaaggaaagggaccacaggatgtctccagggaatccgatgccaccagacgtaggaaactcgaacggatgaggtccgtccgtctccaagaggcaggtggtgatctgggcagacgaggaacatcagtgttagcacagcagtcagtccgcactcagcatctcagggatctccaagtcatcgccgcatatagggagcgtacaaaggcagaatctatcgcgagcttgctgtcactggccattactaccgagcacacactgcacgcgactctcggcgtggcggaatttttcgaattcgtgctgaagaacccccacaacacacagcatacagttacagtggaaattgacaatcccgaactgtctgtgatagttgactcacaagaatggcgcgacttcaagggagcagcaggtctgcatacccctgtggaagaggatatgtttcatttgcgcggttccctggccccacaattatacctgagaccacatgaaacagctcacgttcctttcaagtttcagagcttcagtgcaggtcaactggccatggtccaggcaagcccgggattgagcaacgagaagggtatggatgccgtgtccccctggaaaagttctgctgttcccactaagcacgccaaagtcctgtttcgggcaagcggaggaaaaccaatcgccgtcctctgcctgacagtggagctacagcctcacgtcgtggatcaggtgtttcgcttttaccatcccgagctcagctttctgaaaaaagccattagattgcccccatggcatacgttcccaggcgcacccgttggtatgcttggagaggatccccctgtccacgttcggtgtagcgaccccaatgtcatttgcgaaactcagaacgtgggcccaggggaacccagggacatcttcctgaaagtggccagcggaccctctccagaaatcaaagatttttttgtaatcatttattcggataggtggcttgctacgccaacgcagacctggcaggtttatctgcactccttgcagagagtcgatgtgtcctgcgtggccggacagttgacaaggctatccctcgtcctccgaggcacgcagacggtgcgaaaggtcagggctttcacgagtcatccccaggagctgaagacggatcctaaaggggtctttgttctcccaccaaggggggttcaggaccttcatgtgggggtaagaccccttagggccggaagccggttcgtgcatctgaatcttgtcgacgtggattgccaccagcttgtggccagttggcttgtgtgcctgtgttgccgacagcccctgatttccaaggcctttgaaattatgcttgcagcgggtgaaggtaagggagttaataagcgaatcacgtatactaacccttacccgtcacgtcgtaccttccacctgcattctgaccaccctgagttgttgcggttccgcgaggacagctttcaggttggcggaggcgagacctacacaattgggcttcagttcgccccaagtcaacgagtaggagaggaagaaattctgatttatatcaacgaccatgaagacaaaaatgaggaagccttctgtgtcaaagtgatctatcaatag

SEQ ID NO: 232185 - DNA, 546 bp, synthetic construct
  misc_feature 1..546: note = Description of Artificial Sequence: Synthetic coding sequence
  source 1..546: mol_type = other DNA
atggtcctcttgcaaagcagcggattcccggaaatcttagacgctaataagcagccagccgaggccgttagtgcaaccgaacctgtgacatttaatcctcagaaggaagagtccgattgtttgcagtccaatgaaatggtcctgcaatttctggctttctccagagtcgcccaggactgtagaggcacctcttggcctaaaacagtgtacttcacatttcaattctaccgctttccacccgctacgaccccaaggttacagctcgtccagctggacgaggctggacaaccctcctctggggcactgacccatattctggtcccggtcagcagagacggtaccttcgacgctggttcccctgggtttcaactccgatatatggtgggtcctggcttcttaaaaccaggcgagcgccgttgtttcgccaggtacctggcagtacagacgctccagattgatgtgtgggatggcgacagccttctgctgatcggctcagccgcagtccagatgaaggaaacctcacatatcttttctgtttcccaatag

SEQ ID NO: 232186 - DNA, 3606 bp, synthetic construct
  misc_feature 1..3606: note = Description of Artificial Sequence: Synthetic coding sequence
  source 1..3606: mol_type = other DNA
atggccctggggacaactctgagggcgtcccttctgttgcttggcctattgactgaggggctcgcccagttagctatccccgcttcagtcccgcgtggcttttgggcgctgcctgaaaacttgacagtcgtggagggtgcttcggtggaactcaggtgcggggtgagtacacccggaagtgctgtgcagtgggctaaggatggcctgctgcttggccctgacccgcgaatacctggcttcccacgataccgactagagggcgacccggctcgaggggaattccatctccacatcgaagcgtgtgatctttccgatgacgcagaatatgagtgccaggtagggaggtccgagatgggaccagaactcgtctcgcctagagttattctgagtatattggtgccacccaagctgctcttgttgacacccgaggctggcaccatggtcacatgggtggcaggccaggagtatgtggttaactgcgtttcaggtgatgctaagccagcgccagatatcacaattctcctgagtggacagaccatcagcgacattagtgctaacgtgaatgaggggtctcagcagaaactgtttactgttgaagcaaccgcgagagtgacccccaggtcctcagataaccggcaactcttggtgtgtgaggcctcctctccagcattggaggcccctattaaagcatcattcacggtcaacgtgctatttccccctgggccacctgtcatagagtggccgggtttggacgaaggccatgttcgagctggtcagtcccttgaactaccttgcgtggctcgtggtggcaatcccttagcgactctgcagtggttaaagaacggccagccagtgtccactgcatgggggaccgagcacacacaagcagtggccaggtccgtgctggtcatgaccgtgaggcccgaggatcacggagcccagctgagctgtgaggctcataactctgtgtccgcgggtacccaggaacacggtatcactttgcaggtcaccttccccccatcagcaatcatcattcttggatctgcctctcagacagaaaacaaaaatgtgaccttgagctgcgtatctaagtcttctaggcctcgggttttattgcggtggtggttgggatggcggcaacttctgccgatggaagagacagttatggacggactgcatggagggcatatttcaatgtccaaccttactttcctggccagacgcgaagacaacgggttgactcttacctgcgaagcatttagcgaagcattcaccaaggagactttcaaaaagagtttgattctgaacgtaaaataccctgcccagaaactgtggatcgaagggcctcctgagggacagaaactgcgagcaggaactcgggtgcggctggtatgtctggcaataggtggaaaccctgagccatctctgatgtggtacaaagacagtcgaaccgtcactgaaagcaggctgccccaggagtcccggagggtgcacctcggatcagtggagaaatcaggttctactttttccagagaactggttctcgtgaccgggccatctgataaccaggctaaattcacatgtaaagctggtcaattatctgccagcacccaactggcagtgcagtttcccccaaccaatgtcacaattctggccaacgcgtccgcccttaggcccggtgatgccttgaatttgacttgtgtgtccgtctcatcaaaccccccagttaacttgagctgggataaagaaggggaaaggttggagggcgtggccgctccccctcgtagggcgccttttaagggatcagctgccgctcgatccgtgttactgcaggtgagtagtagagatcacgggcaacgggtcacatgtagggcccattccgccgagctgcgcgaaaccgtgagctccttctaccggttgaacgtgctgtatcggccagagtttctgggggagcaggtcttagtcgtgacagccgtcgagcaaggggaagctttactccctgtatccgtctccgccaacccagctccggaggcctttaattggactttcaggggctacagactatccccagctggtggccctagacacagaatcctttcatctggggctctccacctgtggaatgttaccagggctgacgatgggctgtaccagcttcactgtcagaacagcgaaggcactgccgaggctcggctaagacttgacgttcattacgcccctacgataagagctcttcaagaccccaccgaggtgaatgtaggtgggtccgtggacattgtttgtaccgtggacgcaaatcccattctgcccggtatgtttaattgggagcgcctcggggaagacgaagaggatcagagcctggatgacatggaaaagatctctcgcggtccgacaggccgactcagaattcatcacgccaaactcgcgcaggctggagcatatcagtgcatcgtggataacggcgtggcacccccagcgaggaggttgttacgcctagtggtccgattcgctccgcaggtggaacatccaaccccattaacaaaagtggcagctgcaggggactcgacaagttcagccaccctgcactgccgggctcgcggagtccctaacatcgtcttcacgtggactaagaatggtgtacctttagacctgcaggacccccgttacaccgaacatacgtaccaccagggcggagttcactcctctctgcttacaattgcaaatgtcagcgccgctcaggattacgccctttttacttgcaccgcaacaaatgcactggggagtgatcagacaaacatacagctggtaagtatttctcggccagacccgccttctggacttaaggtcgtgtccctgaccccacatagcgttggactggaatggaaacctggatttgatggtggtctaccacaacgcttttgtatcagatatgaggctctgggcacccctgggtttcattacgtggacgttgtccctcctcaagctaccacatttaccctgacaggtctgcagcccagtactcggtaccgcgtgtggctgctggcaagcaacgcactgggggatagcggcctggctgataaagggactcagttaccgatcacgacaccaggactgcatcagccttcgggggagccagaagaccaactgccaacagaaccaccatccggcatcagcgagaagacagaggctggttctgaagaggacagggtgaggaacgaatacgaagaatcgcaatggactggggagagagacacgcaaagcagcaccgtcagcacaaccgaggccgaaccatattatcgttcactgagagatttctccccacagctgccgcctactcaggaggaagtctcttactctaggggtttcacgggggaagacgaagatatggctttccctgggcacctgtatgatgaagtagaaagaacgtatccacccagtggggcttggggacccctctacgacgaagttcagatggggccttgggacctgcattggccggaggatacctatcaggaccccagggggatttatgatcaggtggccggagatctggatactctggagcccgatagcctgcctttcgaactccggggacacctggtctag

SEQ ID NO: 232187 - DNA, 3726 bp, synthetic construct
  misc_feature 1..3726: note = Description of Artificial Sequence: Synthetic coding sequence
  source 1..3726: mol_type = other DNA
atggctttgggaaccacacttcgggcaagtctgctgctgctggggctcctgaccgaaggtctcgctcagctagccattcccgctagcgttcctcggggtttttgggccttacccgaaaacttgaccgtagtggaaggcgcatccgtcgagttgagatgcggcgtgtcaactcccggatctgccgtacagtgggctaaggatggactgctcttggggccagacccccgtatccccggtttcccccgataccgcctggagggagaccccgcacgaggcgaattccacctgcacatcgaggcctgtgatctgtccgacgatgccgagtacgagtgtcaggtgggaagaagcgaaatgggaccagaacttgtaagccccagagtgatcctctccattctcgtgcctcccaaacttctgctccttacccccgaagcgggaacaatggttacctgggtggcaggccaggagtatgtcgtgaattgtgtctcgggcgatgccaagccagctccagatatcaccatcctactctccggtcagactatcagcgacatatctgccaacgtaaatgaggggagccagcagaaactatttaccgtagaagccaccgccagggtgactcccagatcctctgacaatagacagctccttgtgtgcgaagcctccagtccggctctagaggccccaatcaaagccagttttaccgtcaatgtactcttcccccctggcccacctgtgatcgagtggccgggactggacgagggccatgtgcgagctggccagtctctggaactgccatgtgtggccaggggcggaaatcccctggccacattacaatggctcaaaaatggccagccagtgagcaccgcttggggtaccgaacacactcaagccgtggcgagaagtgtgctcgtgatgactgtgcgccctgaagaccatggcgcacagctgtcgtgtgaggcccacaacagtgtctccgctggtactcaggaacacggcatcacactgcaggttaccttcccgccttcggcaatcattatacttggctcagccagtcagaccgagaataagaatgtgactctgtcttgtgtgtcaaaatcatcgagacctagagtgctgctgcgatggtggctcggttggcgacagcttctccccatggaggagaccgtgatggatggactgcatggcggacatattagcatgagtaacctgacgtttttggccagaagagaagacaacggtctgaccctgacatgcgaggccttttccgaggctttcacaaaagaaaccttcaagaaatccctgattctgaatgtgaagtacccagcccagaagctttggatcgaaggcccaccagagggccagaaactaagggctggcacccgagtcagactggtgtgcctggccattggcggaaatccagagccatcgttgatgtggtacaaagattcccgcactgtaaccgaatcacgcctgccccaggagtccagaagggtgcacttgggcagcgttgagaagtcaggctccacgttcagtcgggaactcgttctggtgacgggcccaagtgacaaccaagccaaatttacatgtaaagcgggacagctgtcggccagtactcagcttgccgtgcaattcccccctaccaacgtgacaatcctggcgaatgcgtccgctctgaggcccggagacgcgctgaacctgacatgcgtgtcggtgtcctcaaaccccccagtgaacctcagctgggacaaggaaggagaaaggctggagggggtggcagccccaccccgtcgagccccttttaaaggcagtgcggctgctagatcagtgctgcttcaggtaagttctagggatcatgggcagagggtaacgtgtcgcgcacattcagccgaattgagagaaactgtgtcttccttctaccgcctgaacgtcctgtaccgccctgaatttctcggagaacaggtcctggtcgtgaccgcggttgagcagggcgaggctttgctgcctgtgtctgtatccgccaacccggctcccgaagccttcaattggacttttcgcggatacagattatctccggctggaggacctcggcatcggatcctctcatccggtgccctgcacctgtggaacgtaacaagggctgatgacggcctgtaccagctgcattgccagaatagtgaagggactgcggaagccagacttcgcctcgacgttcattatgcaccaactattcgcgctctgcaggatcctactgaagtcaatgtgggtggctccgtcgatatcgtgtgcacggtggacgccaatccgatcctccctgggatgttcaattgggagcgcctgggagaggacgaagaggaccagtcattagatgacatggaaaagatctcccggggacccaccggtaggttacggatccaccatgctaaattagctcaggcgggagcctaccaatgtatcgttgataatggggtggcacctccggcacgcaggctcctgcgcctggtagtcaggttcgcaccacaagtggagcaccctactcctcttactaaggtggccgctgcaggtgatagcacctcctcagccacattacactgcagagcaaggggcgtccccaacatcgtatttacatggacaaaaaacggagttcccctcgatctccaggacccccgatacaccgagcacacttaccaccaggggggagtccatagttcgctacttacgatcgccaacgtgtccgctgcacaggattatgctctattcacttgtaccgcaactaacgccctggggtcagatcaaactaacatccagttggtcagtatctccaggccggaccctccaagtggcctcaaagtggtgtccctcaccccacactcagtgggtctggaatggaaacccggattcgacgggggtttgccacagaggttctgcatacgctatgaggctctaggaactccaggatttcactatgtcgacgtggtccctcctcaagcaaccacattcacactcacaggcctgcagccgtccacccggtatcgggtctggctcctcgcgtcaaacgcactgggtgattccggactggctgataagggcactcaattgcctatcaccaccccaggactgcaccagccaagcggcgagccggaagaccagttgcccactgagcctccttccggcccttcaggcttacctctgctgcctgtgctctttgctctgggtggtctgctcctgctttctaatgcaagctgtgtgggcggtgtgctgtggcagcgcagactgagacgcctagccgagggaatctctgagaagacagaagctggttccgaggaagacagggtaagaaatgagtatgaggaaagccagtggaccggcgagcgcgacacacagtcctccactgtgtcaacaactgaggctgaaccgtactaccgctccctgcgggactttagcccccagcttcccccaacgcaggaggaagtttcctatagtcgtggctttacaggcgaggatgaagacatggcatttcccggtcatctgtacgatgaggtcgagagaacatacccaccctccggagcatggggcccattgtatgatgaagttcagatgggcccttgggatctccactggcctgaggacacctaccaggaccccagaggaatctatgatcaagtggcaggggatctagatacccttgagccagattccctccctttcgaacttagggggcacctggtatag

SEQ ID NO: 232188 - DNA, 1152 bp, synthetic construct
  misc_feature 1..1152: note = Description of Artificial Sequence: Synthetic coding sequence
  source 1..1152: mol_type = other DNA
atggaacgacgcgcacggtcatcctccagggagagccgcggtcggggaggaagaactccccataaggagaataaacgcgcaaaagccgaacggtcaggcggtggcagggggaggcaggaagctggccctgaacctagcggtagcggacgagcgggtacacccggtgagccgagggctcctgcggcaaccgtggtcgatgtcgacgaagtgagaggctctggagaagagggaaccgaggtggtggctctgctagaatccgagcgacctgaggaaggaactaagtctagtggactgggggcatgcgagtggttgctggtccttatctcactgctgttcatcatcatgacgtttcctttttccatctggttttgtgtgaaagtcgtgcaggaatatgagagagtgattatattcaggctcgggcaccttttgcctggtcgggctaagggcccaggtctgttttttttccttccatgtttggacacttaccacaaggtcgatcttcgcctccagacactcgaaattcctttccatgaaattgtcaccaaggatatgtttataatggaaattgacgctatctgctactaccggatggagaacgctagtctcttactatcgtcactcgcacatgtgagtaaggcagtgcagtttctggtacaaaccaccatgaagagactccttgcccaccgcagcctaacagagattctcctggaaagaaaaagcatcgctcaggacgctaaagttgctctagacagtgtcacttgcatttgggggattaaggtggaacggatcgaaattaaggacgtccgcctgcctgccggactgcagcattccttggccgtggaggctgaggcccagcggcaagccaaagtacgtatgattgcggctgaggcggagaaagctgcgagcgaatccttacgtatggccgctgaaatcttgtcaggcacacccgcagccgtgcagctgcggtacctgcataccctccagagcctcagcacagagaagccttcgaccgtagtattgccattacccttcgacctgctgaattgtctcagcagccctagcaacaggactcaaggatctctcccattcccgtctcctagcaagcctgtggagcccctgaatcccaaaaagaaggactcaccaatgctgtag

SEQ ID NO: 232189 - DNA, 948 bp, synthetic construct
  misc_feature 1..948: note = Description of Artificial Sequence: Synthetic coding sequence
  source 1..948: mol_type = other DNA
atggagcgacgagcaaggagcagctccagagagagtcggggtcgcggagggaggacgccacacaaggaaaataagagagcgaaagctgagagatctggtgggggtagaggcagacaggaagccggaccagagccgagcgggtcaggccgagccggaactcccggtgagcctcgggctcctgcggctaccgttgtcgatgtggacgaggtccggggaagtggtgaagagggcaccgaggtcgttgccctgttagagtctgagagacccgaggagggcactaaaagctctggattgggcgcatgcgagtggctgctcgttcttatctcgttgctgtttatcataatgacatttccattttctatctggttttgtgtgaaagtggtccaggaatacgagcgagttatcattttccgcctcggccacctactgccagggcgagccaaagggccaggcctgttcttctttctaccttgcttggacacctatcacaaagtcgatctacgacttcagaccctggaaattcccttccacgaggtggcccttgacagcgtcacttgcatttggggcatcaaagttgagagaatcgaaatcaaagacgtgcggctacccgcaggtctccaacatagcctcgcagttgaggctgaggcgcagagacaagccaaagttcgcatgatcgccgctgaagccgaaaaagccgcttccgaaagcctacgtatggccgcagaaattctttctgggacccctgccgctgtccagctcaggtatcttcatactttacagtcgctctccaccgagaagccgtccacagtcgtcttgcccctgccgtttgatctcctcaattgcctgagctctcctagcaatcggacccaaggatccctgccattccctagtccctctaagcccgtggagcccctgaaccccaaaaagaaggactcacctatgttgtag

SEQ ID NO: 232190 - DNA, 1284 bp, synthetic construct
  misc_feature 1..1284: note = Description of Artificial Sequence: Synthetic coding sequence
  source 1..1284: mol_type = other DNA
atgggcgctggagctacagggagggcgatggacggacctaggctactgctgttgctcctgctcggcgtgtccttgggaggggcaaaggaggcatgccccactggcctctacacccattccggggagtgctgcaaggcctgcaacttaggtgagggcgtggcccagccctgcggtgctaaccagacagtctgtgagccttgcctggatagcgtaactttcagtgatgtggtaagtgccacagagccatgtaaaccctgcaccgagtgtgtggggctccagagcatgagtgctccctgcgtggaagctgacgatgccgtctgcaggtgcgcctacggctattatcaggacgaaacaactggaaggtgtgaggcttgtcgcgtatgtgaagctgggtccggattagtattttcctgccaggacaagcagaacacagtatgtgaagagtgtccggacggaacatactcagatgaggctaaccacgttgatccatgcctgccatgtaccgtctgtgaagacaccgaaagacaactgcgcgaatgcaccagatgggcagacgctgagtgcgaagagattcccggacgttggataacccgttcaactccccctgaagggagcgattcgacagccccttcaactcaggagccagaggcgccaccagagcaagatcttattgcgagcaccgtggccggtgtggtcacgaccgtgatgggaagcagtcaacccgtcgtgactagaggtactacagacaacctaatcccagtgtactgctccatcctcgcagcggtcgtggtgggactcgtggcttatatcgccttcaaaaggtggaattcatgcaaacaaaacaaacaaggggctaacagtaggccagttaatcagacacctcccccagaaggcgaaaaactgcacagtgattcagggattagtgtggactcacaaagcctgcacgaccagcagccgcatacacagaccgcatctggccaagccttgaaaggtgacggtggcctttatagctcactgcccccagccaaacgggaagaggtggagaagttgttaaacggttccgcgggagatacatggcgtcacctcgcaggagaactgggttaccaaccagaacacatagatagcttcacacatgaagcatgtccagtgagggctctgcttgcgtcttgggcaacccaggacagtgcaactcttgatgccctcttggctgcactaaggaggatccagcgagccgatctcgtggagtctttatgctccgaatcaacagcgacctcccccgtttag

SEQ ID NO: 232191 - DNA, 1002 bp, synthetic construct
  misc_feature 1..1002: note = Description of Artificial Sequence: Synthetic coding sequence
  source 1..1002: mol_type = other DNA
atgtcagctccctgcgtagaggctgacgatgccgtgtgccgatgcgcttacggatattatcaggatgaaacaactggtcggtgtgaagcctgtcgggtgtgtgaggcgggatcaggactggtcttttcttgtcaggataagcaaaacaccgtgtgcgaggaatgtcccgatgggacgtattcagatgaggctaatcatgtagacccctgcttaccatgcaccgtgtgcgaggacaccgagagacagcttcgggagtgtaccagatgggctgacgccgagtgtgaggaaattcctgggaggtggattaccagatctacacccccagagggatcagactcaaccgctccttcgacccaggagccagaggccccacccgaacaagatctcattgcatcaacagtggccggagtggtcactactgtgatgggcagctcccaacctgtcgttacacgaggcaccactgataacctcattccagtgtattgctccattctggcagctgtagtagttgggttggtggcttatatcgcatttaagagatggaactcatgtaaacaaaacaagcaaggggctaatagcagaccagtaaaccagacccctccgccagagggcgaaaagttacattctgacagtggtatttctgttgatagtcagagcttacatgaccaacagcctcatactcagacagcctcaggccaagctctgaaaggcgacggcggactctatagcagcctgcctccagctaagcgcgaagaggtggagaagctgctgaatggctccgccggtgacacctggaggcacctcgccggagagctggggtatcagcccgagcacattgatagtttcacccatgaagcttgccccgtgagagcactgttggccagttgggccacacaagattcagccacccttgatgcactgctggctgcactgaggaggatccagcgggcagatctggtggagtccttgtgtagtgagagcactgcaacgtcccctgtctag

SEQ ID NO: 232192 - DNA, 336 bp, synthetic construct
  misc_feature 1..336: note = Description of Artificial Sequence: Synthetic coding sequence
  source 1..336: mol_type = other DNA
atggcgaacatccaccaggagaacgaagagatggagcagccaatgcagaatggggaggaggaccgtcccctgggcggaggcgagggccatcagcccgctgggaaccgtagaggacaggcgcgtaggctggcccctaacttccgctgggctatccccaatcggcagattaacgacggaatgggcggagacggcgacgatatggagatctttatggaagagatgagggagatcaggcgtaagttgagagagctgcagctaagaaattgtctgcgcattctgatgggggagttgtctaatcatcacgaccatcacgacgaattctgcctcatgccatag

SEQ ID NO: 232193 - DNA, 306 bp, synthetic construct
  misc_feature 1..306: note = Description of Artificial Sequence: Synthetic coding sequence
  source 1..306: mol_type = other DNA
atggaacagcctatgcagaacggcgaagaagaccgcccattggggggtggagagggccatcagcctgccggtaatcggcgtggtcaggcacgcagactcgcaccaaatttccgatgggccatccccaacaggcagattaacgacggaatgggtggcgacggtgacgacatggagattttcatggaggaaatgagggaaatcaggcggaaactacgggagcttcagcttcggaattgtctgcggatcctgatgggggagctgtcaaaccatcatgaccaccacgacgagttttgtctgatgccttag

SEQ ID NO: 232194 - DNA, 306 bp, synthetic construct
  misc_feature 1..306: note = Description of Artificial Sequence: Synthetic coding sequence
  source 1..306: mol_type = other DNA
atggaacagccgatgcaaaatggagaggaggatcgaccacttggagggggtgagggccaccagcccgcaggcaatcgtaggggtcaggctcggcgactggcccctaattttagatgggccattccaaatcgacaaattaatgatggcatggggggagacggagacgacatggagatttttatggaagaaatgcgagaaatcaggcgaaagctccgagagttacagctgaggaattgcctccgaatcctcatgggagagttgtcaaatcaccatgatcaccatgatgagttctgcctgatgccttag

SEQ ID NO: 232195 - DNA, 336 bp, synthetic construct
  misc_feature 1..336: note = Description of Artificial Sequence: Synthetic coding sequence
  source 1..336: mol_type = other DNA
atggccaatattcaccaagagaacgaagagatggagcagcctatgcagaatggcgaggaggacaggcctctcgggggaggcgaaggccatcaacccgcaggcaatcggagaggtcaagcccgtaggctggcccctaattttcgctgggcgatcccaaatcgacagataaacgatggaatgggtggcgacggagacgatatggaaatcttcatggaggagatgcgcgagattagacggaaactgcgggaactacagctgaggaactgtctgcggattttaatgggggaactctccaatcatcacgaccatcatgacgagttttgcctgatgccctag

SEQ ID NO: 232196 - DNA, 336 bp, synthetic construct
  misc_feature 1..336: note = Description of Artificial Sequence: Synthetic coding sequence
  source 1..336: mol_type = other DNA
atggccaatattcatcaggaaaacgaagagatggaacagcccatgcagaacggagaagaagataggcccctcggcggtggcgagggtcaccagccagctggcaaccggagagggcaagcgaggaggctggcccctaacttcaggtgggccatacccaaccgccagatcaacgacggcatgggtggagatggagatgatatggagatctttatggaggaaatgagagagattcgaagaaagctgagggaactgcagttgagaaattgcctgcgaattctgatgggggaattgtctaatcaccacgaccaccatgatgagttttgtctcatgccctag

SEQ ID NO: 232197 - DNA, 402 bp, synthetic construct
  misc_feature 1..402: note = Description of Artificial Sequence: Synthetic coding sequence
  source 1..402: mol_type = other DNA
atgatgctgaatagtgacaccatggagttagacctaccgcctactcacagcgaaacagaaagcggattctccgattgtggtggaggcgctgggcctgacggggcaggaccgggaggaccgggtggcggtcaagcaagaggtccagaaccaggcgaacccggtcgaaaggacctccagcacctatcacgggaggaacggaggcggagacgcagagccactgctaaatatcgcacggcacacgctactagggagagaatccgcgtggaggcatttaacttagcttttgccgaactgaggaagctgctgcccacactccctcctgataagaagctttcaaagattgagattctaaggctcgctatctgttacatatcatacctgaaccacgtgcttgatgtttag

SEQ ID NO: 232198 - DNA, 408 bp, synthetic construct
  misc_feature 1..408: note = Description of Artificial Sequence: Synthetic coding sequence
  source 1..408: mol_type = other DNA
atgatgctttctccagaccaagccgcagactccgatcatcccagtagcgcccattcggatccagaatctcttggaggcacagatactaaggttctcgggagtgtgagtgacctggaaccagttgaggaggccgaaggagatggcaagggtggcagtcgggctgccttgtacccccacccgcaacagctgagtcgagaggaaaagagaagacgcagacgagcaacagccaaatataggagtgcgcatgccacgagagagaggatcagggtggaggccttcaatttggcattcgccgagttgaggaagttgctgcctaccctgcccccagataagaaactgtcaaagatcgagattctccgtttggctatctgttatatatcatacctcaaccacgtcctggatgtttag

SEQ ID NO: 232199 - DNA, 408 bp, synthetic construct
  misc_feature 1..408: note = Description of Artificial Sequence: Synthetic coding sequence
  source 1..408: mol_type = other DNA
atgatgctttcacccgaccaagcggcagactcagatcatccttcctccgcacatagcgatccggaatctctgggtggcacagatacaaaagtcctgggttcggtatctgatctggaacctgtcgaagaggccgagggggacggcaaggggggttccagagcagccctgtaccctcatccgcagcagctgagccgtgaggagaagcgcaggcgacgaagagccactgccaagtatcgctcggcacacgccacacgggagcgaatccgggtggaagctttcaacttagccttcgccgaattacgtaaactgctcccaaccctcccccctgacaagaaactatccaaaatcgagatcctccgactagccatttgctatatttcttatttaaaccatgtattggacgtctag

SEQ ID NO: 232200 - DNA, 324 bp, synthetic construct
  misc_feature 1..324: note = Description of Artificial Sequence: Synthetic coding sequence
  source 1..324: mol_type = other DNA
atgatgctcagcccagaccaggcagccgattctgatcatccttcatccgcccattcagatccagagagccttggcggaactgatactaaggttctcggcagcgtatctgacctggaacccgtggaggaggcggagggggatggcaagggagggtcacgcgcagctttgtacccccaccctcagcagctgtctcgtgaggagaaaaggcgcaggcggagggctaccgcgaagtacaggagcgcccatgccactcgcgagcgaatcagagtagaagcatttaacctggcattcgcggaattgagaaagcttctacccaccttgtag

SEQ ID NO: 232201 - DNA, 1125 bp, synthetic construct
  misc_feature 1..1125: note = Description of Artificial Sequence: Synthetic coding sequence
  source 1..1125: mol_type = other DNA
atgggactgccgagggggagcttcttctggctgctgttattactgaccgcggcttgtagcgggctcctgttcgccctgtatttcagcgcagttcagcgttaccctggccctgccgctggtgcacgggacacgacctccttcgaggcctttttccagtccaaggcaagtaacagttggaccggaaaagggcaggcctgccgccaccttctacacctggcgatccaaagacatcctcacttccgtggcctattcaatctgtcaatccccgtactgctctggggggacctgtttactcccgctttatgggatcgcctgtcccagcacaaagctccttacgggtggaggggactgtcccaccaggtcattgcaagtaccctgtcactgcttaacggcagcgagtctgccaagctgtttgcccctccacgagacaccccccctaagtgtattagatgtgccgtcgtgggcaacggcggaatactgaacggctcacggcaggggccaaacatagatgcccacgactacgtcttccgactgaacggcgcagtgattaaaggctttgaaagggatgtgggaaccaagacgtcgttctacggcttcaccgttaatactatgaaaaatagcctggttagttattggaaccttggcttcacgtccgtccctcaggggcaagacttgcaatatatctttatcccaagtgacatccgcgactacgtcatgctccgatcggccatcctaggtgttccagtgcctgaaggcctggacaagggagatcggcctcatgcctactttggccctgaagcctctgcttctaaatttaagcttcttcatcctgacttcatttcttatctcactgagagatttctcaagtctaaacttattaatacccatttcggggatctgtatatgccctccacgggagccctgatgctgctgacagcactgcacacctgtgatcaagtgagcgcctacgggtttattacaagcaactattggaaattttcagatcattattttgagagaaagatgaaacccttgattttctacgcaaaccatgacctttcactggaggccgcactatggagggatctgcataaggcaggcattctgcaactgtaccaaaggtag

SEQ ID NO: 232202 - DNA, 2235 bp, synthetic construct
  misc_feature 1..2235: note = Description of Artificial Sequence: Synthetic coding sequence
  source 1..2235: mol_type = other DNA
atggcgggtcgcagcatgcaggccgcaaggtgccccaccgacgagctgagcctcaccaattgcgcagtggttaacgagaaagatttccagagcggccagcacgtcattgtccggacaagcccaaatcaccgttacacttttaccctcaaaacccatcccagcgtcgtccccggttccatcgccttttcgctgccccagcgcaagtgggccggactttctataggtcaggagatagaagtgtcactgtataccttcgataaggctaaacagtgcattggtactatgactatcgagatcgacttcctacaaaagaagtccatagactccaatccctacgatactgataagatggcggctgaattcattcaacagtttaataaccaggcatttagcgtgggacagcagctggtattttctttcaatgagaagttgttcggactgttggtcaaggacattgaggccatggatccatccattttgaaaggggaacctgcgaccggaaagagacagaagattgaggtgggactcgtcgtaggcaattctcaggtcgcgttcgaaaaagccgagaacagtagtctgaacttgattgggaaggctaaaaccaaggagaaccgccagagcattatcaatcctgactggaactttgagaaaatggggatcgggggtctggacaaggaattctccgacattttcagaagagcttttgcatcccgcgttttccccccagagatagtcgaacagatgggttgtaaacacgtgaaagggatcctgctgtatggaccaccgggatgcggtaagaccctcctggcccgtcagataggaaagatgctgaacgcgcgagaacccaaggtcgtcaatggcccagaaatcctgaacaaatacgtaggtgagtcagaagccaatatccgcaagttgttcgccgatgcagaggaagagcagagaaggttgggtgcaaattctggacttcacattattatctttgacgagatcgatgctatctgtaaacagaggggaagcatggctggcagcacaggtgtgcacgacacggtggttaatcaactgctgtccaagattgatggcgtggaacagctgaacaatattctcgtcatcggcatgaccaaccgaccagacctgattgacgaggcattactcaggcccggtaggctggaagtgaaaatggagattggcctccctgacgagaagggtcgcctgcagattctgcacattcacacagcacgcatgcgcggacatcaactcctatccgccgacgtggacatcaaggaactggctgtagagacgaaaaacttttcgggcgcagaattagaagggctcgttcgtgccgctcagtcaaccgcaatgaaccgccatataaaagcctctaccaaagtggaggtcgacatggaaaaggccgagtctctgcaagtgacccggggagactttctggcctcgcttgaaaacgacataaagcccgcatttggcactaatcaggaggactacgcctcgtatatcatgaatgggatcattaaatggggagatccggtgactagagtcttagatgacggtgagctgctggtgcagcagactaagaatagtgaccgaactcctctcgtgagtgtcttgctggagggacctcctcactcggggaagacagccttagcagccaaaatcgccgaggagagtaattttcccttcatcaaaatatgttccccagacaagatgatcggcttctcggagaccgcgaagtgccaggcaatgaagaagatcttcgatgatgcctataagagccagctgagctgtgtggtcgttgatgatatcgagcggcttcttgattacgtccctattggcccacgtttcagcaacttggttctgcaggccttgcttgtgctgctgaaaaaagcacctccacagggtaggaaacttctgattattggcaccaccagccgcaaagacgtgctccaggagatggagatgctgaacgctttttcaaccaccattcatgtgccaaacatcgcaaccggcgaacagttactggaagcactcgagctcctggggaacttcaaggacaaagagagaacaaccatagcacaacaggtgaaaggaaagaaagtttggattgggattaagaaactcctgatgctgatcgagatgagccttcaaatggaccctgaatacagagtccgcaaattcctggcactcttgagagaggagggcgctagtcccctggactttgactag

SEQ ID NO: 232203 - DNA, 888 bp, synthetic construct
  misc_feature 1..888: note = Description of Artificial Sequence: Synthetic coding sequence
  source 1..888: mol_type = other DNA
atggacaacagcgggaaagaggccgaagctatggcccttctggctgaagctgagcggaaggtgaaaaactcccagtcatttttctcgggactgtttggaggctcctcgaaaattgaggaggcttgcgaaatctacgccagagcagcgaacatgtttaaaatggcaaagaactggtctgccgctggcaatgcattttgtcaggccgctcagctccacctgcaactgcagagcaagcacgacgccgctacttgcttcgtggacgctggaaatgcatttaaaaaagccgatccacaggaggctattaattgtctgatgcgagcgatcgagatctataccgacatgggcaggttcactattgctgcgaaacaccacatttcaatcgccgagatttatgagaccgagctggtcgatatcgagaaggcaattgcacattacgaacagtcagcggactattacaagggtgaggaaagcaactcgtccgccaacaagtgtctcctgaaggtcgccggttatgctgcgctcctggagcagtatcagaaggccatcgacatctacgaacaggttggaactaatgccatggacagcccactgttgaaatactcggctaaagattacttttttaaggccgcactctgtcacttttgcattgatatgctcaatgccaagctggcagtgcagaaatatgaggaactttttccagccttctctgacagccgcgaatgtaagctgatgaagaaattgttggaagcacacgaggagcagaatgtcgactcatacaccgagtctgttaaggagtatgattccatctctcgcctcgatcagtggttgactacaatgcttctcaggataaaaaaaacaatccagggtgatgaggaggacttgcgctag

SEQ ID NO: 232204 - DNA, 897 bp, synthetic construct
  misc_feature 1..897: note = Description of Artificial Sequence: Synthetic coding sequence
  source 1..897: mol_type = other DNA
atggacaatgcaggcaaagagcgagaagccgtgcagctcatggccgaagcagaaaagagggtaaaggcttctcacagctttcttagaggcctgtttggcggaaatacacgcatcgaggaagcttgtgaaatgtacactcgcgcagctaatatgtttaaaatggccaagaattggtccgcagcaggcaatgccttttgccaggcagccaaactgcatatgcagcttcagagcaaacacgacagcgcaacctctttcgttgatgccggtaatgcgtataagaaagccgatcctcaagaggccataaactgtctcaacgccgcaatcgacatctatacagacatgggcagattcacgatcgcggcaaaacaccacattacaatcgcagagatctatgagaccgagctggtggatattgaaaaagctattgcccattacgagcaaagcgcagactattacaagggagaagaatctaattcctctgctaataaatgcttactcaaagttgccgcatatgccgcacagttggaacaataccagaaagctatagaaatatatgagcaagtgggggctaacacaatggacaacccattactcaaatactcggctaaggactacttttttaaggcagctctatgccacttcatcgtcgacgagttgaacgctaagcttgcccttgaaaagtatgaggagatgttccccgctttcacggatagtcgggaatgcaaactgcttaagaagctgctggaggcccacgaggagcagaactccgaagcttatacggaggctgtaaaggaatttgacagtatctctcgactggatcaatggcttacgaccatgctgcttcgaattaagaagagcatccagggtgacggtgagggtgacggggacctgaaatag

SEQ ID NO: 232205 - DNA, 615 bp, synthetic construct
  misc_feature 1..615: note = Description of Artificial Sequence: Synthetic coding sequence
  source 1..615: mol_type = other DNA
atgacactgctgccggctttatggatgctggaaatgctcacaaagcgccagattcccaaaggcagattcacaatcgcagctaaacaccatatcacaattgcagaaatctacgagaccgagctggtcgacatcgagaaggccatcgcccattatgaacaatcggctgattattataaaggcgaggagtcaaattcctcagccaacaaatgcttactgaaagttgccgcttatgcagcccagctcgagcagtatcagaaggcgatcgaaatttatgaacaggtgggtgccaataccatggacaatccactcctcaagtattcagccaaggactattttttcaaagcagcgttgtgccacttcatcgttgacgagctgaacgccaagctggctttagagaagtatgaggagatgtttcctgcctttaccgatagcagggagtgtaaactgttgaagaagctccttgaggcccacgaagagcagaatagtgaagcctatactgaagcagtcaaggagtttgattctattagtcgacttgatcagtggctaactactatgctactacgcatcaagaagtcaatccagggcgacggagaaggggatggtgacttgaaatag

SEQ ID NO: 232206 - DNA, 768 bp, synthetic construct
  misc_feature 1..768: note = Description of Artificial Sequence: Synthetic coding sequence
  source 1..768: mol_type = other DNA
atgtacacacgggcagccaacatgttcaaaatggccaagaactggtctgcggctggtaacgcgttctgtcaggccgcaaagttgcacatgcagctgcagagtaagcacgactccgcaactagcttcgtcgacgccggtaacgcttataaaaaggcagaccctcaggaagcgatcaactgtctgaatgccgcaatcgatatctacaccgacatgggccgtttcaccatagcagcaaagcaccacatcacaattgccgagatttatgagactgaattagttgatattgagaaggccatcgcccactatgagcaaagtgctgattattacaaaggggaagagtcgaattccagcgccaacaagtgcttactgaaagtggcggcttacgccgcacagttagagcagtaccaaaaagctatcgaaatctatgaacaagtgggagccaatactatggacaaccctctgctgaaatattccgcaaaagattacttctttaaggcggcactctgtcacttcattgttgacgagctcaacgctaaactcgcgctcgaaaaatatgaagaaatgttcccagctttcactgattcgagggaatgcaagctgctgaagaaactcctggaggcccatgaggagcagaatagtgaggcctataccgaggcagtgaaggagttcgacagtatcagtcgcctggatcagtggctcacaaccatgctcctgcggattaagaaatctatccaaggcgacggcgaaggagacggagatttgaagtag

SEQ ID NO: 232207 - DNA, 780 bp, synthetic construct
  misc_feature 1..780: note = Description of Artificial Sequence: Synthetic coding sequence
  source 1..780: mol_type = other DNA
atggataatgccggaaaggagagagaggctgtgcaactgatggccgaggcggagaaacgtgtcaaggcctcccactcattcctccgcggacttttcgggggaaacacacgaatagaggaggcctgcgaaatgtacaccagagctgccaatatgtttaagatggccaaaaattggagcgaggctatcaattgtctcaacgcagcaatagacatctacacggatatgggcagatttaccattgctgccaagcaccacataacaattgctgagatttatgagacagagctggtcgacattgaaaaggccattgcccactatgagcaatcagctgactactacaagggtgaggagtcaaacagtagtgcaaacaaatgtttgctgaaggtagccgcttatgcggctcagctggagcaatatcagaaagcaatcgagatttacgaacaggtcggggctaatacaatggacaatcctctcctcaaatattccgcgaaggactacttcttcaaggccgctttatgtcacttcatagtcgatgagctgaatgccaagctcgccctagagaagtacgaagagatgtttcctgctttcacggattccagggaatgcaaactcctgaaaaaactccttgaggcccacgaagagcagaactctgaagcttatacagaagctgtgaaagagttcgactcgattagtcgtcttgatcagtggctgacaacaatgctcctgagaattaagaaatccatccagggggatggagaaggcgatggggacctgaaatag

SEQ ID NO: 232208 - DNA, 1887 bp, synthetic construct
  misc_feature 1..1887: note = Description of Artificial Sequence: Synthetic coding sequence
  source 1..1887: mol_type = other DNA
atggggtcatgcgctcggctcctcttgctctggggttgcacagttgtcgccgctggcctttccggggtggcgggagtgtcatctcggtgtgaaaaggcctgtaaccccagaatgggcaacctcgcgttgggccgtaagctgtgggccgacactacctgtggccagaacgcaaccgagctgtattgtttctattctgaaaacaccgacctgacctgtcgccaacctaagtgcgacaagtgcaacgccgcttatccacatttggcacacttgccgtctgcaatggctgactctagttttcgcttcccgaggacctggtggcagtctgcggaagatgtgcatagggagaagatccaactggatctggaagcggagttttacttcactcacctcattgtcatgttcaagtccccacgacctgctgctatggttctggacagaagccaggattttggaaaaacttggaaaccctataaatatttcgctaccaactgttcagccaccttcggcttggaggatgatgtggttaagaagggtgccatctgcactagtaagtattctagcccgttcccttgcacaggtggcgaggtgatcttcaaagccctgtctcctccctatgacaccgagaatccgtactccgcaaaggtgcaggagcaactcaagataaccaatcttagggtacagttgcttaagcgccaaagctgcccatgtcagagaaatgacttgaacgaggagccacaacatttcacacattatgccatctatgacttcatcgtgaaaggttcctgtttctgtaacggacacgccgatcaatgtatacccgtgcatggctttagacctgtgaaagccccaggtactttccatatggtgcacggaaagtgtatgtgcaaacacaataccgctgggagtcattgccagcattgtgcacctctctataacgaccggccttgggaagccgctgacggtaagacgggcgctcctaacgaatgccgcacatgcaaatgcaacgggcacgctgacacttgccactttgatgtgaatgtctgggaagcttctggcaaccgcagcggtggcgtctgcgacgactgtcagcacaacacggaagggcagtactgtcagcgatgtaagccgggattctatcgggacctgcgacgaccattcagtgcaccggacgcgtgcaagccttgctcttgtcatccggtcgggtccgctgtcctcccggctaattctgttaccttctgcgatccttccaacggcgattgcccctgcaaacccggtgtggccggaagacgctgcgaccgttgcatggtgggttactggggttttggagattacggctgccgtccatgtgactgtgccggaagttgcgatcccattacaggcgactgtatttcaagccataccgatatcgactggtaccacgaggtccccgatttccggccagtgcacaataaatccgagccagcctgggaatgggaggatgcacagggattctcggccttgttgcactcaggaaagtgcgaatgcaaagagcaaactttgggaaacgcaaaagcattctgcggtatgaagtacagctacgtcctgaaaattaagattctctccgcccacgacaaaggaacccacgttgaagtgaatgtgaaaatcaagaaagtgctgaagagtacgaagctcaagatctttaggggaaaacggacgctataccccgaatcttggacagatcgcggatgcacttgtccaatcttgaatcctggcctggagtacctggtcgcaggccatgaggacataagaacaggaaaactgatcgtgaacatgaagagcttcgtgcaacactggaaacctagcttgggaagaaaagtcatggatatacttaaaagggagtgcaaatag

SEQ ID NO: 232209 - DNA, 1776 bp, synthetic construct
  misc_feature 1..1776: note = Description of Artificial Sequence: Synthetic coding sequence
  source 1..1776: mol_type = other DNA
atgggcaatcttgctctggggaggaagctctgggccgacacaacttgtgggcagaacgctacggaactatactgtttctactctgagaatactgatcttacttgtaggcaacccaagtgtgataagtgcaacgccgcttatccccacctggcccacctaccatcggcaatggctgactcttccttccgatttcctcgcacctggtggcagtctgccgaggacgtgcatcgagagaagattcagttagatttagaggccgagttttacttcacccacttgatcgtgatgtttaagagccctagaccagccgctatggtgctggaccgaagtcaggactttggcaaaacctggaagccgtataagtactttgctaccaactgctcagcaaccttcggcttggaggatgatgttgtgaagaaaggagccatttgtacgtccaagtattcaagtcccttcccttgtacgggaggcgaagtaatcttcaaagcactcagccccccatacgataccgaaaatccgtatagtgccaaagtacaggagcaactgaagatcaccaacctccgtgtgcagcttctgaaaagacagagttgtccgtgccagcggaatgacctgaatgaggagccacagcacttcactcattacgctatctatgatttcatcgtcaagggctcctgcttttgcaatggacacgccgatcagtgtatccccgtgcacggctttagacccgtgaaagctcctgggacatttcacatggtccatggaaagtgcatgtgcaaacataacactgccggaagccattgtcaacactgtgcccctttgtacaacgaccggccatgggaggcagccgacggaaagaccggagcgcctaatgagtgcagaacctgtaagtgcaacggccatgccgacacatgccactttgatgtgaacgtgtgggaggcttcaggtaataggagtgggggtgtctgtgatgattgccaacacaacacggaaggccagtactgccagcgatgcaagcccggtttttaccgggacctgcgcagaccattttctgctcctgatgcatgtaaaccatgctcatgccaccccgtgggatctgcggtgctgcctgctaattctgtgacattctgcgatccttccaatggcgactgtccttgcaaacccggtgtggccggacgtcgttgtgaccggtgcatggttggatactggggcttcggagactatggctgcaggccttgcgattgtgctggtagctgtgatcccatcactggggattgtatttcttctcacacagacatcgattggtatcacgaggtaccggatttcaggccggtgcacaacaagtctgaacccgcatgggaatgggaggacgctcagggcttttctgcactgctacacagcggaaagtgcgagtgcaaggagcagactctaggcaatgcgaaagctttctgcggcatgaaatactcatacgtattgaaaatcaagatcctgagtgcacatgataaaggcactcacgtggaggtgaacgtaaagataaaaaaggtgctcaaatctacgaaactgaagatttttcgcggtaaacgaacactctatcctgaaagctggacagacagaggttgcacttgcccaattttgaaccccggattggagtatttagtggcagggcatgaggacattcggaccggaaaacttattgtgaatatgaagtccttcgtccagcattggaaaccaagcttgggccgtaaggtaatggacatcctgaagagggagtgcaagtag

SEQ ID NO: 232210 - DNA, 1818 bp, synthetic construct
  misc_feature 1..1818: note = Description of Artificial Sequence: Synthetic coding sequence
  source 1..1818: mol_type = other DNA
atgggcagctgcgcccgtctgctgttactgtggggctgtactgtagttgctgctggattgtctggcgtcgcgggagtgagcagcagatgcgaaaaagcgtgtaatccccgaatgggcaatctggctttaggcagaaaattgtgggccgatacaacttgcggccagaacgcaactgaactttattgtttctacagtgaaaataccgatctcacgtgcaggcagccgaaatgcgataagtgcaacgctgcctatccgcacttggcacatctgccctctgccatggctgattcttccttcaggttcccaagaacttggtggcagagcgcggaagacgtccaccgagaaaaaattcagcttgacctggaagcagagttctactttacccacctgatcgtcatgttcaaatcacctcgtcctgccgcaatggttctggacagatcacaggactttggaaagacttggaagccttataagtactttgccactaattgttctgccaccttcggattagaagatgacgtggtgaaaaagggcgcaatatgtacaagcaagtatagctcacccttcccatgtaccgggggagaagtcatcttcaaagccctgtctcccccttacgatactgagaacccatattctgcgaaagtgcaagagcagttaaaaatcaccaatctgagagttcaactcttaaagagacaatcttgcccttgccagagaaatgaccttaacgaggaaccacaacattttacacactacgctatatacgactttatcgtcaagggttcgtgtttctgcaacgggcacgccgaccagtgtattccagttcatggattccggccagttaaggctcctggcactttccacatggtgcacggcaagtgcatgtgcaagcacaacacagcaggcagtcattgccagcattgtgccccattgtacaacgatcgaccctgggaggccgctgatgggaagacgggtgccccaaacgaatgtcggacctgtaagtgtaatggacacgctgatacgtgccacttcgatgtgaacgtgtgggaggcaagcggcaatcggtctggtggagtgtgcgacgactgtcagcacaatacggagggacagtattgtcagcggtgcaagcctggattctatagagatctgaggcgaccatttagcgcgccagacgcctgtaagccctgtagttgtcatcccgtcgggtcggcagtgctgcccgctaacagcgttaccttttgcgaccctagtaatggcgattgcccttgtaagccaggcgtggcaggtaggcgttgcgaccggtgcatggtgggctattggggctttggtgactatggatgtcgcccttgcgactgcgcaggatcctgtgaccccattacgggtgattgcatctcctctcacacagacatcgattggtatcacgaagttcccgactttcgacccgtgcacaacaagagtgagcccgcttgggaatgggaggatgctcagggcttcagcgccctcttgcattcagttctgaaaatcaaaatattgagtgcgcacgacaagggaactcacgtggaagtgaacgtgaaaatcaaaaaggtcctgaagagtaccaagctgaaaatttttcggggaaaacggacgctttatccagagtcctggactgaccgaggctgcacttgtccaatactgaatcccggattggaataccttgtggctggccacgaagacatccggaccgggaaactcatcgtaaacatgaagtctttcgtccagcactggaagccctcccttggacgaaaggtaatggacatcttaaaacgggagtgcaagtag

SEQ ID NO: 232211 - DNA, 1095 bp, synthetic construct
  misc_feature 1..1095: note = Description of Artificial Sequence: Synthetic coding sequence
  source 1..1095: mol_type = other DNA
atgtatttgtcaaggtttctgagtattcatgccttgtgggtcactgtgtcctccgtgatgcagccatacccactggtgtgggggcactatgatctttgcaaaacccagatttacacagaggaagggaaggtatgggattacatggcctgccagccagaaagtaccgacatgacaaagtatctgaaggtcaaactggacccccctgatatcacatgcggcgacccccctgagaccttctgtgcaatgggcaacccctatatgtgtaacaacgagtgtgatgcctcaacacccgagctggcccacccacctgagcttatgttcgattttgagggacgccatcccagcaccttttggcagtctgcgacctggaaagagtatccaaagcctctgcaagtcaacattacgctttcctggtctaagactatcgaactcaccgacaatattgtgatcacatttgagtccggcaggcccgaccagatgatcttagagaaatccctcgattacggtaggacatggcagccttatcagtactacgcaacagactgtctggatgcctttcacatggatccaaaaagtgtgaaagatctctcgcagcatactgtgcttgaaatcatctgcacagaagaatatagcactggttacacgacaaattccaagatcattcactttgaaatcaaagatcgctttgctttctttgccggaccacggctccgcaatatggcttctctgtacggccagttagatactacaaaaaaactgagggatttcttcactgtgaccgatttgcggattcgcttgttacggcctgctgtgggtgagatctttgttgacgaactgcaccttgctagatatttctatgccatttcggacatcaaggtccgtggtagatgcaaatgcaacctacatgccacagtttgtgtgtacgataatagtaagctgacctgcgagtgcgagcacaataccaccgggccagattgtggcaagtgcaaaaagaactaccaaggcaggccgtggagtcccggaagctaccttccaattccaaagggaactgccaacacttgcattccgtcaatcagcagcatcggctcaaagtag

SEQ ID NO: 232212 - DNA, 1518 bp, synthetic construct
  misc_feature 1..1518: note = Description of Artificial Sequence: Synthetic coding sequence
  source 1..1518: mol_type = other DNA
atgtacctctctcgcttcttgagtattcacgccctatgggtcaccgtttctagcgtcatgcaaccctatcccttggtctggggtcattatgacctatgcaaaacacagatctacacagaagaaggaaaggtttgggattacatggcttgtcaacccgagagcactgatatgactaagtatctgaaagtgaaacttgacccaccggacatcacatgtggtgacccgcctgagactttctgcgccatgggaaacccatatatgtgcaacaatgaatgtgatgctagtaccccagaactagctcaccccccagaactgatgtttgattttgagggtcgccatcccagtaccttctggcagtccgcaacatggaaggaatacccaaaacccttgcaagtcaatattacactatcctggagcaagactattgagttaactgacaacatcgtcataactttcgagtcgggacggcctgaccaaatgatcctagagaagtcattggattacgggagaacttggcaaccgtaccagtactacgcaacagattgtttagatgcattccacatggatccaaagtccgtgaaagatttaagtcagcatactgtactggaaattatatgtaccgaggaatatagtaccgggtacaccacaaactctaagattatccatttcgaaatcaaagatagatttgccttcttcgctggccctcgattacgcaatatggcctccctatacggtcaactggataccactaaaaagcttcgggacttcttcactgtaaccgacctgagaataagattgctgagacctgccgtgggggagatatttgtggacgagctacacttggcacgatacttttatgctatctcagacataaaggttcgcggacggtgcaaatgcaatctgcacgccacagtttgcgtgtatgacaactcaaagttgacctgtgagtgtgaacacaacacaaccggccctgactgtggcaaatgcaagaaaaattaccagggccgtccttggtctccaggttcctacttgccgatccccaagggaactgccaatacttgtattccctccatcagtagcattggaaaccctcctaagtttaaccgaatctggccaaacatttcctcactagaggtgagtaatccgaagcaggaatgctattgcaatcccctggggagcattcatgacaggtgtaacgggagtggattctgtgagtgcaagaccggaaccacagggcctaaatgtgatgagtgcttgcccggaaattcctggcactatggctgccagcccaacgtgtgcgacaatgaattgctgcactgtcagaacggcggaacctgccacaacaacgtaaggtgcctgtgccctgccgcttatactggaattttgtgcgagaagctgcggtgcgaggaggccggtagttgtggatccgattcgggacagggcgctccaccccacggatccccagcactgctcctgctaactaccttgttgggcaccgcttcccctctcgtgttctag

SEQ ID NO: 232213 - DNA, 861 bp, synthetic construct
  misc_feature 1..861: note = Description of Artificial Sequence: Synthetic coding sequence
  source 1..861: mol_type = other DNA
atggcctcgttgtatgggcagctggacactaccaaaaagcttagggatttttttacggtgacagacctccgcattcggctccttcggcctgccgtgggtgaaattttcgtcgatgaattacatctcgcccgatacttttatgccattagcgacatcaaggtacgagggcgatgtaagtgcaacctgcacgcaacagtgtgcgtctacgataatagcaaactgacctgtgaatgcgaacataatactacggggcctgattgcgggaaatgcaagaaaaattaccagggcaggccatggtcaccagggagttacctgccgattccaaaggggaccgccaacacttgcataccatccatttcctctatcggcaatccgcctaagtttaacaggatatggcccaatatttcctctctggaggtttcaaaccctaaacaggttgcgccaaaactcgccctgtctacagtctccagcgttcaggttgcaaatcataagagggaatgctactgcaacccactggggtccattcatgaccgttgcaacggcagtggattctgtgaatgcaagactggtaccactggacccaagtgtgatgagtgcctccctggtaattcttggcactacggatgtcagcccaatgtctgtgacaacgagctgctccactgtcaaaacggtggaacgtgtcacaataacgtgcgttgcttgtgccccgctgcttatacaggcatcctgtgtgagaagcttagatgcgaggaggctgggagctgcggtagcgactcagggcaaggcgcaccgcctcacggatctccagctttgctactgctcacaaccttgctcggtacagctagccctctcgtgttttag

SEQ ID NO: 232214 - DNA, 1029 bp, synthetic construct
  misc_feature 1..1029: note = Description of Artificial Sequence: Synthetic coding sequence
  source 1..1029: mol_type = other DNA
atggcctcgctgtacggtcagctagacaccaccaagaaactgcgggactttttcaccgtaacagaccttagaatccgccttctgagacctgctgtcggtgagatcttcgttgacgagctacacctcgcacgttatttctacgcgatatccgatatcaaggtacggggtcggtgtaaatgcaatttacacgccactgtgtgcgtttacgataattccaagttaacctgtgagtgcgagcataacacaacaggccctgactgcggcaagtgcaaaaaaaactaccagggacgtccttggtcaccagggtcctacttgccgattccaaaaggcaccgccaatacctgtatcccatcaatatcctccattggcaatccccctaaatttaatcggatctggcctaacatctccagcctggaggtgtccaatcctaagcaggtcgcacctaaactggccttatccacagtctccagcgtgcaggtggccaaccacaagcgggattgtgagtgttttggccattccaaccgctgctcctatatcgacttgcttaacacagtcatttgtgtatcttgcaagcataatactcgcggacagcactgcgagctgtgtcggctggggtactttcggaatgcgtctgcgcagttggacgatgagaatgtctgcatcgaatgctattgtaaccctctgggctcaatccatgatcgatgtaacggtagcggattctgcgaatgcaaaacagggactacgggcccaaagtgtgatgagtgtctccccggaaactcctggcactatggctgtcagccaaacgtgtgtgataatgagctgctacactgtcaaaatggaggcacctgccataataatgtgcgttgtctgtgtcctgccgcatacacaggaatcttatgtgagaaactccggtgcgaagaagccggatcgtgcgggtccgacagcgggcaaggggctcccccacacggatcacctgctctgctactgcttacaaccctcttagggacggcaagccctcttgtgttctag

SEQ ID NO: 232215 - DNA, 1485 bp, synthetic construct
  misc_feature 1..1485: note = Description of Artificial Sequence: Synthetic coding sequence
  source 1..1485: mol_type = other DNA
atgtacctctcccgattcctcagtattcatgctttatgggtaaccgtcagctctgtgatgcagccataccctctggtgtggggccactacgacctgtgcaagactcagatatacacagaggaagggaaagtctgggattatatggcttgccagccagaaagtacggatatgacaaaataccttaaagtcaagctcgacccgccagacattacgtgtggcgaccctccagaaactttttgcgcaatgggcaatccttatatgtgtaacaacgagtgcgacgcgagcacacccgaactggctcatccacccgagctcatgtttgacttcgagggccgacacccatctacattctggcagtcggccacctggaaggagtaccctaagccactgcaggttaatatcaccttgagctggagcaaaactatagaactaacagataatatagtgataacattcgaatctggccgacccgatcagatgatcctggagaagagcctcgactatggcaggacctggcagccataccagtattacgccaccgactgcttggatgcttttcatatggatccaaagtctgtaaaggatctctcccaacacactgtgctggagatcatttgcacagaggaatactccacagggtatacaactaattctaagatcatccattttgagatcaaggaccggtttgcatttttcgctggtcctcgcctgcgaaacatggcatcactctacggccaacttgacactaccaaaaaactgagggacttctttacagtaacagaccttcgaattcgccttctccgtccggctgtgggggaaattttcgtcgatgagcttcatttagctagatacttctacgccatctccgacattaaggtccgcggaagatgcaaatgtaacctgcatgcaaccgtgtgcgtctacgacaactccaaactaacttgtgaatgtgaacataacacaaccggaccagactgcggtaagtgtaaaaaaaactatcaaggccgtccctggagccctggttcgtacctcccgatcccgaaaggcaccgccaacacttgcatccctagcatcagctctattgggaactgcgagtgctttggacactctaaccgatgctcctacatcgatttacttaacactgtgatatgcgtttcatgtaagcataacacacggggtcagcactgcgaactgtgcagattgggttattttagaaatgccagtgcccagctggatgatgagaacgtttgcatcgccaacgtgtgtgacaatgaactcctgcattgccagaacggcggtacatgccataacaacgtgcggtgcctctgcccagctgcttacacaggcatcttgtgcgaaaagttgcgttgtgaagaagctggctcctgtggatctgattctggacagggagccccaccgcatggaagccccgctcttttgctgctgaccacattactggggactgccagtccactggtcttctag

SEQ ID NO: 232216 - DNA, 1443 bp, synthetic construct
  misc_feature 1..1443: note = Description of Artificial Sequence: Synthetic coding sequence
  source 1..1443: mol_type = other DNA
atgtacctaagtcgtttcttgagcatacacgccctttgggtgaccgtctcgagcgttatgcagccctatcccctggtctggggccattatgatctgtgtaagacacagatctacactgaagagggaaaggtgtgggactatatggcttgtcaacctgagtccaccgatatgaccaagtatctcaaggtgaagctcgacccacccgatattacttgcggagaccccccagagaccttctgtgccatgggaaatccatacatgtgtaataatgaatgcgatgctagtacacccgagcttgcacatccccctgaactcatgtttgactttgagggaagacaccccagcaccttctggcaatctgcaacttggaaggagtatcccaagccgctgcaagtcaacatcacattgagttggtccaaaacaattgagctgacagataatatcgtgatcacgttcgaatctggtcggcctgaccagatgatcctggagaagtctctcgactacggacggacatggcagccatatcagtattatgctaccgactgcctcgacgcttttcacatggaccctaagtctgtcaaggaccttagccagcacactgtgctggagattatctgtaccgaggagtatagtacgggatacacaaccaattcgaagattatccacttcgaaataaaggatcggtttgctttcttcgcaggaccacgcctgagaaacatggcgtccctctatgggcagcttgataccaccaaaaaactcagggatttttttaccgtgaccgacctgagaattagacttttgagacctgctgtcggcgagatctttgttgatgaattgcatctggcgcgttatttttatgctatctctgacataaaggtccgtggaagatgtaagtgcaatctgcacgctactgtctgtgtgtatgacaactctaagctgacctgtgagtgcgagcacaacaccaccggcccagattgcggtaagtgtaaaaagaattatcaagggcgaccctggagcccgggatcctatctgcctattccaaaaggtactgccaacacatgcatacccagcatttcctctattgggaacccgcctaagttcaaccgaatctggcctaacatttctagcctcgaagtgtcaaacccaaagcaagtagctcccaagctggccctgtccacggtgtccagtgtccaggtcgccaatcacaaacgcgcaaacgtctgcgataatgaactattacactgtcaaaatggaggaacctgtcacaataatgtccggtgcctttgccctgcagcgtacacaggaatcctgtgcgagaagctgcgctgtgaggaggccggaagctgcggaagtgattcaggccagggtgctcctccgcacggctcccccgcacttctacttctaactactctgctcggaactgctagtccattagtgttctag

SEQ ID NO: 232217 - DNA, 1383 bp, synthetic construct
  misc_feature 1..1383: note = Description of Artificial Sequence: Synthetic coding sequence
  source 1..1383: mol_type = other DNA
atgtacttgtcacgcttcctgtctatccatgcgctttgggtgacggtaagctcagtaatgcagccgtacccgctggtatggggtcactatgatctatgcaagacccagatctacacagaggagggtaaggtctgggattatatggcatgtcagcctgagagtactgacatgactaaatacctgaaagttaaactggaccctccggacatcacttgtggagatccacctgagaccttctgcgccatggggaacccgtatatgtgcaataacgaatgcgacgcatctacacctgaactggcccatccccctgaattgatgttcgacttcgaaggacggcatcctagcactttctggcagagcgccacctggaaagagtaccctaaacccctccaggtcaatatcaccttatcctggagcaagacaatcgagctcacagataacatagtgataacgttcgagtccggccgtcccgatcagatgatcttagaaaaatctttggactatggccgtacttggcaaccctaccagtactacgctactgactgtctcgatgctttccacatggatccgaagtctgtgaaggacctgtctcagcatactgtgctggaaattatatgcacagaagagtacagcacagggtataccacgaatagtaagatcatccacttcgaaatcaaggaccgctttgcattctttgccggacccaggctaagaaatatggccagcctgtacggccagctcgacaccacaaagaaacttagggacttcttcacagtgactgacttgagaatccggttacttaggccggctgtgggggagatctttgtggacgaactgcatctggccagatacttctacgctatcagtgacattaaggtgagaggacgctgtaaatgcaatctccacgcgacggtttgcgtgtacgataatagcaaactgacatgcgaatgtgagcacaatacaacaggtcccgactgcggcaagtgtaagaagaactatcaaggtaggccctggagccccggaagctatttgccaatcccgaagggtaccgccaatacctgcatccccagcataagctcgattggcaacccaccaaagttcaatcgtatttggccgaatatttcttcactagaggtgtccaatcccaagcaggcaaatgtctgtgataacgaactgcttcactgtcagaacggcggaacatgccataacaatgtgcgctgcctgtgtccggcagcttatacgggcatcctctgcgagaagcttcgctgcgaggaggcaggatcttgtggaagcgactccggacagggcgctccccctcatggttcaccagctctgctgctcctgaccactctactcggcacggcaagccccttggtcttctag

SEQ ID NO: 232218 - DNA, 1620 bp, synthetic construct
  misc_feature 1..1620: note = Description of Artificial Sequence: Synthetic coding sequence
  source 1..1620: mol_type = other DNA
atgtatctgagtcgcttcctttctatccatgccctttgggttacggtgtcctctgtgatgcagccttacccactagtgtggggacattatgatctgtgcaaaacccagatctacaccgaggaaggtaaggtctgggactatatggcgtgccagccagagtctaccgacatgaccaagtacctcaaagtgaagttggaccctcccgacatcacatgcggagacccacccgagactttttgtgctatgggcaatccatacatgtgtaataatgaatgcgacgcttcaacaccagagctggcacatcctcccgaactaatgtttgacttcgagggacgacatcctagcactttctggcagagcgccacatggaaggagtatcccaagccattacaggtgaacataactctgagctggagtaagacaatcgagctcaccgacaatatagtaataacatttgaaagtggaagacctgaccagatgatacttgagaagtctctcgattacggaaggacatggcagccataccagtattacgccactgactgcctggacgccttccacatggaccccaagtctgttaaagatctctctcagcatacagtcctcgagatcatctgcaccgaggagtatagcaccgggtacaccactaattcgaaaattatccactttgaaattaaagacaggtttgccttttttgctggacccaggctgcggaatatggccagcctatacggacaattagacacaacaaaaaaactgcgcgactttttcaccgtgaccgacctgagaattcggcttttgcgccctgccgtaggtgagatctttgtagacgaactgcatctcgccaggtacttttatgcgatctccgacataaaggtgagagggaggtgcaagtgcaatctgcacgctacggtttgcgtttacgacaatagtaaactgacatgcgaatgtgaacacaacactaccggaccggattgtgggaagtgcaaaaaaaattaccaaggacgtccttggtcgcctggttcttacctgcccattcccaaggggactgccaatacctgcattcccagcattagctcgattggcaattgtgagtgctttgggcatagcaaccgatgtagctacatagacctgctgaatactgtcatctgtgttagctgcaaacataatactcgcggacagcactgcgaactgtgtcgcctgggatacttccgcaacgcttcagctcagttggatgacgagaatgtatgcatcgaatgctattgcaacccccttggatccatccacgaccggtgcaacggatccgggttctgtgagtgtaagacaggtacgaccggccctaagtgtgatgaatgcttgcccggtaactcctggcattatggctgtcagccaaacgtctgtgacaacgagctgttacactgccagaacgggggtacctgccataacaatgtgaggtgtctgtgtcctgccgcttatactgggattctgtgtgagaaacttcggtgtgaggaagccggatcgtgtggaagtgattccggccagggcgctccacctcacggctcccctgctttgctcctgttgacaacattactggggaccgccagccccctggttttctag

SEQ ID NO: 232219 - DNA, 1383 bp, synthetic construct
  misc_feature 1..1383: note = Description of Artificial Sequence: Synthetic coding sequence
  source 1..1383: mol_type = other DNA
atgtacttgagtcggtttctcagcattcatgccctctgggtcactgtttcaagtgtgatgcagccatatcccctggtgtggggacactatgacctgtgcaagacccagatctatacagaggagggtaaggtctgggactacatggcgtgccaacccgagtcgaccgacatgaccaagtatctgaaggtgaagctcgacccaccagatatcacgtgcggcgatccaccagagactttctgcgccatgggcaacccatatatgtgcaataatgaatgcgacgcttccaccccggagctggctcacccgccagagttaatgtttgatttcgaggggcgacacccctccacgttttggcaatccgcaacctggaaagagtatcccaagccactccaggtgaacattactcttagttggtctaaaactatcgaactgacagacaacatcgtcattacttttgagtctgggagacccgaccagatgattctggaaaaatccctcgattacgggcgaacctggcagccttatcaatattacgctaccgattgccttgacgctttccatatggacccaaaatccgtcaaggatctctctcaacatacggtgctagaaataatctgtacagaggaatatagtactggctataccaccaactccaaaataattcacttcgagattaaagatagattcgcctttttcgcaggacctagattgcgtaatatggcttcactttacggccagttagacactactaagaaactgcgggatttctttactgtgaccgatctgaggatcagactgctgaggcctgctgtgggtgaaatattcgtcgatgaacttcacctggctcgatatttctatgccatctctgatatcaaagtccggggacggtgtaaatgtaatttacatgctacggtctgtgtgtatgacaactccaagctcacatgcgagtgcgagcacaatacaactgggcctgattgcgggaaatgcaagaaaaactatcagggccgaccctggagcccaggatcgtacctccctatccccaagggcacagctaacacctgcgatccctatctaacatcgtgtggtgatcctcccaagtttaataggatttggccaaatatctcaagccttgaggtttcaaaccccaagcaggccaacgtatgcgacaatgaattgcttcactgtcagaatggcggaacatgccacaataacgtcagatgtttgtgccccgctgcgtacaccggaatcctgtgtgagaagttacgatgtgaagaggccggttcgtgcggtagtgatagcggccagggtgcaccaccccacggttcccccgctctcctcctgctcacaactctgctgggcacagccagcccacttgtgttctag

SEQ ID NO: 232220 - DNA, 1443 bp, synthetic construct
  misc_feature 1..1443: note = Description of Artificial Sequence: Synthetic coding sequence
  source 1..1443: mol_type = other DNA
atgtatctaagcaggtttctcagtatccacgcattgtgggtgacagtgtcctcagtcatgcagccttatcctcttgtctggggtcactacgatctatgcaaaacccagatctataccgaagagggcaaggtgtgggactatatggcttgtcagcccgagagtacggacatgactaagtatctcaaagttaagttagatcctccagacatcacctgcggagaccccccagagacattctgcgctatgggaaacccctacatgtgtaataacgaatgtgacgcctcgacaccggaactggcccatcccccagagctgatgtttgactttgagggtcgacatccttccacattctggcagtcagcgacctggaaggaatatcccaagccactgcaggtgaacatcacactgtcctggagcaagaccatcgagttaacagataatatcgtaataaccttcgagagcggcaggccagatcaaatgattctggaaaaaagcttagattacggcagaacctggcagccatatcagtactacgccaccgattgtctggatgcgtttcacatggatccaaagtcggtgaaggatctgtcacaacatacagtgctggagattatctgtaccgaagagtatagcaccggttacaccactaacagcaagatcattcacttcgaaataaaagatagattcgctttctttgccggacctcggctgaggaatatggctagcctctatggacagttagataccactaagaagctccgagacttcttcactgtgactgatctgaggatccgactgctgagaccggctgtgggagagatcttcgtggacgaactacatctcgcacggtacttctatgctattagtgacataaaggttagaggaaggtgcaaatgcaatctgcatgcaacagtttgcgtttacgataattctaaactcacttgcgaatgtgaacataatactaccgggcctgactgtggcaaatgcaagaagaattaccagggtaggccttggtctcccggatcttatctcccaatacccaagggaacagcaaatacttgtatcccttccatctcgtctatcggcaatcctccaaagtttaatcggatctggccaaacatcagtagcctggaggtatcaaatccaaaacaggtggcccctaaacttgcattgtccacagtatcctcggtacaagtggctaatcacaaacgggctaacgtctgtgacaacgagttgttgcattgtcagaacggcggaacctgtcacaataatgtgcgctgcctctgtccagctgcttacacaggtattctctgtgagaagttgcgttgtgaggaagctggatcatgtgggtccgattctgggcagggagcccctccccacgggtctcctgcacttcttctactgactaccctgctgggtacagcgtccccgttggttttttag

SEQ ID NO: 232221 - DNA, 1485 bp, synthetic construct
  misc_feature 1..1485: note = Description of Artificial Sequence: Synthetic coding sequence
  source 1..1485: mol_type = other DNA
atgtacctgagtagatttttgtccatccacgctttgtgggtaactgtgtcctctgtgatgcaaccctaccctctggtttggggacactatgacctgtgcaagacacagatttataccgaagaaggcaaagtttgggactacatggcgtgccagcctgaatccaccgatatgactaagtacctgaaagtcaagctggacccgcctgatatcacgtgcggagatcccccagaaacattttgtgctatgggcaacccttacatgtgtaacaatgaatgcgacgctagtaccccggagctcgcccacccccctgagttgatgttcgattttgaaggcaggcacccctccaccttctggcagtccgcgacctggaaggagtacccgaaacctctgcaagtgaacattacattatcctggtcaaaaaccatcgagctaactgacaacatagtgatcactttcgagagtggccgaccagatcagatgattcttgaaaagtcgttggattacggaaggacctggcagccctaccagtactatgctaccgactgcttggacgcttttcacatggatcctaagtcagtcaaggacctcagccagcacaccgtgctcgagataatctgcactgaggaatatagtacgggctacaccacaaatagtaaaatcatacacttcgagataaaggaccggttcgctttctttgctggacccaggcttaggaacatggcatcgctgtacggccaactcgatactactaagaaactacgggacttctttacagtgacagacctcaggattcgcttgctgaggcccgctgtcggtgagatctttgttgacgaactacatctggcgagatacttttatgcaatctccgatattaaagtccggggaagatgcaaatgcaacctgcatgctacagtctgtgtatacgacaattcgaaacttacttgcgagtgcgagcacaatactaccggacccgactgcggcaaatgcaaaaagaattatcaagggcgaccttggagccctgggagttacctgccgatacctaaggggaccgctaacacctgcgatccatacctgactagctgcggagattgcgagtgtttcgggcacagcaatcgctgctcctacatcgacctcctgaatacggtgatctgtgtctcttgtaagcataacacccggggacagcattgtgagctgtgccggttgggttacttccgaaacgccagtgcgcagttggatgatgagaatgtatgcatagccaacgtatgtgataatgagctgctgcactgtcagaacggcggaacttgtcataacaacgtgcgctgcctgtgccctgcggcatataccggcattttatgcgagaaactccgctgcgaggaagctgggtcctgcggcagcgattccggacagggcgctcctccccatgggagccccgcactcttacttttgaccactcttttgggtactgcaagccccctcgtattctag

SEQ ID NO: 232222 - DNA, 1620 bp, synthetic construct
  misc_feature 1..1620: note = Description of Artificial Sequence: Synthetic coding sequence
  source 1..1620: mol_type = other DNA
atgtaccttagtcgatttctgtcaatccatgcactgtgggtcaccgtttcaagcgtgatgcagccttaccccctcgtgtgggggcactatgacctgtgcaaaactcagatctacacggaggaagggaaggtctgggactatatggcctgtcagccggagagcaccgatatgacaaagtacctgaaagtgaagctcgaccccccagacatcacctgtggggacccacccgagactttctgcgcaatggggaatccctatatgtgtaacaacgaatgcgatgcttcaacaccagaactggcacacccaccagagctcatgttcgattttgaaggtcgacatccttcaacgttctggcagtctgcaacctggaaagagtaccccaagccgcttcaggtcaacatcacgttgagctggagcaagactatagagctgaccgacaatatcgtcatcacctttgagagcggaaggcccgaccagatgatcctcgagaaaagcctcgattacggtcggacctggcaaccttatcagtactacgcaactgattgcctcgatgcctttcacatggatcccaaatccgtgaaggatctatcacaacacacggtactcgaaatcatctgcacggaggagtatagtactgggtatacaactaacagtaagattattcacttcgagattaaagatcgattcgcctttttcgccggaccaaggctgcggaatatggcctcactgtacggccagctcgacactacaaagaagctgagggatttctttacggttaccgatctgcgaattaggctgttgaggcccgctgtcggtgagatctttgtggacgaactgcacttagccagatatttttacgcaatctctgacatcaaggttcgaggcagatgcaagtgcaacttgcatgctactgtatgcgtctatgacaattcaaagcttacttgtgaatgcgaacacaacaccactgggcctgactgcggtaaatgcaaaaaaaactatcagggcagaccatggtctccaggcagttatttacccataccaaaggggacagccaacacgtgcatccctagtatctctagtattggaaactgcgagtgcttcggacattccaacaggtgctcctacatcgacctgctgaacacagtcatctgcgtgagctgcaaacacaacacaagagggcagcattgcgaactgtgtaggctgggatactttagaaatgcaagcgctcagttggacgacgaaaatgtttgcatagaatgttactgcaatcctctgggctcaattcacgataggtgcaacggatccggcttttgtgaatgcaaaactggaaccaccggtcctaaatgcgacgagtgcctacctgggaactcctggcattatgggtgtcagccaaacgtatgtgacaatgagctactgcactgccaaaacggtggaacctgccacaataacgtacggtgcctctgtccagccgcttacacaggaatcctgtgcgaaaagctccgttgtgaggaggctgggagttgcggctctgactctggacaaggagccccaccacacgggagcccggctctcctcctgctgaccacattactggggacagcatcaccattggtgttctag

SEQ ID NO: 232223 - DNA, 1317 bp, synthetic construct
  misc_feature 1..1317: note = Description of Artificial Sequence: Synthetic coding sequence
  source 1..1317: mol_type = other DNA
atgtacttgtcacgcttcctcagcatccacgccctgtgggttactgtttcttccgttatgcagccatacccccttgtgtgggggcattacgacctgtgcaaaactcagatttatacagaggaaggaaaagtgtgggattacatggcctgccagcccgagagcaccgatatgacaaagtacctcaaagtcaagctggatccaccagatattacatgcggcgaccctccggaaaccttctgtgcaatgggcaatccctacatgtgtaataatgaatgcgatgcttctactcctgaactcgctcatcccccagagctcatgtttgacttcgagggcagacacccctcaaccttttggcagtccgcaacatggaaagagtatcctaagcccctgcaagtcaatataacactcagttggtctaagacaattgagttgaccgacaatatcgttattacttttgagtccggcagaccagaccagatgatcctcgaaaagagcctagactatggcaggacttggcaaccttatcaatattacgcaacagattgtctagacgcctttcacatggatcccaaatccgtgaaggatctgtctcagcataccgttttggagatcatttgcacagaagaatactctactggctacacaaccaactcaaagattattcacttcgagataaaggaccgctttgcgttttttgcaggcccacgacttaggaatatggcatctttgtacggccagcttgacactactaaaaagcttagggacttttttactgtcactgacctgagaatccggttgttacggccagcagtgggcgagatcttcgttgatgagttgcatttggccagatacttctacgctatttccgacataaaggttaggggaaggtgcaagtgtaatctccacgcaaccgtgtgcgtgtacgacaacagtaagcttacatgtgagtgtgagcacaataccacgggtcctgactgcgggaagtgcaaaaagaattatcagggtaggccttggagtcctggaagctacctcccaattcccaaagggaccgccaacacatgcatcccatccatcagttctattgggacaaacgtttgcgacaacgaactcttgcactgccagaatggtggcacctgtcacaataacgtacgctgcctatgtcccgctgcatataccggaattctgtgcgaaaaacttaggtgcgaggaagcgggttcatgcgggtcagactctgggcagggggctccccctcatggatcacctgccctgctcctcctgacaacgctgctaggcaccgcaagccctttagtgttctag

SEQ ID NO: 232224 - DNA, 1095 bp, synthetic construct
  misc_feature 1..1095: note = Description of Artificial Sequence: Synthetic coding sequence
  source 1..1095: mol_type = other DNA
atgtatctttctcggttcctatccatccacgcactgtgggtgaccgtgtctagcgtgatgcagccttatcctctggtttgggggcactatgacctctgtaaaacacagatctataccgaggaggggaaggtctgggattatatggcttgccagcctgagagtacagacatgacaaagtaccttaaggtcaagttggatcctcctgacatcacctgcggcgacccaccggagactttctgcgccatgggcaatccttacatgtgcaacaacgagtgtgacgcatctaccccagagcttgctcacccgcctgagctaatgtttgactttgaaggacggcatccatctaccttttggcagtccgcaacatggaaggaatatccgaaacccctacaggtgaatattaccctgagttggagtaagacaattgagttgactgacaacatcgtgatcacctttgaaagcgggaggccggaccagatgattctggagaaaagtctcgactatggtcggacctggcagccctaccagtattacgctaccgattgtcttgacgcgttccacatggatcctaagtctgtaaaagatctgtcccagcatacagttctcgaaattatatgcaccgaggagtattcgaccggctacaccactaatagcaagatcattcatttcgagataaaagaccgatttgcgttttttgctggtcccagactaagaaatatggcctccctgtacgggcaacttgatacaactaagaagctccgagacttttttaccgtgaccgatcttcggattcgattgctgcggccagccgtgggggaaatctttgtggacgaattacatctggcacgatatttttacgcaatctcggacatcaaggttagagggagatgcaagtgtaacctgcacgccactgtctgtgtatatgacaattccaagcttacatgtgaatgcgagcataacacaactggccctgactgcggtaaatgcaaaaagaactaccagggtagaccgtggtcacccggatcgtatctacccataccaaaaggcaccgcgaatacttgtataccgtccatttcctcgatcggctccaaatag

SEQ ID NO: 232225 - DNA, 1317 bp, synthetic construct
  misc_feature 1..1317: note = Description of Artificial Sequence: Synthetic coding sequence
  source 1..1317: mol_type = other DNA
atgtacttgagccgcttcctgtctattcacgctctgtgggtcacagtgtcttccgtgatgcagccctatcccctggtctggggccattacgacctctgtaagacccagatctacaccgaagaggggaaggtctgggattacatggcctgccagcctgaatccaccgatatgaccaagtaccttaaggtgaagctcgaccctccggatattacatgtggggaccctcctgaaacattttgcgcgatggggaacccttatatgtgcaacaatgagtgcgacgcctctacacccgagctggctcacccccctgagctgatgtttgattttgaaggtagacacccaagtactttctggcagtccgctacttggaaggaatatcccaaacctcttcaggtaaatatcaccctctcctggtctaagactatagaactcaccgataacatcgtgattacattcgagagcgggcgaccggaccaaatgatactagagaagtcactggactacggacgcacttggcaaccgtatcaatattacgcaactgattgcttggacgccttccacatggatcccaaaagcgtgaaggacctgtctcagcacaccgtgctggagatcatctgcaccgaggaatactcaacaggctatacaactaactcaaagattatccacttcgaaataaaggatcggttcgcgttcttcgcgggaccacgcctcagaaatatggcgtccttgtatggccagctggacaccaccaaaaagttgcgagacttttttacagtcaccgatctgaggattcgcctactaaggcctgccgtaggggaaatcttcgtcgatgagttacatctggctaggtatttctatgctataagcgatattaaagtcagagggaggtgcaagtgcaatttgcatgccaccgtgtgcgtctacgacaacagtaagcttacatgcgagtgcgaacataacacgaccggtcccgattgtggcaagtgcaagaaaaattaccaaggcaggccttggagcccaggatcttacctgcccatcccaaaaggcactgcgaacacttacctaccaagcatgtattccgtagccgcaaatgtttgcgataatgaacttctccattgtcaaaacgggggaacgtgccacaacaacgtacggtgtctctgtcccgctgcttacacgggcattctctgcgagaaactgcgatgtgaggaggccggtagttgcggcagcgactcgggccaaggcgctccccctcatggaagcccagccctgcttctcttgactacgctgcttggaacagcctcccctctggtgttttag

SEQ ID NO: 232226 - DNA, 1620 bp, synthetic construct
  misc_feature 1..1620: note = Description of Artificial Sequence: Synthetic coding sequence
  source 1..1620: mol_type = other DNA
atgtacttgtctcgttttcttagcattcacgccctatgggtgaccgtcagctctgttatgcagccctaccctctggtttggggtcactacgatctatgcaaaacacagatatacacggaagaggggaaagtgtgggactacatggcctgccagccagagagtaccgacatgacgaaatatttaaaagtgaagctggacccaccggatattacttgtggagatcctccagagacgttctgcgcaatgggcaacccctatatgtgtaacaatgagtgtgacgcatccactcctgaattggctcatccacctgaactaatgtttgactttgaaggccgtcacccttccactttctggcagagcgccacatggaaagagtaccccaaacctctccaggtcaacatcacactgtcttggtctaagaccattgaattaacagataacattgtgattacgttcgagtcaggcaggccagatcagatgatactggaaaagagcctggattatggccgaacttggcagccttaccaatactatgccaccgattgtcttgacgcctttcatatggacccaaagagtgtaaaggacctgtcccagcacaccgttttagagattatttgcacagaagaatactctacaggctataccaccaattcaaagataattcactttgagattaaggacagattcgcattttttgccggtcctcgcctccgcaatatggcctccctgtacggacagctggacaccacgaagaagttgagggacttcttcaccgtaacagacctgagaattcggctgcttagacctgctgtgggggagatatttgtagacgagctgcacctggcgagatatttttatgctatctctgacattaaggtgaggggcagatgtaagtgcaatctccacgctacggtctgcgtttatgataatagtaaacttacttgtgagtgtgaacacaacaccaccggtcctgactgcggcaagtgtaagaaaaattaccaggggagaccatggagccccggttcttatctccctatccctaagggaaccgccaacacgtgcgatccgtatcttaccagctgtggagattgtgagtgcttcggccattcaaataggtgttcctacattgatctactgaacacagtaatctgcgtttcttgcaagcacaatacacggggtcagcactgtgagctctgccgcctgggctattttcgaaatgcaagcgctcagctggatgatgaaaacgtgtgtattgaatgttattgtaaccctcttggctctatccatgatcggtgcaacggaagcggcttctgcgaatgcaaaactggcaccaccgggcctaagtgtgacgaatgtcttcccggaaacagctggcattatggatgccagcccaatgtgtgcgacaatgagctgcttcattgtcagaatggcggaacttgtcataataatgtgcgctgcctgtgtccggcagcctacacagggatcctgtgcgagaaactacgctgtgaggaggcaggaagctgtggtagcgatagcgggcagggggcaccaccacacggctcgccagccctgttactgctcacaactctactcggtacagctagtcccctggtgttttag

SEQ ID NO: 232227 - DNA, 519 bp, synthetic construct
  misc_feature 1..519: note = Description of Artificial Sequence: Synthetic coding sequence
  source 1..519: mol_type = other DNA
atggtcggtcctgcccctcgcaggaggctgaggcccctcgccgcactagcacttgtacttgccctggcccctggcctccccactgcccgagcagggcagacccctagacccgcagaacgcggacctcccgttcgactctttactgaggaggaattggccaggtacggaggcgaggaggaagatcagccgatctacttggccgtgaagggggtagtgtttgacgtgacgtcaggaaaggaattctatggtagaggagcaccatacaacgccctcacagggaaagattcaacacgtggcgttgcaaaaatgagcttggacccagctgatctcacgcacgataccactgggctgacggcgaaggaacttgaggcgctggatgaagtcttcacaaaggtgtacaaagccaaatatcctatagtgggctatactgccagacgaatcctcaacgaagacggatcacctaacctggattttaagcctgaggaccagccacacttcgacatcaaagacgagttttag

SEQ ID NO: 232228 - DNA, 2088 bp, synthetic construct
  misc_feature 1..2088: note = Description of Artificial Sequence: Synthetic coding sequence
  source 1..2088: mol_type = other DNA
atgtcactattgttatccttctacttgctcggtttgttagtatcgagtggccaggatcgctttgctatgttggccaataacaacctccagattctgaatataaataagtcagacgagggaatataccggtgtgagggaagagtggaggcaaggggagaaattgactttagagacataattgttattgtgaatgtgccaccagcaatctcaatgcctcagaagagttttaatgctactgctgaacggggtgaagagatgactttttcatgtcgcgcaagcgggtctccagaaccagcaatcagctggttccgcaacgggaagttgattgaagagaacgaaaagtatatactgaaggggagcaatacagagctaacagtgcgaaacattattaactctgatggcggaccctacgtttgtagggccacaaataaagccggtgaagatgagaagcaggcattcttgcaagtctttgtacagccgcacataattcagttgaaaaacgagaccacttacgagaacgggcaagtaaccctggtgtgcgacgctgagggcgaacctatccctgagattacatggaagcgtgccgtggatggattcactttcactgaaggagacaaatcactcgacggcaggatcgaggtgaaggggcagcacggctcctccagcctgcatatcaaggacgtcaagttgtcagacagcggtaggtatgattgtgaggcggcatctcgcatcgggggacaccaaaaaagtatgtatctggatatcgaatacgctccaaagtttatctcaaatcagacaatatattatagctgggaagggaatccaatcaacatttcctgtgacgtgaaaagcaatcctcccgctagtatccactggcgccgagataagctggtgttgcccgcaaaaaacaccaccaatcttaagacttatagcaccgggagaaagatgatccttgaaatcgccccaacaagcgataatgacttcggtaggtataactgtacagctacaaaccacataggaaccagattccaggaatacatccttgcccttgcagacgtccccagcagcccatatggagtcaagattatcgaactttcccagacaaccgcaaaagtgtcctttaacaaacccgactcccatggaggcgtcccaatccatcactatcaagtggacgttaaggaagtagcctcggagatctggaagattgtgcggtctcacggtgtacagaccatggttgtgctgaacaacctagagcccaacactacctacgaaattcgggtcgccgcagtgaatggcaaaggacagggtgactatagtaaaatagaaatctttcagaccctgcctgtgagggagccctccccgcctagtatccatgggcagcctagttccggcaagagcttcaagttgagcattaccaaacaggacgatgggggagcccctattctggaatatatcgtcaagtacaggagtaaggataaggaagaccaatggctcgagaagaaggtccagggaaataaggatcacattatcctcgagcatcttcagtggacaatgggatacgaggtccaaatcactgctgctaatcgcctcggctattcagagccaaccgtctatgaattctcaatgcctcctaagcctaatataattaaagacactctctttaatggcctggggcttggagcagtgataggtcttggtgtggctgctctcctgctgatcctggttgtaacagatgtgtcgtgtttcttcatccgtcaatgcgggctcctaatgtgcattacacgacgtatgtgtggcaaaaaatccggaagcagcgggaagagcaaggagctggaggagggcaaggcagcttatctgaaggatggctccaaagaacccattgttgagatgcggaccgaagacgagcgtgttaccaaccatgaagacggatcccccgtcaatgagcccaatgagactacacccctcacagagcctgagaagctgccactcaaggaagaggatggtaaagaagcccttaatccagagactattgagataaaagtcagcaacgatatcatccagagtaaggaggacgatagcaaagcttag

SEQ ID NO: 232229 - DNA, 2514 bp, synthetic construct
  misc_feature 1..2514: note = Description of Artificial Sequence: Synthetic coding sequence
  source 1..2514: mol_type = other DNA
atgagcctgctactgagcttctatctcctaggacttctagtgagctctggccaggctctgttgcaggtgacgatctctctgagcaaggtagaactgagtgttggcgagagcaaatttttcacatgtaccgccattggcgaacccgagtcaatcgattggtacaatcctcagggcgagaagattatcagtacccagagggtggtggtgcagaaagaaggtgtccggagcaggttgacaatatacaacgccaacatcgaagatgccggtatttatcggtgtcaggccacagacgcaaaggggcagactcaggaggcaacagtcgtgctggaaatctatcagaagttaacttttagggaggtggtgtctccgcaggagttcaagcagggagaggacgccgaggtggtttgtagagtgtcatcttctcctgcccctgctgtgtcttggctgtaccataatgaagaagtgactacaatctcagacaatcgcttcgcaatgctcgcgaacaacaacctgcagatcctgaatatcaataaaagcgatgaaggtatttaccgttgcgaggggcgtgtggaggcccgtggcgaaatcgatttccgagatatcatcgtcatcgtcaatgtcccccctgccatcagtatgccccagaagtcctttaatgcaaccgctgaacgaggcgaggaaatgactttttcttgccgggcaagtggatcccccgaaccagctatctcatggtttcggaacggcaaactaatcgaggagaacgagaaatatattctcaaaggaagcaacaccgagctaacagtgagaaatattataaactccgacgggggaccatacgtttgtcgcgcaactaataaggcaggtgaggacgaaaagcaagcattcctacaggtttttgtgcaaccccatatcatccagctgaagaacgaaactacgtatgaaaacgggcaggtcaccctggtatgcgatgccgagggcgagccaatccctgaaataacttggaagcgggcagtggacgggtttacattcactgagggcgacaagtccctggatggacggattgaagtgaagggacagcatggctcaagctcactgcacatcaaggacgtaaagcttagcgactccgggcgttacgactgtgaggccgcaagtcggatcggtggacaccagaaaagcatgtatcttgatatagagtacgcccctaaattcatttccaatcagacgatctactacagctgggaaggaaatcctatcaatattagctgcgatgtaaaatcaaatccaccggcatctatccactggcggagagacaagctcgtgctcccggctaaaaacacaaccaacttgaaaacttattccacaggcaggaagatgatcttggagatagccccaacgtcagataatgattttggccgatataattgtaccgcgacgaatcacatcggcacccgcttccaggaatatattctggctctggccgacgtgccaagcagtccgtatggcgtgaagatcattgagttatcacagacaacagccaaagtttccttcaataaacctgactctcacggcggagttcctattcaccattatcaagtcgacgttaaagaagtggccagtgaaatttggaaaattgtgcggagccatggcgtgcaaacaatggtggtcctaaataatctagagcctaacacgacttacgagatccgagttgctgcggtcaacgggaagggccagggcgactatagcaagattgaaattttccagaccctgcctgtgagagagccgtctcccccatccatccatggccaacctagctctgggaaaagtttcaagctgtctatcacaaagcaggatgacggcggagcacctattctggagtatatcgtgaaataccggagcaaagacaaagaggatcaatggctcgaaaagaaagtccagggaaataaggatcacataattttggaacatctgcagtggacgatgggctacgaagtacagatcacagctgctaataggcttgggtatagcgagcccacggtatacgaattctccatgccacccaagcccaatatcatcaaggacacactgttcaatggccttggtctgggggcagtgatcggcctgggggtggccgctttgctgcttattctcgtggtcaccgatgtaagctgtttcttcattcgccagtgcgggctactcatgtgcatcactaggagaatgtgcgggaagaagtcagggtcttctggcaagagcaaagagctggaggaggggaaggcggcatacctcaaggatggaagcaaggaacccattgtggaaatgcggacagaagacgagagagttaccaaccatgaagatggaagcccagtaaacgagcccaacgagaccacccctctcacggagcccgaaaagttaccgctcaaggaagaggatggcaaagaggcactgaatccagagacgattgaaattaaggtcagtaatgacatcatccagtctaaggaagacgatagcaaagcctag

SEQ ID NO: 232230 - DNA, 1275 bp, synthetic construct
  misc_feature 1..1275: note = Description of Artificial Sequence: Synthetic coding sequence
  source 1..1275: mol_type = other DNA
atggttcgctcagattctggcggacaagtctacttggattaccacaatagacagggtttgttcgtggattggaagtacaatgaggcactctacttggaagagggacagccggagacttattacaggaccgccctattgcaagtaacaattagcttgagtaaggtggaattaagtgtaggggagagcaagtttttcacctgtacagcaatcggtgaaccagaatccatcgactggtacaatccgcagggagagaaaattatctccactcaaagagtggttgttcaaaaggaaggagtgagaagcagactgacaatttataatgcaaacatcgaggacgcaggcatctatcggtgccaggctaccgatgcaaaaggacaaacccaggaggctacagtggtcttggagatttatcaaaaactaacatttcgggaagtggtgtctcctcaggaattcaaacagggagaagacgccgaagtggtctgccgagtcagttctagccccgcacccgctgtaagctggttgtaccataatgaagaggtcacaacgatctcggataaccggtttgcgatgctagcaaataacaatctccagatcctcaacattaataagagcgatgagggaatttatagatgtgaagggcgagtggaggccaggggcgagatagactttagggatatcatagttatcgtcaacgttccgcctgctattagtatgcctcagaaatccttcaatgcaactgctgagaggggcgaggaaatgaccttctcatgtcgcgcttccggatcacccgagccagccatctcctggtttcggaatggcaagctcatcgaggagaacgagaagtacattctgaaggggagcaacaccgagctgactgtacgtaatatcattaattctgacgggggtccttacgtgtgtcgagccactaacaaagctggtgaggacgaaaagcaagcattcctccaggtgttcgtgcagccccacattattcagctgaagaatgagaccacatacgaaaacggacaggtgaccctagtctgcgatgctgaaggagagccgatccccgaaatcacttggaaacgcgctgtcgatgggtttaccttcactgaaggtgataagagtctagatggccgtatagaggtgaaaggccagcatggctcttcctccctgcatatcaaagacgtgaaattgtctgacagtgggaggtacgactgtgaggcggcttcacgtataggcggacatcagaagtccatgtacctcgatatcgagtcctag

SEQ ID NO: 232231 - DNA, 1983 bp, synthetic construct
  misc_feature 1..1983: note = Description of Artificial Sequence: Synthetic coding sequence
  source 1..1983: mol_type = other DNA
atgcaggaaaaccttcggtttgcgtcttctggcgatgacatcaagatatgggatgccagctccatgaccctggtggataagtttaaccctcacacgtctccgcacggaatttcctcaatttgctggagctccaacaacaattttctcgtcaccgcttcctcctccggtgacaagatcgtggtttcgagctgtaagtgtaaaccagttccgctattggagttagctgagggacagaagcaaacctgtgtcaatctgaactcgacgtctatgtatctagtgagtggcggtctgaataatacagtgaacatctgggatcttaaatctaagcgtgtgcaccgcagcctgaaggaccataaagaccaggtgacctgcgtgacttacaactggaatgattgctatatcgcatcgggctccttgagtggagagataattctgcattctgtcacgacaaacctgtcatctactccctttggccatggctctaatcagtccgtgcgccatctcaaatactcactatttaaaaagagcttgcttggatctgtgtcagataacggcatcgtgacattatgggacgtcaattctcaaagtccataccacaactttgattctgtgcacaaagccccagcctctggcatttgcttttctcccgtcaacgaactgcttttcgtgactattggtctggataaaagaataattctgtacgacacgagctctaaaaagctggttaaaacgctggtagccgacactcctctgacagctgttgatttcatgcccgatggcgcaacactcgccatcggtagctctcggggaaagatataccagtacgacctgagaatgctgaaatctccagtgaagactatttctgctcacaagactagcgtccagtgtatagcctttcagtactctaccgttctcacgaaatcctcactgaacaaaggctgctcgaataagcctacgactgtgaacaaacggagtgtcaatgtgaacgccgcaagtggtggtgtgcaaaactctggaatcgtgagagaggctccagccactagtattgcaaccgtgttaccgcagcccatgacttcggccatgggaaaggggaccgtagcagtccaagagaaggccggattaccaaggtctattaacaccgacacgctgagtaaggaaacagacagcggaaaaaaccaggattttagctcttttgacgatacagggaagtcaagtttgggcgatatgtttagcccaatccgggatgatgctgtggtgaataaaggctctgacgaaagcatcgggaagggcgatggctttgatttccttcctcagctgaacagcgtgttccctcccagaaaaaacccagtgacttcttctacgtcagttttacacagtagtcccctgaatgtcttcatgggcagtcccggtaaagaggagaacgagaatcgcgatttgaccgcagaaagcaaaaaaatctacatggggaagcaggagagcaaagattccttcaaacagctggccaaactagttacctcaggggctgagtctgggaacctgaatacaagtcctagttcgaatcagactcggaactccgaaaaattcgagaagcctgaaaacgagatcgaggcacagttgatctgtgaacctccaatcaatgggtcttctactccgaaccctaaaattgctagttccgtgacggccggagtcgcttccagtctgagcgagaaaattgcagattcaatcggcaataacaggcagaatgccccactcacatcgattcagatacggttcatccagaatatgatccaggaaactctagacgactttcgggaggcttgtcaccgagatattgttaacctgcaggttgaaatgatcaaacagttccatatgcaactgaacgaaatgcacagtctgctcgagagatactctgttaacgaggggctagtggctgaaattgaacgcctcagggaagagaataagcggttgcgcgcacacttctag

SEQ ID NO: 232232 - DNA, 1716 bp, synthetic construct
  misc_feature 1..1716: note = Description of Artificial Sequence: Synthetic coding sequence
  source 1..1716: mol_type = other DNA
atgtacctggtgagcggcggtctcaataatactgttaatatttgggatctgaagtcaaaaagagtccaccgaagtctgaaagaccacaaggatcaagtgacatgcgttacttataattggaatgactgttatattgcttcaggatctctttccggcgagatcatcctgcactcagtaaccactaatctgagttccaccccgtttgggcacggcagtaaccagagtgtgagacacttgaaatactccctctttaaaaagtctctgctcggaagcgtgagcgacaatggcattgtgacattgtgggacgtcaattcccagtcaccatatcataattttgactcagtgcacaaggcccctgcctctgggatctgtttttccccggtgaacgagttgctgttcgtcactatcggtttagacaagcggataattctatatgacacgagctctaaaaaattggtgaagaccctcgttgcagataccccactgactgccgttgactttatgcctgacggagccactttggccattgggtctagccgagggaagatttaccagtacgatctgcgcatgctgaaatcacctgtgaagacaatcagcgcgcataaaacaagcgtgcagtgcatcgcatttcaatactccaccgtgctgacaaagagctccttaaataaagggtgttccaacaaaccaaccaccgtgaacaagagaagcgtgaatgttaacgcagcctcgggcggagtacagaatagtggcattgtacgggaggcaccagctacatccatcgctacagtgttaccacaacctatgaccagtgcgatgggcaagggcaccgtagctgtgcaggagaaagctgggctgccgaggagtattaatacagatacactgtctaaagaaacagactctggtaagaatcaggatttcagctccttcgatgacactggcaagtcaagtctcggggacatgttcagccccattcgggacgacgcagttgtcaacaaaggttcagatgagagcatcggaaagggtgacggttttgatttcctgcctcagcttaactccgtctttcctcccagaaaaaatcctgtcacctcctccacgtctgtcctccactcgtcacccctgaacgtgttcatgggctctcccggaaaagaggaaaacgagaaccgggatctcaccgccgaaagtaaaaagatctatatggggaaacaggagagcaaagactccttcaaacagctggccaaactcgtgacctccggggcagagtctgggaacctcaacacatctccaagcagtaatcagacaaggaacagcgagaagttcgaaaagccagagaatgagatcgaggcccagttgatttgcgagcccccaattaatgggtcttctactcctaatcctaaaattgcaagttcggttactgctggagtggcatccagcctttctgaaaaaatcgccgatagtatcggtaataaccggcaaaacgctccacttactagtattcagattagatttattcagaatatgatccaggagacactggacgactttcgagaggcgtgtcaccgtgatatcgtgaatctccaggttgaaatgattaagcagtttcatatgcagctgaatgaaatgcacagtctgcttgaacgctacagcgtgaacgagggtctggtggcagagattgagcgactcagggaagagaacaagcgccttcgagcccacttttag

SEQ ID NO: 232233 - DNA, 1983 bp, synthetic construct
  misc_feature 1..1983: note = Description of Artificial Sequence: Synthetic coding sequence
  source 1..1983: mol_type = other DNA
atgcaggagaacttgcgctttgcgtcgtccggcgacgatatcaagatctgggacgcttcgagcatgactctggtagataaattcaacccccatactagcccccacggcatcagctcaatctgctggagttcgaacaataactttctggtaaccgcttcctcatctggcgacaaaattgtggtgtctagctgcaaatgcaaacccgtgccactgcttgagttagccgaaggacaaaaacaaacatgcgtgaaccttaactccacttcgatgtacctcgtgtctgggggtttgaacaataccgtgaacatctgggatctcaagtcaaaaagagtgcatcgctccctgaaggaccacaaagaccaggtcacatgcgttacatataattggaatgactgctatatcgcttctggatccctgtcgggcgagattatccttcactctgttaccactaacctgagcagcacaccctttggacatggctccaatcagtctgtgcggcatctaaaatactctctgttcaagaaatccttacttggatctgtatccgataatgggatcgtcacgctgtgggacgtgaattctcagagtccttaccataacttcgacagcgtccacaaagccccagcttcaggaatctgtttctctccagttaatgagctgctattcgtcacaattggcctggacaaacgcatcatcctgtatgacaccagctctaaaaagcttgtaaaaacactggtcgctgacaccccactgacggcagttgactttatgcctgatggagccacactagctatcggcagttcccggggaaagatatatcaatacgacctgagaatgttgaagtcaccagtgaaaaccatctctgcacacaagacttccgttcagtgtattgcctttcagtatagcaccgtgctgaccaaaagttctctgaataagggttgtagtaacaagcccactacagttaataagcgtagtgtgaatgtaaatgctgcaagcggaggtgtccagaatagtgggattgtcagggaagctccagctaccagtatagcaaccgtcttgccccagccaatgacaagtgccatggggaagggtaccgtagctgtgcaggagaaagctgggttaccacgctccataaacaccgatacactgagcaaagaaactgattccgggaagaatcaggatttttcgtcatttgatgatactggaaagtcatccctgggagatatgttctctcccatccgggacgatgccgtagtaaacaaagggtcagacgagtctatcggcaagggagacggttttgatttcttgccccaattaaactccgtgttcccaccacggaaaaatcccgtcaccagcagcacctcagtgttacactctagtcctctgaatgtgtttatgggcagccccggtaaagaagagaacgaaaatagagacctaactgccgagagcaagaagatctacatgggcaaacaagaatccaaggattcgtttaaacagctggctaagctcgtaactagtggagcagagtcaggtaacctgaacacatcaccttcctcgaaccagactaggaattcggaaaagtttgagaagcctgagaacgaaatcgaagctcaactgatatgcgagccgccaatcaacggctcatccaccccaaatccaaagattgcctcatctgttacagctggagttgccagctctctttccgaaaaaattgcggattccattgggaataaccgacagaacgctccgctgacgtcgattcaaattagattcattcaaaacatgattcaagagaccctagacgactttcgggaagcttgtcatagggacatcgtaaacttacaggtggagatgatcaagcagttccacatgcagctaaacgaaatgcattcactgcttgagcgatactctgtgaatgagggcctggttgccgagattgagaggctgcgcgaggagaataagagactgcgcgctcacttctag

SEQ ID NO: 232234 - DNA, 1716 bp, synthetic construct
  misc_feature 1..1716: note = Description of Artificial Sequence: Synthetic coding sequence
  source 1..1716: mol_type = other DNA
atgtacctggttagtggaggtctcaataatacagtgaacatttgggacctcaagagcaaacgcgtgcatagaagtctcaaggatcataaagatcaggttacctgcgtgacttacaactggaatgactgttatattgcttctggtagtctgtcaggtgaaatcattctacattctgtgactaccaatttgtcctccactcccttcgggcacggctcaaaccagtccgtccgccacctgaaatactcactgtttaaaaaaagtctgctggggagcgtgtctgataacggcatcgtcaccctttgggatgtcaattcccaatctccataccacaattttgactctgtccacaaagccccagcaagcgggatttgtttctcccctgttaacgagctcctgttcgtgacaatcggcttggacaaaaggatcattctgtatgacacaagctcaaaaaaactggtcaaaactctcgtggccgatactcccctgaccgcggttgatttcatgcccgacggagccacacttgccatcggctcaagccgcggaaagatctatcaatatgatttgcgcatgctgaagtcacctgtgaaaaccatcagcgcccataaaacttcagtccagtgtatcgcgttccaatactccaccgtgctcaccaagtcttccctgaacaagggctgctctaacaaacctactactgtgaataagcggagcgtcaatgtgaacgctgctagtggcggagtgcaaaacagcggaattgttagagaggctcccgctacaagcatcgcaactgtgctgccgcaacccatgactagtgccatggggaagggcacagtcgcggtgcaggaaaaagctggactgcccagatccatcaacacagatacactgtccaaggagacagacagcggaaaaaaccaggactttagttcatttgacgacacaggcaagagtagcctgggtgacatgttcagtccaatcagggacgatgccgtggtaaataagggctctgatgagtctataggaaagggcgacggcttcgattttctcccacagctcaacagtgttttcccccctcgtaaaaatcccgtgacatcaagtaccagcgtcctgcattcatctcctttaaacgtcttcatgggatctccgggaaaggaggagaacgagaatagagatctcacggccgaaagcaagaagatctacatggggaaacaggagtccaaggactctttcaagcaactggccaagctggtaactagcggagctgagtctggaaacctaaatacctctccctcctcaaaccagactcgcaatagtgaaaaattcgagaaacccgagaacgagatcgaagctcaactaatttgtgagcctccaataaacggaagctctacccccaatcctaagatcgcttccagcgtgacagccggagtggctagtagcctcagcgagaaaatcgcagatagcatcggcaataaccggcagaacgccccactgacctcaatccagattcggttcatccagaatatgatccaagagacactggatgactttagggaagcctgccacagagatattgtaaatctgcaggttgaaatgattaaacaatttcatatgcagctgaacgaaatgcactctttgctagagcggtatagtgtgaatgaaggattagtcgcagagatcgagcggcttcgagaagaaaacaaacggctgagggctcatttttag

SEQ ID NO: 232235 - DNA, 483 bp, synthetic construct
  misc_feature 1..483: note = Description of Artificial Sequence: Synthetic coding sequence
  source 1..483: mol_type = other DNA
atgtatctggtatccggagggttaaacaatacggtgaacatctgggacctcaaatcgaaacgggtgcaccggtcacttaaagatcataaagaccaggtaacctgcgtaacatataactggaatgactgctacatagcctcgggatccttatctggcgagatcattttacacagtgtgacaaccaacctgagctctaccccgtttggtcacggctctaaccaaagcgtgcggcacctcaaatattcattattcaaaaagtctcttctcgggagcgtgtctgacaatggaattgtgactctttgggacgtgaactctcagagcccatatcacaatttcgactcggtgcacaaagctcctgcttctggcatatgcttttcacccgttaatgaacttctttttgtcacaatcggcctggataagcggatcattctgtacgacacctccagcaagaaactggtcaagaccctggtggcggacacctag

SEQ ID NO: 232236 - DNA, 504 bp, synthetic construct
  misc_feature 1..504: note = Description of Artificial Sequence: Synthetic coding sequence
  source 1..504: mol_type = other DNA
atgcatttcaccggcgcagtgatgcaggagaatttgaggttcgcgagttctggtgatgatataaaaatttgggatgcaagtagcatgaccctcgtggacaagtttaatccccataccagtcctcacggcatcagcagcatatgctggtcgtcaaacaataattttctcgtcacagcatctagctccggagacaaaatcgtagtctcatcgtgtaagtgcaagccagtccccctgttggagctggccgagggtcaaaagcagacctgcgtgaacctgaactcaacttccatgtatcttgtgtcaggagggctgaacaacacagtgaatatttgggatttgaagtctaaacgagttcaccggtctcttaaagatcataaagaccaggtgacttgtgtgacatataattggaatgactgttatattgccagtggctctctgtccggtgagattatcctgcacagcgtcacgacgaatctgtcctccacccccttcggccacggatag

SEQ ID NO: 232237 - DNA, 306 bp, synthetic construct
  misc_feature 1..306: note = Description of Artificial Sequence: Synthetic coding sequence
  source 1..306: mol_type = other DNA
atgcaggagaatctgcggttcgcatctagtggagatgatatcaaaatctgggacgcctcatccatgaccctcgtggataagtttaatccgcacactagccctcatggcatcagttctatttgctggtcttctaataacaattttttagtgacagcatcatccagcggggacaaaatcgtggtttcttcctgcaaatgcaagccagtgccgctgctggagctggcagagggccagaagcagacctgtgttaacctgaattccaccagcatgtacctggtgtctgggggattaaacaacactgtctag

SEQ ID NO: 232238 - DNA, 498 bp, synthetic construct
  misc_feature 1..498: note = Description of Artificial Sequence: Synthetic coding sequence
  source 1..498: mol_type = other DNA
atgcaggaaaatttgcgtttcgcctcaagcggcgatgatattaaaatatgggacgcttcttctatgaccctggtagataagtttaatcctcacacctctccccacggtatctcaagtatctgttggtccagcaataataattttttagtaacagcaagttccagcggtgataagatcgtcgtgtcgtcttgcaagtgcaagccagtcccgctgctggagctggcagagggccagaaacagacatgtgtgaacctgaacagcacctccatgtacctagtcagcggaggccttaataacaccgtgaacatctgggacctgaaaagcaagcgggtccacagaagtttgaaggaccataaagaccaggtaacgtgtgtgacctacaactggaatgattgctacatcgcgagcggttctttgtcaggcgagattattctgcactcggtcaccactaatctgagcagcactcccttcggacatgggtcgaatcagtctgtgtag

SEQ ID NO: 232239 - DNA, 2004 bp, synthetic construct
  misc_feature 1..2004: note = Description of Artificial Sequence: Synthetic coding sequence
  source 1..2004: mol_type = other DNA
atgcatttcactggggctgtcatgcaggagaacctcaggttcgcgtccagcggggacgatatcaaaatctgggacgcatcttctatgacacttgttgataagttcaatccacatacatccccccacggcataagttctatttgttggtccagtaataataatttcttggttaccgcttcctcatccggggataagattgtggtttccagctgtaagtgcaagcccgtgccactcttagaactggctgagggccaaaagcagacttgcgttaatctcaatagcaccagtatgtatctagtgagcggaggtctgaataacactgtaaacatttgggacctgaaaagcaaaagagtacacagaagtctcaaggatcacaaagatcaagtcacatgtgtgacatataactggaatgattgttacattgctagcggtagcctgtccggagaaattatcttacattccgtaaccacgaatctctcgtcaactcctttcgggcatggtagcaaccagagtgtccggcatcttaagtacagtttgttcaaaaaatctctcttgggtagtgtgagcgataacggcatcgtgacactctgggatgttaactcacagtctccttaccacaattttgacagcgtccacaaggcccctgcctccggcatctgtttcagccctgttaacgaacttctctttgtgactatcggcctggataagcggattatcctctacgacaccagctccaagaaactcgtcaaaacccttgtcgccgatacgccgctcaccgcagtagattttatgcccgatggcgcaaccctcgctatcggttcatccaggggcaagatatatcaatatgatctgagaatgttgaaatcacctgtcaagaccatttcggcacacaaaacatccgtccagtgcatcgctttccagtacagtactgtattaacgaagtccagtctgaacaaaggctgcagcaataagcccacaacagtgaataaaagaagtgttaacgtgaatgccgcttcaggcggtgtccagaatagtggaattgtccgcgaagcccctgccacttctatagcgactgtactgcctcagcccatgacatctgccatgggcaagggcaccgtggccgttcaggaaaaggcgggacttccacgcagcatcaacaccgatacgctgtccaaggagaccgactcaggcaagaatcaggatttctcctcatttgacgatactgggaagagcagcctgggtgacatgttttccccaatacgggatgacgcagtggtcaataaggggtctgacgaatccattggaaaaggtgatggattcgattttctgccacagcttaattctgtgtttccccctcgaaagaacccagttacttctagcacctcagtcctgcattccagcccactgaatgtgtttatgggaagccccggtaaggaggagaacgagaaccgagacctgacggccgaatctaagaagatctatatgggaaagcaggagtccaaggacagcttcaaacagctggccaaactggtcacatcaggagccgaatcaggcaaccttaacacaagcccgtcgagtaatcagactcgcaacagcgagaaatttgagaagcctgaaaacgaaatcgaggcccagcttatctgtgagcctccaattaatggctctagtacaccgaaccctaagattgctagttctgtgacagcaggcgtagcttcttcgctctccgagaaaatcgccgactctattggaaacaatcggcagaacgcccctcttaccagcatccagattcggttcatccagaacatgatccaagagaccctagatgacttccgagaggcctgccatagagacattgtgaacctccaggttgagatgatcaagcagtttcacatgcaattgaacgagatgcactcccttcttgagcgttacagcgtgaatgaggggctggtagcagaaatagaacggctgagggaggaaaataaacgactcagagcccatttctag

SEQ ID NO: 232240 - DNA, 3744 bp, synthetic construct
  misc_feature 1..3744: note = Description of Artificial Sequence: Synthetic coding sequence
  source 1..3744: mol_type = other DNA
atggcccagagcctgcggctgcacttcgccgctcggagaagcaacacctatccgctgtccgagacgtctggagatgatcttgattcacacgtacacatgtgtttcaagagacctactagaataagcacctcaaacgttgtacaaatgaaactcacccctcgccagaccgccttggctccacttatcaaggagaatgtgcagtcgcaagaaagatcaagcgtgcccagtagcgaaaacgtgaacaaaaaaagttcttgtctccaaatatcactccagcctactaggtacagtggataccttcagtccagtaatgtgctggcagactctgacgacgcatcgttcacgtgtatccttaaagatggaatttattcttcagctgttgtggacaacgaacttaatgctgttaatgacgggcatctcgtgtcatcacctgcgatatgcagtggcagcctcagcaacttctcaactagcgataatggcagttacagctctaacggctctgacttcggcagttgtgcctcaatcacatccggcggaagttacacgaacagcgttatttccgattcctccagttacaccttccctccctccgatgacacatttcttgggggaaacctcccttctgatagcacctcaaaccgatccgtccctaacaggaatactaccccgtgcgagattttttcgaggtcgacttcaacagacccttttgtccaggatgacctggagcatggactcgagataatgaaactccccgttagccggaatacaaagattcctctgaagcgatacagttctttggtgatctttccccgtagcccaagcaccacgcggccaacctcccctaccagcctgtgcaccttgctgtcaaaggggagctaccagacttctcaccagtttatcatctctccctctgaaattgcacataacgaggacggcacatcagctaaaggatttctctcaaccgcagtcaacgggcttcgactgtcaaaaaccatttgtacgcccggtgaggttagggatatccgacctttgcataggaaagggagcctgcaaaagaaaattgtgctgagcaataacactcccagacagacagtctgcgagaagagttcagaggggtatagctgtgtttccgtacactttacccagcgcaaggctgccaccctagactgtgagacgactaatggagattgcaagcccgaaatgtctgaaatcaaacttaactccgactctgaatacatcaagctgatgcatcgaacctctgcgtgcttgccgtcttcacaaaatgttgattgtcagattaacattaatggggagctagagaggccacactctcagatgaataagaaccacggtatattaaggagaagtatttctctgggcggtgcttatcctaatatttcatgtctttcctctctgaaacataattgtagcaaagggggaccttcgcagctgctcattaagtttgcaagtggcaatgaaggcaaagtagacaatctctctcgcgattccaaccgcgattgcactaacgaattgagcaacagttgcaaaccaggatgggttgtgctcgatcagcccgatgctgcctgccacctgcagcaacagcaggagccttccccgctgcctccgggatgggaggaacgacaagatattctcggccgtacttattacgtgaatcacgaatcccgcaggactcagtggaaacgacctaccccacaagataatctcacggacgctgagaacggaaacatccagcttcaggcacagcgcgcatttacaacccgtaggcagatcagcgaagagaccgagtccgtggacaatcgcgaaagcagtgaaaattgggaaattataagagaagacgaagcaacgatgtactcaaatcaggcgttcccgtcaccgccacccagcagtaacctggacgtccccactcatctggccgaggaacttaacgcacgtctcaccattttcgggaactccgcggtttctcaacccgcatctagttcaaatcattcgagccgtcgcggttcactgcaggcttacaccttcgaggagcagcctacccttcctgtgctcctgcccacctcctctggcctcccccctgggtgggaagagaaacaggacgaacggggtcggtcatattatgtggaccacaattccaggacgacaacatggaccaaacctaccgttcaagccaccgtagagacatcacagctgaccagcagtcaatcctcagcgggaccgcagagtcaggccagcacttctgactcagggcagcaggtgactcagccaagcgaaatcgagcagggtttcctacctaaagggtgggaggtgcgccacgctcccaacggcaggccattctttattgaccacaatactaagactacgacgtgggaggatccaaggctgaagattcccgcacacctcagggggaaaacttcgctcgatacgtcaaacgacttggggcctctgccgcctggatgggaggagcgaacccataccgacggaagaattttctatatcaaccacaatataaagcgcactcaatgggaagatcccagattggaaaacgtcgccataacaggccctgccgtaccgtattcccgggactataagcgcaagtacgaatttttcaggcgaaagcttaaaaagcaaaacgacatacccaacaaattcgagatgaagctgcgtagagcgactgtccttgaggatagctacagacgtataatgggcgtcaagcgcgcagacttcctaaaggcgagattatggatagagtttgacggggaaaaaggccttgactacggtggagtggctagggaatggttcttcctgatctccaaagaaatgttcaacccttattacggtctcttcgagtattcagctaccgataattacacactgcaaataaacccaaacagcggactctgcaatgaggaccacctgagctactttaagttcatcgggagagtcgctggcatggctgtgtaccacgggaagttgctcgatggcttcttcatcagacccttttataagatgatgctacacaaacccataaccctgcatgatatggagagtgtggactcagaatactacaattctttgagatggattctagagaacgatccaactgagctagacttacgattcatcattgacgaggaactcttcggccaaacccaccagcacgaactgaagaatggaggttcggaaatcgtggttacaaataagaacaaaaaagaatacatctacctcgtgatccagtggaggtttgtgaaccgaatccaaaaacagatggccgcttttaaggaaggttttttcgaacttataccacaagatttgatcaagatctttgatgagaatgagcttgagttgctaatgtgcggcctcggggatgttgatgtgaatgactggagagagcacaccaagtacaagaatggatacagcgcaaaccatcaggttatacagtggttttggaaggcagttctgatgatggattccgaaaagaggattcgattgctgcaattcgttaccgggacctctcgtgttccaatgaacgggtttgccgagttatacggaagtaatggaccacagagtttcacagtggagcagtggggtacccccgaaaagttgccgagggcccacacctgttttaaccggctcgatttgccaccttacgagagcttcgaggaactgtgggacaagctgcagatggcgatcgaaaacacacagggcttcgacggcgtggattag

SEQ ID NO: 232241 - DNA, 2703 bp, synthetic construct
  misc_feature 1..2703: note = Description of Artificial Sequence: Synthetic coding sequence
  source 1..2703: mol_type = other DNA
atggccacctgtgcagtcgaagtcttcggtttgctcgaagatgaagaaaatagtagaattgtccgggttagggtcatcgctggcattggactcgcgaaaaaagatatcctcggcgcatctgacccatatgtgagggtaactctgtatgatccaatgaatggggtgctgacctccgtgcagacaaaaaccatcaagaaatccctgaaccccaaatggaatgaagagatcttgttccgggttcacccacaacaacatagactgctgttcgaggtcttcgatgaaaaccggttgactagagacgacttcctcggccaggtcgatgtacctttgtatccacttcctacagagaacccacgcctggagagaccatatacctttaaagattttgtcctccacccccgaagccacaagtcgcgcgtaaaagggtacttacgcctgaagatgacctatctgccaaaaaccagcggctcggaagatgacaatgccgagcaagcagaggaactcgaaccaggatgggtggttctggatcaacctgatgcagcctgccatctgcaacagcagcaagaaccttcccccctgccacctggctgggaagaaaggcaggacatcctcggacgaacatattatgtgaaccacgaaagccggaggactcagtggaaacgccctacaccacaggacaacttaacggacgctgaaaatggcaacatccagcttcaggcccagcgagccttcaccacaagacgacagatttccgaagagacagaaagcgttgataatagggaaagtagcgagaactgggagattatcagagaggacgaagcgactatgtacagtaatcaggcctttcctagccctccacccagctctaaccttgatgttccaacccatctcgcagaggaattaaatgccagactgacaatctttgggaattcggctgtttcacagcccgcatcatcctctaatcatagcagcagaaggggtagccttcaggcgtatacattcgaggaacagcctaccctccccgtgctacttcctacctcatcgggactgcctccgggttgggaggaaaaacaggacgagcgaggacgttcctactatgttgaccacaattcccgcacgaccacctggacaaagcccacagtgcaggccaccgtcgagacctctcaactcacatccagccagtcaagcgctgggccacagagtcaggcgtctacctccgattccgggcagcaggttacacagcccagtgaaattgagcaggggtttctcccaaaaggctgggaggtccgccatgcgcctaatgggaggcctttctttatagatcacaatactaagacgacgacttgggaagatccacggctgaaaattcccgctcacctgcgaggaaagacttctctggacacttctaacgatttaggccctctaccacccggttgggaggagagaacacacactgacggcagaattttctacattaaccataacatcaagcgaactcaatgggaagatccacgattagagaatgtggctatcacagggccagccgtgccatattcgcgagactataaacgcaagtacgagtttttccggcgaaagctgaagaagcagaatgacattcctaacaagttcgaaatgaaactgaggcgcgcaaccgtgcttgaggactcctaccggcgaattatgggggttaaacgggctgatttccttaaagctcgcctatggatcgagttcgatggcgaaaaagggctggactacggaggtgttgccagggaatggttcttcttgatcagcaaagagatgtttaatccctactacgggctgttcgagtattcagccacagacaactacactcttcagatcaaccccaactccggcctttgtaacgaggatcacctcagctattttaaatttattggcagagtggccggaatggctgtgtaccatggaaaactcctggacggattcttcatcaggccattctacaaaatgatgctgcataaacctattactcttcacgatatggagagcgtggattctgagtattacaattcccttaggtggattctcgaaaatgaccccactgaactggacctgcgctttattatcgatgaggagctgttcggtcaaacccaccaacacgaacttaagaacgggggtagcgagattgtcgtgacaaataaaaacaaaaaggagtatatttatttagttatccaatggcgctttgtgaatcgaatccagaagcaaatggccgcttttaaagaaggattctttgagctgattccacaagacttaattaaaatattcgacgagaatgaactggaactgctcatgtgtggattaggcgatgtagacgtcaatgattggcgcgaacacactaagtacaaaaacggctactccgccaaccaccaagtgatccagtggttttggaaggccgtgctgatgatggattctgagaaaagaatccgtctgcttcagttcgtgaccggtacaagtcgagtgcccatgaacggttttgccgagctctatggatctaacggccctcagtccttcacagttgagcagtgggggactccagaaaaattaccccgtgctcatacatgctttaacaggctggatctgccaccctacgagtcatttgaggaattatgggacaagctgcagatggccattgagaacacccaggggttcgatggtgttgactag

SEQ ID NO: 232242 - DNA, 3912 bp, synthetic construct
  misc_feature 1..3912: note = Description of Artificial Sequence: Synthetic coding sequence
  source 1..3912: mol_type = other DNA
atggcccaaagcctccgcctgcacttcgcggctcgtcgtagcaacacataccccctgagcgaaacaagcggtgatgatcttgactcacatgtgcacatgtgtttcaagcgtcctacaagaatctcaaccagtaacgtggtgcaaatgaaactgacccctcgccagacagccctcgcccctctcatcaaggagaatgtccaatcccaggagcgaagctcagtgccttcttccgaaaacgtgaataaaaagtcctcatgcctacagatctctctgcaaccaacccgctacagtgggtatcttcagtcgagtaatgtgctcgctgattccgacgatgcgtctttcacttgcattctaaaggatgggatatactcctcggccgtggtcgataatgagttgaacgcagtgaacgacggacacctagtctcatcccctgccatttgcagcggcagcctgagtaacttctcgacctccgacaatgggagctattcaagtaatgggtccgacttcgggagttgtgccagtatcacttcgggtgggtcatatacaaattccgtgatcagcgacagttcatcttatacttttcccccttccgatgatacgtttctagggggaaatctgccttccgactctacatcgaaccgcagcgtacccaatcgtaatacaactccatgcgaaattttttcacgtagcaccagcacagatccatttgtccaagatgatctggaacacggcctcgagattatgaagctccccgtcagtcggaacaccaaaatccctctcaaacggtactcatccctggtgatctttcccagaagtccctccacgacacgcccaacatctcccacaagcctgtgtaccctgctctccaaaggttcttatcaaacatcacatcaattcatcatttcgccctctgaaatcgcccataatgaagacggcacctctgccaaggggttcctgagtaccgcagtgaacggccttagactgtctaagactatttgcacaccgggtgaagtgcgagatattcggccattgcatcggaagggctcactccagaaaaagattgtgctatcaaacaacacaccacgccagacagtgtgcgagaaatcctccgagggttattcttgcgtatccgtccacttcacccagaggaaagccgcaacactcgattgtgagactacaaatggcgactgtaagcccgaaatgtcggaaatcaagttgaatagcgactcggagtatattaaactgatgcaccggacttccgcttgcctgccttcaagccagaacgtcgactgccaaatcaacatcaatggggaacttgagagaccccattcccagatgaataaaaatcacggcatactccgcaggtctatatctctgggcggtgcgtaccccaacatctcttgccttagctccttgaaacacaattgtagcaaggggggtccttctcaactcctgattaagtttgctagcgggaacgaggggaaggttgataacctcagtagggactccaatcgcgattgtaccaacgagctaagtaactcctgcaaaactcgcgatgattttcttggccaggtggacgttccactctaccccctgccaacagaaaatcccagactcgagcgcccatacacttttaaagacttcgtgttacaccccagaagccataaaagcagggttaaaggatacctgcgcctgaagatgacatacctccctaagacgtctgggtcggaggatgacaatgctgagcaggccgaggagctcgagcagcaacaggagccttcacccctgcctcccggttgggaggagcgccaggacattttaggcaggacatattatgtgaatcatgaatcccggaggacgcagtggaaacgcccaactccacaggacaacctaactgacgcagagaacgggaatatacagttgcaggcgcagcgtgccttcaccactcgccgtcagatctcagaggaaactgagtccgttgacaaccgcgagagctcagagaattgggagatcatccgagaggatgaggcaactatgtactctaatcaggcattcccttcccccccaccatcctctaatctggacgtccctacgcacctggccgaggagctgaacgcacgccttacaatcttcggcaacagtgccgtctcccaacccgcttcatcatcgaatcacagtagtagaagaggctcactacaggcatatacattcgaggagcagccgacgctgccagtgctgcttcccacaagctctggcttgccaccaggatgggaggagaagcaggacgaacggggaagatcatattacgtggatcataactcccgtacaaccacttggacgaagcccacggtgcaggctactgtggagacaagccagttgacctcctctcagtcctcagcagggccacagagtcaggcaagcacctctgactctggacagcaggtgacgcaaccgtccgaaattgagcaggggttcttgcctaaaggttgggaggtaagacacgcaccgaacggccgtcctttctttattgatcacaacacgaaaaccactacctgggaggaccccaggcttaaaattccagctcaccttcgtgggaagacttccttggacacttcaaacgacctcggcccacttcctcctggctgggaggaaaggacacacaccgacggccgtattttttatataaaccataatatcaaaaggacacaatgggaggacccaagactggagaacgtcgccattacagggcctgcagtcccatactccagggattacaagagaaaatacgaatttttccggagaaagctgaaaaagcagaatgatatccctaataagtttgagatgaagctccggagggctactgtgttagaagattcatacaggcgtataatgggggtgaagcgcgcagacttcctgaaagccaggctgtggatagagtttgacggagaaaagggactggactatggcggagtcgctcgcgagtggttcttcctgatctccaaagaaatgttcaatccatactacggactgttcgagtactcagctactgataactacacattacaaattaaccccaattccggcctttgtaatgaagaccatctttcgtactttaagtttatcggccgtgttgcaggcatggccgtctaccacgggaagctactggacggattctttattcgcccattctataaaatgatgctccacaaacccatcactctacacgacatggaaagtgtggacagcgaatactataattcacttaggtggatattagagaatgacccaacggagctggatctcaggttcatcatcgatgaggaactttttggacagacgcatcagcacgagttaaagaatggagggtcagaaatagtggtgactaacaagaacaagaaggaatatatttatcttgtgatccagtggcgattcgtcaaccgtatccagaagcagatggccgcttttaaagagggcttctttgagctgatccctcaggacctgatcaagatttttgacgagaacgaactcgagttgctcatgtgcggattgggagatgtagatgtgaacgattggagggaacatacaaagtacaaaaacggctactctgccaaccaccaggtcatccagtggttttggaaggctgtgctcatgatggatagcgaaaagaggatcagactacttcaattcgttacaggtacttcacgcgttcccatgaacggatttgcagaactctacggctccaacggacctcagtcatttaccgtggagcagtggggtaccccagaaaagctcccgagagctcatacttgctttaacaggctagacttgccaccctacgaatcctttgaggagctatgggacaagctgcagatggccatagaaaatactcagggcttcgacggagtggattag

SEQ ID NO: 232243 - DNA, 3960 bp, synthetic construct
  misc_feature 1..3960: note = Description of Artificial Sequence: Synthetic coding sequence
  source 1..3960: mol_type = other DNA
atggctcagagcctgaggttacattttgccgctcgtcgctcaaatacgtaccctctgagtgaaacctcaggtgatgacctcgacagtcacgtgcacatgtgtttcaagcggcctaccaggattagtacatcaaacgtggtgcagatgaaactcacacccagacagacggcactagcacctttgatcaaggagaacgtgcaatctcaggagcggtcaagcgtcccatccagtgagaacgtcaacaagaagtcctcatgtctccagataagcctccaacctacaaggtatagcggctacctgcagtccagcaacgtgctggcagacagtgacgacgcatcttttacttgtatactgaaggacggcatctactcgtctgcggtggtggacaacgaactgaacgctgtgaatgacggccacctcgtgtctagccccgctatctgtagcggatcactgagcaacttcagtacttcagacaacggatcctattcttcaaacgggtcagacttcggaagctgcgcaagcatcacatctgggggatcctacactaactccgtgatatccgattcatctagttatacatttccaccaagtgacgacacatttctcgggggtaatcttccaagcgactcaacctctaacaggagcgtgccaaataggaacacaaccccctgcgaaatcttctccaggagtacgagcaccgatcccttcgtacaggacgatctcgagcatgggctcgagatcatgaaactgccggtctctaggaacactaaaatccccctgaagagatacagctctctggtcattttccctcgctcccctagtacgacaaggccaaccagccctacttctctgtgcacccttctgtcaaagggatcctaccagacctcgcatcaattcataatatccccttccgagatcgcccacaatgaagacgggacatccgctaaggggttcctgagcaccgccgtcaacggattgcggctctctaagaccatctgcacccccggtgaggtccgggacatccgccctctgcatcgcaaagggtctttgcagaagaagatcgtgctgtctaacaatactccccgtcagactgtgtgcgagaagagtagcgagggatactcatgcgtttctgtccattttactcaaagaaaagctgcaacacttgactgcgaaaccaccaacggtgattgcaaaccagagatgtctgagataaaacttaactcagacagcgagtatatcaaactgatgcaccggactagcgcctgtctgccatcctcccagaatgtcgactgtcagattaacatcaatggcgaactggaacggcctcacagtcaaatgaataagaatcacggcatccttcgacgaagtattagcttgggtggtgcttatccaaatatttcctgcctgagctccttaaaacataactgtagtaaggggggacctagtcagttgttgatcaaattcgccagcgggaacgaggggaaggtggacaacctaagccgcgactcaaatagggactgcaccaatgagctgtctaatagctgcaagacccgggacgattttttggggcaggtcgacgtacccttataccccttacctactgagaatcccagactcgagcgcccatatacattcaaggacttcgtgctccatccacggagtcataagtcccgggtgaaaggctatctgcgactcaaaatgacttacttgcctaaaacttccggaagtgaggacgataacgccgaacaggcagaggagctggagcctgggtgggtcgtgctggatcagcctgacgccgcatgccacctccagcagcagcaggaaccatctccactgccacccggttgggaggagcgacaggacatcctcggccgtacctattatgtgaaccacgaaagtcgacggacacaatggaaaaggcctacccctcaggataatctcactgatgcagaaaacggcaacatccagttgcaggcgcagcgagcgtttactactcgcaggcaaataagtgaagagacggaatccgtcgacaaccgggagagttccgagaattgggaaattataagagaggatgaggccaccatgtatagcaatcaggccttcccctcgccccctccatcctccaatctagatgtgcccacccacctagctgaggaactcaacgccaggcttaccatatttggaaacagcgctgttagtcagccagcctcctctagcaatcattcatctcgtcgaggatcgctgcaggcttacacattcgaagaacagcccacgttgcccgtacttctgcctacttcttcgggcctcccgcctgggtgggaagagaaacaggacgaaagaggtagatcatattatgtggatcacaatagccgtacgactacatggaccaaaccaacagtccaagccaccgttgagacgagccaactgaccagcagccagtcttctgctggaccgcagagtcaagctagcacttccgacagtggccagcaggtaacacagccgtccgaaatcgagcagggcttcctgcccaagggatgggaggtgcggcatgctcctaacggaagacctttctttatcgaccataataccaagaccaccacctgggaggatcctcggctgaagattccagcacaccttcgaggaaagacttccttggacacttctaacgacttgggccctctgccgcctggctgggaggagaggacgcacaccgatggtaggatcttctacattaaccacaacattaagcggacacagtgggaagacccgagattggaaaatgttgctatcaccggcccagctgttccctactctagagattacaagcgcaagtatgaattcttccgtcgaaaactgaagaagcaaaatgatattcccaacaagtttgaaatgaagctgagaagagctactgtactagaagactcctaccgccgaatcatgggcgtaaagagggccgattttctgaaggctaggctgtggatagaatttgacggcgaaaaaggcctggactatggtggcgtagctagggaatggtttttcctgatttccaaggaaatgtttaacccttattacggtctatttgaatatagcgccacggataactatacgctgcagatcaaccctaactccggactttgcaacgaggatcatctgagctacttcaaattcattggcagagtcgccggaatggccgtttaccatgggaaactgctggatggctttttcatcagacccttttacaagatgatgctccataagcccataacattgcacgacatggagtcagtggattccgaatactataatagcctccgctggattctagagaatgatcctactgagctggacctgcgattcataatcgatgaggagttattcggacagacccaccaacacgagctaaagaacggcggttcggagattgttgtgaccaataagaataaaaaggaatacatctatcttgtcattcaatggagattcgtaaatagaattcagaagcagatggcagcatttaaggaagggttcttcgagctgataccccaggacctgatcaaaatctttgatgagaacgaattggaattgctaatgtgcggcctgggcgacgttgatgtgaatgactggagggagcataccaaatacaaaaacggatattcagcaaaccaccaggttatccagtggttctggaaggcggtgctcatgatggacagtgaaaagagaatccgtctgctccagtttgtgacgggaacttctcgggttcccatgaatggctttgccgagctgtatggttccaatgggccacagtcttttacggtcgaacagtggggcacacccgaaaaactgcccagggcccacacctgctttaaccggctcgacctgcctccttacgagagcttcgaggaactgtgggacaaactgcagatggccattgagaacactcagggattcgacggcgtcgactag

SEQ ID NO: 232244 - DNA, 2616 bp, synthetic construct
  misc_feature 1..2616: note = Description of Artificial Sequence: Synthetic coding sequence
  source 1..2616: mol_type = other DNA
atggccactggcctgggcgagccagtttatggtctatcagaagacgagggagaaagcagaattctgcgagttaaagtagtgagcgggattgacttggccaagaaagatattttcggagccagcgatccttacgtcaaattgagtctctacgtcgctgacgaaaaccgcgagctggctctggtgcagactaagaccatcaaaaagaccctgaaccctaagtggaacgaggaattctactttcgcgtcaaccctagcaaccaccggctcttgtttgaagtgtttgacgagaacaggctcacaagagatgacttcctaggccaggtggacgttcctctcagccatctgccgaccgaagatcccacaatggagcgaccttacacattcaaagactttctcctgaggcctagaagtcataagtctcgcgttaagggttttctgaggctcaaaatggcttacatgccaaagaatgggggacaggacgaggagaactcagaccaacgcgacgatatggagcacggatgggaggtcgttgactccaatgatagtgcctcacagcaccaggaggagctgcccccacctcctctgccaccgggttgggaagaaaaagtggacaacttggggcgtacgtactacgtgaaccataataacagaacaacgcagtggcataggcctagcctcatggatgtaagttctgaaagcgataacaatatccgtcaaattaatcaggaggccgctcataggcgctttcgttcccgcagacatatcagcgaggatcttgagccagagcccagtgagggaggagatgtcccagagccctgggagacaataagcgaggaagtgaatattgcaggagattctctcggtctggcacttcctcctccccctgcttctccaggatcccgcacatctccccaggagcttagtgaggagctctcgaggcgcctccagataactcctgactctaacggtgagcaattctcttccctaattcaaagggaaccgagcagccgtctgaggagttgtagtgtgacagacgctgtagcggagcaggggcacctgccaccaggcgctaaggattctcccgttaggcgagccgtgaaggacacactttccaatcctcagtccccacagccttcaccttacaactcacctaagcctcagcataaagtgacacagtcctttctgcctcctggatgggagatgaggatagcacctaatggccgacctttctttatagatcacaacaccaaaacaactacgtgggaagacccacggctgaagtttcccgtgcacatgcgatccaagacgtccctgaaccctaacgacttgggcccattgccacctggttgggaagagaggattcatctggatggtcgaactttttatatcgatcataactcaaaaatcacacagtgggaagaccctcggctacagaacccagccatcaccgggccagctgttccatattctagggagttcaagcaaaaatacgactattttagaaaaaaactgaaaaagcccgctgacattcccaacaggttcgaaatgaagcttcataggaataacatctttgaagagagctaccggaggataatgtcggttaagagaccagacgtactcaaggccaggctctggatcgagttcgaaagcgaaaaaggcctggattacgggggagtcgctagagaatggttctttctgctgtccaaggagatgtttaacccctactatgggctgttcgagtacagcgcaactgataactacaccttgcaaataaacccaaacagcggcctgtgtaatgaagatcatctttcctattttacgttcatcggtcgagtggcaggtctggcagtcttccatggcaagctgcttgacgggttttttatcagacccttttataagatgatgctgggaaaacaaattaccttaaatgatatggaaagtgtagactcagagtactataattccctgaagtggatcttggaaaacgatcctaccgagcttgacttgatgttctgtatcgatgaagagaacttcggccagacatatcaggtggacttgaagcctaacgggtcggagataatggtcaccaatgagaacaagcgggagtatatagacctggtgatccagtggagattcgtcaaccgggttcagaagcagatgaatgcattcctggagggattcaccgagctgctgcctatcgacctgattaaaatattcgatgagaatgagctggaactgctgatgtgcggactcggggacgtggacgtcaacgactggcgtcaacatagcatatacaagaatggatactgcccaaatcatccggttatacagtggttttggaaggcagtgttgctgatggatgctgaaaagcgaattagattgctacaatttgtgacaggcacctctcgcgtgcccatgaacgggttcgctgagttgtatgggagcaacgggcctcaactgttcactattgagcagtggggatcgcctgaaaagctacctcgagcacacacatgtttcaacaggctagatttgcccccatacgagacgtttgaggatttacgcgaaaagcttctgatggcagtggagaatgctcagggttttgagggtgttgactag

SEQ ID NO: 232245 - DNA, 2508 bp, synthetic construct
  misc_feature 1..2508: note = Description of Artificial Sequence: Synthetic coding sequence
  source 1..2508: mol_type = other DNA
atggagcggccatacacatttaaggacttcttgcttagacctcgttctcacaagagtagagtcaaagggtttctcaggctgaagatggcttatatgcctaagaacggcggacaggacgaagaaaattctgaccagcgcgatgacatggaacatggctgggaggtggtcgactctaacgattccgctagtcaacaccaagaggaactgcctcctccacctttgccaccgggatgggaagaaaaagttgataatctcggcaggacatactatgtgaatcacaataaccggaccacacagtggcacaggccaagtctgatggacgtatccagcgagagcgataacaatatccggcagataaaccaggaagccgcacatagaagattccgctcaaggcggcatataagcgaagatctggagccggagccctctgaaggaggagatgtgccagaaccctgggaaacaattagcgaagaagtcaatattgctggcgacagcctggggttagctctacccccaccaccggctagccccggttcccgcacttcaccgcaggaactcagtgaagaattgtcccgcagactgcagatcacacctgatagcaacggagagcagttctcatctctgatccagagagaaccttcctctcggcttcgcagctgttctgtgaccgacgccgtcgccgagcaaggccatcttccgcctcctagcgtagcctacgtccataccactcctggactcccttcaggctgggaagagcgaaaggacgccaaggggaggacctactatgtgaatcacaacaacaggacaacaacctggacacgacctattatgcagctggccgaggatggggctagtggaagtgcaacaaacagcaataatcatcttatcgagccccagatacggaggccccgaagtctcagttctcccacagttaccctttcagctccactggaaggagccaaagatagccccgttcgccgagccgtcaaggacacactgtccaacccccaaagtcctcagccctccccttacaactctcctaagccccaacataaagtcacccagtcattcctgcccccaggatgggagatgagaatcgcccctaatggcagacccttctttatcgatcacaataccaagacgacaacctgggaagaccctcgactcaagttccccgtccacatgcgctccaaaacctcactgaaccctaatgacttggggcctctaccgccagggtgggaggagagaatccatcttgatggtagaacgttttacatcgaccacaactctaaaatcacccagtgggaagaccctcgcctgcaaaaccctgccatcacaggcccaaaggcagtgccctactctcgggagttcaagcagaagtacgattacttccggaaaaagttgaaaaaaccagccgatatccccaatagatttgagatgaagctgcaccggaacaacatatttgaagagtcttatagacggatcatgagtgtgaaacgacccgacgttctgaaggccagactttggatcgaattcgaatccgaaaaaggattggattacgggggagttgccagagaatggttctttttactgtccaaggagatgttcaacccttactacggtctgtttgagtattcggctaccgacaactacacactgcagattaatccaaattccggactgtgcaacgaagaccatctctcgtattttacgttcatcggacgggttgccggactggcagttttccacggtaaattactcgacggctttttcattcgacctttctataaaatgatgctcggcaaacagataaccctcaacgatatggaatccgtagattccgagtattataactcgctaaaatggattctggaaaatgaccccacggaactggacttgatgttttgcattgatgaggagaatttcggtcagacttaccaggtggacctgaaacccaacggatcagagatcatggtgacgaacgagaacaagagagagtatatagacttagttatacagtggcgattcgttaatagagtgcagaagcagatgaacgccttcctagaaggattcaccgagctcttgcccatcgatctcatcaaaatctttgatgagaacgagttggaactgctcatgtgtggccttggcgacgtcgatgtgaacgattggaggcaacatagcatttataagaatgggtactgtcctaatcacccagtcatccagtggttttggaaagcagtgctccttatggacgccgaaaagcgaatccgcctgctgcaattcgtgaccggtacatcccgggtgcctatgaacgggttcgccgaactgtatggtagcaacggaccacagctcttcactatcgagcaatggggctcacctgaaaagttgccaagggcgcacacatgctttaaccgactggacctccccccttatgagacctttgaggacttaagagagaaactgctgatggcggtggaaaatgcccaaggcttcgagggcgtagactag

SEQ ID NO: 232246 - DNA, 2736 bp, synthetic construct
  misc_feature 1..2736: note = Description of Artificial Sequence: Synthetic coding sequence
  source 1..2736: mol_type = other DNA
atggccactggcctcggtgaaccagtgtacggtttatcagaagacgaaggtgaatctagaatcctccgtgtgaaagtagtgtccgggatcgacctggccaagaaggacatcttcggcgcttccgacccctacgtcaagctgagcctctacgtcgcagacgagaaccgggaattagcgctcgtgcagaccaagacaattaagaaaactctaaatcccaagtggaatgaggagttctatttcagggtgaatccatccaaccacaggctactgttcgaggttttcgacgaaaatcgattgacaagggatgatttcttgggacaagttgatgtcccgctctcgcatctgcccaccgaagatcccacaatggagcgcccttacactttcaaagatttcctgctgcgcccaaggagtcataaatctcgtgttaaaggttttctccgactgaaaatggcctacatgcccaagaacggcggtcaggacgaagagaattcagaccagagagacgacatggagcacggctgggaagtcgtagattctaatgactctgccagtcaacaccaggaggaactgcctccccctcctctgccgcctggttgggaggaaaaggtcgataacctggggagaacatattatgtcaaccataacaaccgcaccacgcagtggcaccgtccatcccttatggatgtcagttccgagagtgataacaatatccgtcagattaaccaggaagctgcgcatcgtcggtttcgatcaagaagacatatcagtgaagatctggagccagagccctcggagggcggtgacgtacctgagccctgggaaactatcagcgaagaggtgaatattgctggtgatagcctaggcctggcactgccccctcctcccgcaagccccggatcccgcacgtctcctcaggagctgagcgaggaactctccagacgcctgcaaatcaccccagattccaacggcgagcaattctctagccttatacaaagggaacccagcagtagactgagaagttgttcggttaccgacgcagtggctgagcagggacatctgcccccacttgccgaggacggagcctcaggctctgcgaccaacagtaacaaccacctcatcgaaccccagatccgcagacctcggagtttgtcaagtcccacagtgaccttatcagcgccactagaaggggcaaaggattcaccagttcgccgtgccgtcaaggacacactctctaacccacagagtccacaaccgtcaccctacaattcccccaaaccacagcacaaggtcacccaatccttcctgccacccggatgggagatgaggattgcgcctaatggtcggccatttttcatcgatcacaataccaagactaccacctgggaggaccccagactaaagtttcctgtgcacatgcgctcgaagacgtcattaaatcctaacgaccttggaccactccctccgggatgggaggagcgcattcatctcgatggacgcacgttctacattgaccataattccaaaattacccagtgggaggacccacggctgcagaaccccgcaattaccggccctgcagtgccatactcccgggaattcaaacagaaatatgactacttcagaaagaaactcaagaaacccgcagacattccaaaccggtttgagatgaaactgcatcgaaataacatttttgaggaaagttaccggaggatcatgtccgttaaacgaccggatgtgctgaaggcccgattgtggatagaatttgaatccgaaaaaggactggactacggcggtgttgcacgtgagtggttctttcttctgtcaaaggagatgtttaatccctactacggactttttgagtactctgccactgacaattataccctgcagattaacccaaacagtgggctttgtaacgaggatcatctgagctacttcacgtttattggccgtgtggctggattggcagtgtttcacgggaagctgcttgacggcttctttatcaggccattctataagatgatgttgggcaagcagattaccctgaacgatatggagtcagtggactccgagtactacaactcacttaagtggatacttgagaacgatccaacagagctcgaccttatgttctgcattgatgaagagaacttcggacagacctaccaggttgatctaaagccgaatggaagtgagatcatggtgacgaatgaaaacaagagggagtatattgacttggtgatccagtggagattcgtgaaccgggttcagaaacagatgaacgccttccttgagggctttacagagctcttgccaatagatcttatcaaaatttttgatgagaacgaattggaacttcttatgtgcgggttgggagacgtggacgtgaatgactggagacagcacagtatctataagaacggttactgcccaaatcaccccgtgattcagtggttttggaaggctgtgctgctgatggatgcagagaagaggatccggctgcttcagttcgtgacaggaacctcgcgagtccctatgaacggctttgccgaactgtatggctccaatgggcctcagctgtttaccattgagcagtggggtagccccgagaagttgcccagagcccatacgtgttttaatcgtctggacctgccaccttatgagaccttcgaagatctgcgagagaaattgctgatggctgtggaaaatgcccagggtttcgagggcgtggattag

SEQ ID NO: 232247 - DNA, 2904 bp, synthetic construct
  misc_feature 1..2904: note = Description of Artificial Sequence: Synthetic coding sequence
  source 1..2904: mol_type = other DNA
atgaggcgccttgccttcgagcaaggagagagtagaattctgcgcgtgaaggtggtttcgggaattgatcttgcaaagaaagatatctttggcgcaagcgacccctacgtgaagctcagtctgtacgtagccgatgagaatcgtgagctggccctggtgcagaccaagactattaaaaagacactcaaccccaagtggaacgaggagttttatttccgggttaaccccagcaaccataggctcctgtttgaggtctttgatgagaataggttgacacgcgatgacttccttggccaagtcgacgtgccactctcacacttacccaccgaagatcctacaatggagagaccatataccttcaaggattttctcttacggccacggtcccacaagtctcgcgtgaaagggtttctcaggctgaagatggcttacatgccaaagaacggcggacaggacgaagaaaactcagatcagcgcgatgacatggagcacggctgggaagtggtggactcaaacgattcagcgagtcagcatcaggaggaactccccccaccccctttgcctcctgggtgggaggagaaggtcgataacctcggcagaacctattacgtgaaccacaacaatagaacaacgcagtggcacagaccgtcattaatggatgtctcttctgaatcagataataacattcgccaaatcaaccaagaggccgctcatcgcagattcaggtcaagacgccacatctccgaggacctagaacccgagcccagcgaaggtggggatgtccctgaaccttgggagactatctccgaagaagtaaatatcgccggtgactctctaggcctggcactgccaccacctccggcatctcccggatcacgtacatcaccccaggaactaagcgaggagctaagccgacgcctacaaattaccccagactctaatggtgaacaattcagtagtttgattcagagggagcctagcagccgacttaggtcttgttcagtgaccgacgccgtagcagaacaggggcacctgccgcctcccagtgccccagcaggtagggcacgctccagcaccgtaacaggcggtgaagagcccaccccgtcagtggcctatgtacacaccacacccggactgccttctggctgggaggagagaaaggacgcaaaaggccgtacatattacgttaatcataacaacagaaccactacctggacacggccaataatgcaactcgccgaagatggagccagcggcagtgccaccaactctaataaccacctcatcgagcctcagatacgacgtccacggagtctgtcttcccctaccgtcacattgagtgccccactggaaggcgctaaagatagtcccgtccgcagagcagtcaaagacaccctgtccaacccacagtcaccccagccttctccatataattctcccaagcctcagcacaaagtaacacagtccttcctgcctccaggatgggaaatgcggatcgctcctaacgggcgacccttttttattgatcacaacacaaagaccactacctgggaagatcctcgcctgaaattccccgtccatatgcgctctaaaacgtctctgaacccaaatgatctagggcctttaccccctgggtgggaggagcgcatccatctggacggacgcacgttttatattgaccacaattcgaagattacgcagtgggaagaccccagactccagaatccagctattactggccctgccgtgccctactcccgggaattcaagcagaagtatgactacttcagaaagaagctaaagaaaccggctgacatacccaatcgcttcgaaatgaagctgcacagaaacaacatcttcgaggagtcataccgtagaattatgtccgtgaagaggccagatgtgttgaaagcccgactttggattgagttcgagtccgagaagggactggactatggtggtgttgcgcgagaatggttcttcctgctgtctaaggaaatgttcaacccctactatggcctgttcgaatacagtgcaaccgacaactataccctccagatcaatcccaacagtggtctgtgcaacgaggaccacctcagctattttacgtttattggaagggttgcgggtttggctgtgttccacgggaaactgctggacggcttctttatccggccattctacaaaatgatgctgggcaagcagatcaccttgaacgacatggagagtgtggacagcgagtattacaattctctgaagtggatcctggagaatgatccaacagaattggatctgatgttttgtatcgatgaagaaaattttgggcagacataccaggtggatctcaagcccaatggcagtgaaatcatggtgacgaatgagaacaagcgggagtatattgatcttgtgatccaatggcgctttgtgaaccgcgtccagaagcagatgaatgcttttctcgaaggattcactgagctccttccgatcgatctcatcaagatcttcgatgagaacgagctagagttgctcatgtgcggactgggcgatgtggatgtgaatgattggcgccagcacagtatatataagaatggatactgtcccaatcacccggtcatccagtggttctggaaagcagtgttgcttatggacgctgagaagagaatcaggctcttacaatttgtaactgggactagccgcgtgcctatgaacggcttcgcggagttatatggcagtaatggtccacagctcttcaccattgaacagtgggggagcccggagaagctccccagggcacatacttgttttaatagactggacctgccgccatatgaaacttttgaagacctccgcgagaagttgctcatggcggttgagaacgcacagggttttgagggcgttgactag

SEQ ID NO: 232248 - DNA, 2868 bp, synthetic construct
  misc_feature 1..2868: note = Description of Artificial Sequence: Synthetic coding sequence
  source 1..2868: mol_type = other DNA
atggccacagggcttggtgagcctgtctacggactatctgaagacgaaggggaatctcgaatcctgcgcgttaaggtggtcagtggcatcgaccttgctaagaaggacatttttggcgcaagcgatccctacgtgaaactgtctttgtatgtcgccgatgagaacagagaattggctctcgtgcagacgaaaacgatcaagaaaacccttaatcccaaatggaacgaagaattctatttccgcgttaacccctctaaccatcgactgctgttcgaagtgtttgatgaaaaccggctcactagggatgatttccttggtcaagtggatgttccactgtcccaccttcccacagaggacccaactatggagaggccctatactttcaaagacttccttctccgcccacggagccacaagagtcgggtgaaaggctttctccggctcaaaatggcctacatgccgaagaacggcggtcaggatgaggaaaatagcgatcagcgcgacgacatggagcacggctgggaagtcgtcgatagtaacgactccgcttcacagcaccaggaagaactgccacccccaccgctgcccccaggctgggaggagaaggtggataacctggggcgtacctactacgtgaatcataataatcgcaccactcagtggcacaggcctagcctgatggacgtgagctccgagtccgataataacataagacagatcaatcaggaagcagcccaccgcagatttaggtctaggagacacatcagtgaggatttggagcccgagccgtctgaaggaggtgatgttcccgaaccttgggaaacgatttcagaggaagtgaacatcgccggagactccctcggcttagctttgcccccacctccggctagtcctggatccagaaccagtccgcaggaactaagcgaggagctgtcccggagattgcaaattactccagattctaacggtgaacagttctcttcacttattcagcgagaaccgtctagtcgactcagatcatgttccgtgactgacgccgttgcagagcagggccatctgccaccccctagtgttgcatatgtgcatacgactcccggattaccgtccgggtgggaggaacggaaagatgccaaaggccgtacctactatgttaatcataataaccggaccacaacatggacacgaccgatcatgcaactggcagaggatggggcttctggatccgctacaaattccaataaccatttaatcgaacctcagatccgcaggccacggtctctcagctcccccactgtgactctcagcgcccctctggaaggggcaaaggacagccctgtgagacgcgcagtgaaggatacactcagcaatccacagtcgccccagccttctccatacaatagccccaagcctcagcataaagtaacccagagtttcctccctccaggatgggagatgaggattgcaccaaacggacgccctttctttatcgaccataacacaaagacaacgacgtgggaggaccccagactgaagtttccagtgcatatgaggagtaagacaagcctcaatccaaatgatttggggccacttcctcctggttgggaagaaaggatacatttggatgggagaacattctacatagaccacaactcaaaaataacccagtgggaagacccgcgtctgcagaacccagccattaccggtcctgccgtcccctatagcagggagttcaaacaaaaatacgattactttagaaagaaactgaagaagcccgcagatatccctaatcgctttgaaatgaagctgcacagaaataatatctttgaggaatcatacagacgcattatgtccgttaaaaggcccgatgtgctcaaagcccgtctttggatcgaattcgagtccgagaaaggtctggattatggaggtgtcgccagagaatggttctttttattatcaaaagaaatgtttaacccttattacggcttgttcgaatacagcgcgaccgataactataccctccagataaatccaaacagtggcctttgcaatgaagaccacctctcttatttcacgtttatagggcgtgtggccggtcttgcagtgtttcatgggaaacttctcgacgggttttttatacgtccattctataagatgatgctggggaaacagattacacttaatgacatggagtcggttgactcagagtactataattccctcaagtggatcctggaaaacgaccctaccgagctggacctcatgttttgcatagacgaagaaaattttgggcagacatatcaggtcgacttaaaacccaatggatcagagattatggttacgaatgaaaataagcgggagtacatcgatctggtgattcagtggcgtttcgtgaatcgcgtacagaaacaaatgaacgcgttcttagaggggtttacagaactacttcctattgacctcatcaagatcttcgacgaaaacgagctagaactcctgatgtgtggactaggcgatgtagacgtgaatgactggcggcagcacagcatatacaaaaacgggtattgccctaaccatccggtcatccaatggttttggaaggccgtgctgctaatggacgcagaaaagagaatcaggctactccagttcgtgacaggtacaagtagagtacctatgaatggttttgctgaactgtatggcagcaatggaccacaactgttcacgatagaacagtggggaagccccgagaaacttcccagggcccacacttgttttaaccggctagatttgcctccgtacgaaacttttgaggatctccgggagaagctactcatggcggtggaaaatgcccagggatttgagggtgtagattag

SEQ ID NO: 232249 - DNA, 2928 bp, synthetic construct
  misc_feature 1..2928: note = Description of Artificial Sequence: Synthetic coding sequence
  source 1..2928: mol_type = other DNA
atggcaacaggtctgggcgagcctgtgtatggcttgtcagaagacgagggtgagtcaaggatcctccgtgtgaaggttgtgtcgggcatcgacttggctaaaaaggatattttcggtgcctctgatccatatgttaaactgtctctgtatgttgcagatgagaacagggagttagccttggtgcagaccaagacgatcaaaaagaccttaaaccctaagtggaacgaggagttttatttcagagtaaatccttctaaccacaggctgctgtttgaagtgtttgatgagaataggctcaccagagacgacttcctgggccaagttgacgtgccgctaagccatctgcccacagaagacccaacgatggagcgcccttacaccttcaaagacttcttgctgcgtccgagaagccataaatctcgtgttaagggattcctacgcctaaaaatggcttacatgccgaagaatgggggacaggacgaagagaacagcgaccaacgggatgacatggagcatggctgggaagtcgtcgacagtaacgatagtgcctcacagcaccaagaggagctgcccccaccgccactccctcccggatgggaggaaaaggttgataatctgggcaggacatattacgtaaaccataataaccggacgactcagtggcatcggccaagtctcatggacgttagtagtgaatctgacaataatattagacagattaaccaagaagccgcacatagaagatttcgctcaagaaggcacatcagtgaggatctggagcccgaaccctctgagggcggagacgttccagagccttgggaaactatcagcgaagaggtgaatatcgcaggcgatagcctgggcctggctctgccccctccacccgctagccccggatcacgcacgtcccctcaggaattaagtgaggaattgtctaggcggttacagataactcccgattcaaacggcgaacagttttcgagtctaatccagcgggagccctcatctagattgcggtcatgttccgtcacggacgcagttgccgaacaagggcacctacccccaccttctgcccctgctggccgagcgcgttcaagcactgtgaccggtggggaggaacccactccctcagtggcctacgtgcacactacaccgggtctgccctcaggctgggaagaaagaaaagatgcaaagggaagaacctactacgttaaccacaataatcgcacaacgacttggacacgtcctattatgcagttggccgaggatggtgccagcggaagcgccactaattctaataaccacttgattgaaccccagatcaggagacccagatctttaagtagtccaactgtaaccctgagcgcgcctctcgaaggagctaaggattcgcccgtcaggagggccgtgaaggatactctgtccaacccccagagcccccaaccctccccctataattccccaaagccacaacataaagtcacccagtcattcttgccccctggatgggagatgcggatagcaccgaatggcagacccttcttcattgaccacaatactaagactaccacgtgggaagatccacggctgaaattcccagttcacatgagatccaagacttccttgaaccccaatgacctgggacccctcccccctggatgggaggagcgtatccacctggacggcaggacgttctacatagatcacaacagcaaaatcacgcagtgggaggaccctaggctgcagaatccagccatcacagggcctgcagtgccctattctagagaatttaagcagaagtatgactattttcggaagaaactgaagaagccggctgacatccccaatcggttcgaaatgaagttgcacaggaataatatcttcgaagagtcttatcggagaatcatgtccgtgaaaagaccagatgttcttaaagcccgtctgtggatcgaatttgagtccgaaaagggactcgactatggaggagtcgccagggagtggtttttcctccttagcaaggagatgtttaacccatactatggcctctttgagtactctgctacagataattacaccttgcaaattaatcctaatagcggcctgtgcaatgaagatcacctcagttacttcacctttattggcagagtggcagggctggcggtcttccacggaaagctgctggatggattttttattaggccattttacaaaatgatgcttggaaagcagatcacactcaacgatatggagtcggtggattccgagtactataattctctgaagtggatcctggagaacgaccccacagagctggacctgatgttttgtattgatgaagaaaattttggtcagacatatcaggtagatctgaaacccaacgggagcgagataatggtgacaaacgagaataagagggagtacatcgatctggtgatacagtggagatttgtcaatcgggtgcaaaagcaaatgaatgctttcttggaagggttcaccgaattgcttcctattgatcttattaaaattttcgacgaaaatgagcttgagctgctcatgtgcggccttggtgatgttgatgtgaacgattggaggcagcactccatttataagaacgggtattgtccaaatcaccctgtgatccagtggttttggaaagcagtccttcttatggacgctgagaaacgcattagattgttacagtttgtcactgggactagtagagtgcctatgaacgggtttgctgagctgtacggttccaacggaccccagttattcactatcgaacagtggggcagccccgagaagctcccaagagctcatacatgctttaaccgcttggatctgccaccttacgagacgtttgaggatctccgagagaaactactgatggctgtcgaaaacgcccagggcttcgaaggggtggattag

SEQ ID NO: 232250 - DNA, 2565 bp, synthetic construct
  misc_feature 1..2565: note = Description of Artificial Sequence: Synthetic coding sequence
  source 1..2565: mol_type = other DNA
atggaacgaccttacacatttaaggatttcctgctgcggcctcgcagtcacaagtctcgagttaagggattcctccggttgaagatggcgtacatgccaaagaatggcggacaggacgaggaaaacagtgatcagcgagatgacatggagcatggctgggaagtcgtcgatagcaacgactcagcttcacagcatcaggaggaactgccacctcctcctctgccccctgggtgggaagagaaagttgataacctggggaggacctattacgtaaaccataataatcgcaccactcaatggcacagaccttccctgatggatgtgagcagcgaatcagataacaacattcgccagatcaaccaggaggccgctcaccggcgttttcgaagccggcgacacatttctgaagacctcgaacctgaaccctccgaagggggagatgtacccgagccctgggagactatctctgaggaggtgaacattgccggagattcattggggctggctctgcccccacccccagcctccccagggagtcgaaccagtcctcaggagctctctgaagagctgtctcgcaggcttcaaatcacgcctgacagcaatggagaacagttctccagtcttatccagagagagcccagcagccgactccggagttgtagtgtaactgacgctgtcgctgagcaaggacatctgccacctcccagcgctcccgctggccgagctaggagtagcacagttaccgggggagaggaaccaacgccatcggtcgcatatgttcacacgacgcccggtctgcctagcggttgggaggagaggaaagacgctaagggaaggacatattacgtaaaccacaataataggactacaacctggaccagacctatcatgcaacttgccgaagatggggcttctggctccgctaccaactctaataaccacctcattgagccccaaatcagaaggcctagaagtttatcttccccaaccgtgacgctgagtgcacccctcgagggggcaaaagattctccagtccgacgggctgtgaaggatacgctgagtaacccacagtccccccagccctctccttataactcacccaagccacaacacaaggttacccaatcgtttctgccacccggatgggaaatgcgtattgcccctaatggaagaccatttttcatcgatcataatactaagaccaccacatgggaagaccctagactgaagttccccgtgcatatgcgcagtaagacttcactgaaccccaacgacctgggacctcttccaccgggttgggaagagcggatccaccttgatggccgaaccttctatatagaccacaacagcaagataacccaatgggaggatcccagactccaaaaccctgctatcaccggcccagctgttccttacagtagggagttcaaacaaaaatacgactatttccggaaaaagctcaagaaaccagccgacatcccgaataggttcgaaatgaaattacacagaaacaatatctttgaggaatcatatagacggattatgtcggtgaagaggcccgacgtgctgaaggcccgtctctggatcgagtttgagtctgaaaagggccttgattacgggggagtggcacgggagtggtttttcctcttgtctaaggaaatgtttaatccttattacggtctatttgagtatagcgctacagataattacactctgcaaataaatccaaactcagggctttgcaatgaagatcatctgtcttacttcacattcatcgggagagttgctggcctagcagtcttccacggtaaactgcttgacggattcttcataagaccattctacaaaatgatgttgggtaaacaaataactctaaatgacatggaatccgtagactccgaatactacaattccctcaagtggatactcgagaacgatccaactgaactcgacctcatgttttgcatagacgaagagaactttggacagacgtatcaggtagacctcaagcctaacggttccgaaattatggtgacaaatgagaacaagagagagtatatcgacctggtgattcagtggcgcttcgtaaaccgcgttcagaagcagatgaacgccttccttgagggcttcaccgagttgctacccatagatttaattaaaatcttcgatgaaaacgaactggaactcctaatgtgtggtctgggcgacgtggatgtcaacgattggcgccagcactccatatacaagaatgggtactgtcccaatcaccctgtgatccagtggttctggaaagccgtcttgcttatggacgctgagaagcgcattcgtttgctgcaattcgtaactggtacctctagagtgcccatgaacgggtttgcagaactctatgggtccaatggccctcagctgtttacgatcgaacagtggggaagccccgaaaagctgccacgagcgcatacctgcttcaaccggctcgatttaccaccttacgagacatttgaggatctgcgagaaaaactcctgatggccgtggagaatgcacaaggattcgagggggttgattag

SEQ ID NO: 232251 - DNA, 2505 bp, synthetic construct
  misc_feature 1..2505: note = Description of Artificial Sequence: Synthetic coding sequence
  source 1..2505: mol_type = other DNA
atggaacgaccctacacctttaaagacttcctacttcggccaagaagtcataagtcccgcgtaaaaggcttcctgcgtttaaagatggcctacatgcctaagaatgggggacaagacgaagaaaacagtgatcagagggacgacatggaacacggatgggaggtggtcgattcaaacgactccgcaagccagcatcaagaggagctgccacctcctcctctgcctcctggctgggaagagaaagttgataatctcgggagaacttattacgtgaaccacaacaacagaaccactcaatggcacaggcccagcctgatggacgtgtcttctgagtccgacaataacatacgtcagatcaaccaggaggcagctcaccgtcgtttcagaagccgcagacacatttctgaagatctagaacccgagccttcagagggtggggacgtccccgaaccctgggaaacaatcagcgaagaggtgaatatcgctggcgatagccttggcctggctctccctccaccacccgcatctcccggatcccgaacgagccctcaggaactgtctgaggaattatcccgccgtctgcagatcacacccgatagtaatggggaacaattcagtagcctgattcagcgtgagccatcaagccggcttagatcttgttcagtgactgatgctgtcgctgaacagggccacctaccacccccatcagtggcctatgtccatactacccctggactcccctccggctgggaagaaaggaaagatgcaaaggggagaacctactatgtcaaccacaataaccgcacaactacttggactagaccaatcatgcagctagccgaggacggggcttccgggagcgccacaaactcaaataatcaccttatcgagccacagatcagaagacctcgaagcctttctagcccaacagtcaccttgagtgctcctctggaaggtgccaaggattcccctgtaagacgagcagtcaaggacacactgtctaaccctcagtcaccgcagccctcaccctacaactcacccaagccacagcacaaggttacccagagtttcctccctccgggttgggaaatgcggattgcccctaacggacgacctttttttattgatcataataccaaaaccaccacttgggaagacccacggctgaaattcccagtgcacatgagatctaaaacgtcactgaacccaaacgatctcggccctctcccccctggttgggaggagcggatacatctagatggaagaacgttctacatcgatcacaatagcaagatcactcagtgggaggatcctcgactgcagaatcccgctataacaggacccgctgttccctactctcgagaattcaaacaaaagtacgattattttagaaagaaactcaagaaaccagccgacatacccaacaggttcgagatgaagctacaccgaaataatatttttgaggagtcttacagaaggataatgtcagtgaaaagaccagatgttctgaaggcccgtctctggattgaattcgaatccgagaagggccttgattatggaggcgttgcacgggagtggtttttcctgctctctaaagaaatgttcaatccttattacggattgttcgagtatagcgcaaccgataactataccttacagataaatcccaactcggggttgtgcaatgaagaccatcttagctacttcaccttcattggcagggttgctggtctggcagtgttccacggtaaacttctggacgggttttttatccgcccattctataaaatgatgctcggtaaacaaattacccttaatgatatggaaagtgtggactcagaatattataattccttaaaatggattcttgagaacgaccccactgagctcgatctaatgttctgcatcgacgaagagaattttggccagacttaccaggttgacctcaagccaaacgggtccgaaatcatggtcacaaatgagaacaaacgtgaatacattgatctggtgatccaatggcggtttgtaaacagggtacagaaacagatgaacgcgttcctagaaggttttactgagctgctgcctatcgacttgatcaaaatattcgatgaaaacgagctagaactgctcatgtgtggcctaggcgacgttgacgtgaatgactggagacagcattccatttacaagaacggttattgtccaaatcaccccgtgattcagtggttctggaaagcagtgctgctgatggacgctgagaaaagaatcagactgctgcagttcgtcaccggaacatcccgagtcccaatgaatggctttgcggaactatatggatccaacgggccacagctctttacaattgaacagtggggctcccccgagaagctgcccagggcccatacctgctttaacagactcgacctacctccgtacgaaacattcgaggacctgcgcgagaaactgctgatggctgtggagaacgcccagggtttcgaaggcgttgactag

SEQ ID NO: 232252 - DNA, 2505 bp, synthetic construct
  misc_feature 1..2505: note = Description of Artificial Sequence: Synthetic coding sequence
  source 1..2505: mol_type = other DNA
atggaacgcccttatacttttaaggatttcttgttgcgccctcgttcccataagtcgcgcgtgaaggggttcctgcgcctcaagatggcttatatgcctaagaatgggggtcaggatgaggagaactctgaccagagagatgatatggagcatggatgggaagtcgtggattcaaacgactccgcatctcagcaccaggaggagctgccacctcccccacttcctcccggttgggaggagaaggtcgataatttaggcaggacatattacgtgaaccataataaccgaactactcagtggcaccgcccttccctgatggatgtgagttccgagagtgacaacaacattagacagattaaccaggaggccgcacacaggagattccgctctagaaggcacattagcgaagaccttgaaccagaaccaagcgaaggcggagatgtgcccgagccttgggagacaatctcagaggaggtgaacatagccggagattccctgggcctagcactcccacccccaccggcatcaccaggatcccgcacatctcctcaggaactgtcagaagaactttctagaagacttcagatcactccggactctaacggcgagcagttctcttccttgatacagcgggagcctagctcccgcttgcggtcatgttctgtcacagatgcagtggccgagcaggggcacctcccgcctccatctgtggcctatgtgcacaccaccccaggactcccatcaggctgggaggagagaaaagacgctaaggggcgtacatactacgtgaatcacaacaacagaacgaccacatggacgcggccaatcatgcagcttgccgaagatggcgcttccgggtctgcaacaaattccaacaaccatttaatcgaaccacaaattaggcggcctcgaagcctctcatcccccaccgtgaccctgagcgcacctttggaaggggcaaaggactctcccgttaggagagctgtgaaagatacactgtcaaatccgcagtctccacagccttcaccatataacagccccaaacctcagcacaaggtcactcagagcttcctgccccctgggtgggaaatgagaatcgcacccaatggcagaccgttctttattgaccacaacacaaagacaacaacatgggaagatcccaggctgaagttccccgtgcacatgcggagcaagacctctttgaaccctaacgatcttggccctctccctcctgggtgggaagagcgtatccatcttgacgggagaaccttctacattgaccacaattctaaaatcactcaatgggaagatccgagactacagaatccagcgatcaccggccctgccgtgccatacagccgcgaattcaaacagaagtacgactattttagaaaaaagctgaaaaagccggcagacatacctaaccggtttgagatgaagcttcacaggaataacatattcgaagaatcataccgcagaattatgtcagtgaaacgccctgacgtccttaaagcacggctgtggatcgagtttgaatcagagaagggtctggattacggaggcgtggccagggaatggttcttccttctgagcaaggaaatgttcaatccttattacggcttgttcgaatattccgctactgacaactacacattgcagatcaatcctaattctggcttatgcaacgaggaccacctctcctacttcactttcattggccgtgtagctggtctcgccgtttttcacggcaagttactggatgggttttttatccgccctttctacaaaatgatgcttggaaagcagataacacttaatgacatggaatctgtcgattcagaatactataattcactgaaatggattctggagaatgacccaacagaacttgatctgatgttctgtattgatgaagaaaactttggccagacctaccaggttgatcttaagcctaatggttctgagatcatggtcactaatgagaataagcgcgagtacattgatctcgtgattcagtggaggtttgtgaatagggttcagaagcagatgaacgctttcctcgaggggttcactgagctactgccaattgacctcattaaaatttttgacgaaaacgagctggagctcctaatgtgtggcctgggagatgtcgacgtgaacgattggcgccaacacagcatatacaagaacgggtactgcccaaaccacccggtgatccaatggttctggaaagcagtcctgttgatggacgctgagaagaggataagattgctgcagtttgttaccggaactagcagggtgccaatgaatggatttgctgaattatacggctctaacggaccccagctatttactattgaacagtggggaagtccagagaaactgcctcgagcccatacttgcttcaaccggctggatcttcctccgtacgaaactttcgaagatctgcgggaaaaactgctaatggcagtggaaaatgcacagggcttcgagggcgtagattag

SEQ ID NO: 232253 - DNA, 2565 bp, synthetic construct
  misc_feature 1..2565: note = Description of Artificial Sequence: Synthetic coding sequence
  source 1..2565: mol_type = other DNA
atggaacggccatacacctttaaggactttctgttacggcctcggtcccacaaaagcagggtgaaagggttcctgcgtctcaaaatggcctacatgcccaagaacggtggacaagacgaagaaaactcagatcaacgggacgatatggagcatggctgggaggtggtcgactctaacgactcggctagtcagcaccaggaagagctgcccccaccacccttaccacccggttgggaggagaaggttgacaacctggggaggacctactatgtgaatcacaacaacaggacaacacagtggcacagaccgagcctgatggacgtgagctccgagagtgataataacattcgacaaatcaaccaagaggcggcacataggcggttcaggagcagaagacacattagcgaagatctggagccagaaccaagcgagggcggagatgtgcctgagccctgggagacgataagcgaggaagtaaatattgccggagacagccttggcctggctctcccacctccccctgcaagccccggaagccgcacatccccccaggaactttccgaagaactgtctagacggcttcagattactcctgacagcaatggtgagcagttcagttctcttattcagagagagcctagttccaggctgcgctcctgttcggtgaccgatgcagtggcggaacaggggcacctgccgcctccctcagcgccagcaggtcgtgcaaggtcctccaccgttactggtggggaggaaccgacaccatcagtggcgtacgttcacacgacaccaggcctgccctcaggctgggaggaaaggaaggatgctaagggtcgtacgtactacgtgaaccataacaaccggacgaccacctggactcgaccaatcatgcagttagccgaagatggagcatccggttccgctaccaacagcaataaccatctgatcgagcctcagataagacgcccaagatctctgtctagtccaactgtcacgctcagcgccccactggagggagccaaggattctccggtgcgccgagcggtgaaagacactctttctaacccacaatctccccagcctagtccctacaactcccctaagccccagcataaagttacacagagctttctgccgccagggtgggaaatgcgcattgccccaaatggcagaccattttttatcgaccataatacgaaaacaacaacttgggaagatcctaggttaaagtttcctgtacatatgagatcaaaaaccagcctcaatcccaatgacttaggcccacttccgcctgggtgggaagagcgtatacacctggacggtcgaactttttatatcgaccataacagcaaaataacccagtgggaggaccccagactccaaaaccctgccataacggggccagccgttccttattctagagagttcaaacaaaagtacgactacttcagaaaaaagctcaagaaaccagcagacattcccaatcgttttgagatgaagctgcaccgcaacaacattttcgaagagagttatcgtcgtatcatgagcgtaaagcggcctgatgtcctgaaggcacgactgtggatcgagttcgaatcggaaaagggattggactatggcggtgtcgcaagagaatggttcttcctgctcagcaaagagatgttcaatccatattatggcctgtttgagtactcagcaacggacaattacactctgcagatcaatccgaactcggggctttgcaacgaggaccacctttcctattttacgtttatcggtagggttgctggactcgcagtgttccacggtaaactcctggatggcttttttatcagacccttttataagatgatgctgggtaagcaaataacacttaatgatatggaaagcgtcgactctgaatattataattctctgaaatggatcctggaaaatgaccccaccgaattggacctgatgttttgtattgatgaggagaatttcggtcagacatatcaggtggatctcaaaccgaatgggtcggaaatcatggtgactaacgaaaacaaaagagaatatatcgacctggtgattcagtggcggttcgtcaaccgagtgcagaaacagatgaacgcctttttggaaggttttacagaactgctgccaattgacctgatcaaaatttttgatgagaatgagttggagctgctaatgtgcggactgggggacgtggacgtgaacgactggcgacaacatagtatctacaagaacggttattgccctaaccaccccgtcatacagtggttctggaaggccgtgctgctgatggacgccgaaaagcgcatccgcttgctccagttcgtcaccggtacctctagagtgcccatgaacggctttgcagaattgtatggaagcaatggaccacaactgttcaccattgagcaatggggcagcccagaaaaactgccgagggctcacacatgctttaacaggctcgatctcccgccttacgagacattcgaagacctgagggagaagctcctgatggccgtggaaaatgcccagggctttgagggggtggattag

SEQ ID NO: 232254 - DNA, 525 bp, synthetic construct
  misc_feature 1..525: note = Description of Artificial Sequence: Synthetic coding sequence
  source 1..525: mol_type = other DNA
atgaagtataagaacttgatggccagggccctgtacgacaatgtgccagagtgcgctgaagaactagctttccggaagggtgatatcttaactgttatcgaacaaaacactggcggtctggaaggatggtggctgtgctctctgcacggcaggcaggggattgtcccaggaaaccgggttaaattattaatcggaccaatgcaagaaaccgcctcgagtcatgagcagcctgcttctgggttaatgcagcaaacgttcgggcagcagaagctctatcaggtgcccaatcctcaggcagcaccaagggatacaatataccaggttcctccctcttatcagaaccagggaatttaccaggtacctactggtcatggcacccaggagcaggaagtgtaccaggttccgccatcagttcagcgatctataggcggaacaagcgggccacatgtggggaagaaagttttccaacgcgatggacaggtcagttattttttggtgagagccagcaaacagacatccttgtag

SEQ ID NO: 232255 - DNA, 2505 bp, synthetic construct
  misc_feature 1..2505: note = Description of Artificial Sequence: Synthetic coding sequence
  source 1..2505: mol_type = other DNA
atgaagtacaagaacctgatggccagggccctgtatgataacgtgcccgagtgtgccgaggaactggcattcaggaagggcgacattcttacggtcatcgagcagaatacaggaggcctggaaggctggtggctttgcagtctacacggccgacagggcatcgttcccggtaaccgggtgaaactattaatcggcccaatgcaagagaccgcatcgtcacacgagcagcccgctagcggattaatgcagcagactttcggccagcaaaaactgtaccaggtgcctaatccacaagccgcaccgagagacactatctatcaggttccaccttcttaccagaatcaggggatctatcaggttcccactggtcacggaactcaagaacaggaagtatatcaggtccctcccagcgtgcagcggtcaatagggggtaccagtggaccccacgtgggaaagaaggtgatcacacctgtgaggactggccatggctacgtgtacgaatacccttctagataccaaaaggacgtttacgatattcccccttctcacaccacccagggcgtctacgacattcccccttcaagcgcaaaaggtcctgtgttttccgtgcccgttggtgagattaagccgcaaggtgtttatgatattcctcccactaaaggggtttatgccatacctccttctgcatgtcgggatgaggctggtctgcgagagaaggactatgactttccaccccctatgcgacaggccggtaggcccgatctacggcctgagggagtgtatgacatcccacctacctgtaccaaaccagctgggaaggacctccacgtcaaatataactgcgacattcctggagcagctgagcccgtagcccgacggcatcagagtttatctcccaatcatcccccaccgcagcttgggcaaagtgtgggaagtcagaacgatgcatacgacgtgccgcgaggcgtgcagtttcttgaacctccagctgagacatctgagaaggccaacccacaggagagagatggtgtgtacgacgtccctctgcacaatcctcctgacgcaaagggctcccgcgacctggtggacggcatcaatagactgtcattctcttcgaccggatcgacccgcagtaatatgtctacctcttctacttccagcaaggaatcttccctgtccgctagcccagcccaagacaaacgcttatttctcgatcccgacacagccatagagcgtctccagcgactccaacaggcccttgagatgggcgtttcatccctgatggctttagtgactaccgactggaggtgttacggatatatggaaaggcatataaatgaaatccgtaccgcagttgacaaggtggagctgttccttaaagaatacttgcactttgtaaaaggggcagtcgcgaatgctgcttgccttccagaacttattctgcacaacaaaatgaaacgggaacttcagcgcgtggaagacagccaccagatactgtcccagacgtctcacgatctgaatgagtgctcctggtcccttaatatcctagcaattaataagccacagaataagtgtgacgacctggaccgatttgtcatggtggcaaaaacagtacctgacgatgcgaagcaactcaccactactattaacaccaatgccgaagctttgttcagaccaggccctggcagcctgcacttgaagaatggaccggaatcgatcatgaatagtaccgaatatcctcacggaggtagccaggggcagctcctccaccctggcgatcataaggctcaagcacataataaggccctacccccaggcctgtctaaggagcaggcccctgactgttcatctagcgacgggagcgaacgtagctggatggacgactatgattacgtccaccttcaggggaaggaggaattcgagagacagcagaaggagctgctcgagaaggagaatataatgaagcagaataaaatgcagctggagcaccatcagttaagtcagtttcaactacttgagcaagagatcaccaaacccgtagaaaacgatataagcaagtggaagccaagtcaatccttgccaacaaccaacagtggcgtgtccgcccaagatcggcagctgctgtgcttttactatgaccagtgcgagactcacttcataagcctgttgaatgctatcgacgcactattctcctgtgtcagctccgcccagcccccacgcatcttcgttgctcactctaagtttgttatactttcagcgcacaaactggtttttataggagacacgctaacacgtcaggtcacagcgcaagatatcaggaataaagtgatgaactcctcaaaccagctgtgcgagcaactcaaaactattgtaatggcaactaagatggccgcacttcattaccctagtacaacagccctgcaggagatggtacatcaggttaccgacttgagtcgcaacgcccagttgttcaagcgcagcctattagaaatggccactttttag

SEQ ID NO: 232256 - DNA, 99 bp, synthetic construct
  misc_feature 1..99: note = Description of Artificial Sequence: Synthetic coding sequence
  source 1..99: mol_type = other DNA
atgtggaccagaaacttgatggcgagggcactctacgataatgtgccagaatgtgcagaggagctcgcctttaggaagggtgacattcttacagtctag

SEQ ID NO: 232257 - DNA, 2505 bp, synthetic construct
  misc_feature 1..2505: note = Description of Artificial Sequence: Synthetic coding sequence
  source 1..2505: mol_type = other DNA
atgtggacccgcaatttgatggcacgagccttatatgacaatgttcccgagtgcgctgaagagcttgcttttcgcaagggtgacattctgaccgtgatagagcagaatactggcggtctggagggctggtggctctgctcactccacggcagacagggaatagtgcctggtaaccgtgtgaaactccttatcggaccaatgcaggaaaccgcttcttcccacgagcagccggcttcagggctgatgcagcagacgtttggacagcaaaagctctaccaggtgcctaacccccaggccgcaccccgtgatacaatttaccaggtgccacccagttatcaaaaccagggaatctatcaggtacctaccggacacggcacccaggagcaagaggtgtatcaggtgcccccatcagttcaaagatctataggaggaactagcgggcctcatgtgggtaagaaagtgattacccctgtgagaactggccatggctacgtctatgaatatcccagccgctatcaaaaagatgtgtacgatattcccccatcgcatactactcagggggtctatgatatacccccaagtagcgctaaagggcctgtgttcagcgtgccggtgggagaaatcaaaccgcagggggtgtacgatatccctccaaccaagggcgtgtatgcgattcccccttcagcctgtcgcgacgaagcgggtcttcgtgagaaagattatgattttcccccacccatgcggcaagcaggtcgccctgatctgaggcccgagggtgtttacgacataccaccgacttgcactaaaccagccggtaaggatctccacgtgaaatacaactgtgatattcctggagccgcagaacccgtcgcacggagacaccaatcactatcaccaaaccatccccctccacagctgggccagtcagtgggaagccagaatgatgcatacgacgtcccccgtggagtccagtttcttgagccccctgctgagacctcagagaaagcaaatccacaagagagggatggagtttacgatgtgccactgcataatcccccagatgccaaaggctccagagacctggtggatgggatcaatagattgagcttcagttccaccgggtcaactcgatcaaacatgagtacctcttccacatctagcaaagagtcctctctgagcgcaagcccagcccaggataagcggctgttcctggatccagatacagccattgagaggctgcagcggctacagcaggccctagaaatgggcgtgagctctctgatggcgctagtgaccacggattggcgctgctacggttatatggaacgtcacatcaacgagattcgtaccgctgtcgacaaggtggagttattcctgaaggagtacttacatttcgttaagggagccgttgctaatgccgcttgccttccagaactgatcctacacaataagatgaaaagggagctgcagcgggtggaagatagtcaccagatattaagtcagacttcccatgatctaaatgaatgcagctggtcattaaatatccttgcaataaacaagccgcagaacaagtgcgatgatttagacaggttcgtgatggtggccaaaactgtgccagatgatgcaaaacagctcaccaccacaatcaatacaaacgccgaagccttgtttaggcccggaccgggaagcctgcacctcaagaacggcccagaatcgatcatgaacagcacagagtatccccatggtggatctcagggccagttgcttcaccccggtgatcataaggcgcaggctcataataaagcactccccccaggcttgagcaaggagcaggcccctgattgtagctcctccgacggtagcgaacggtcatggatggacgattacgactacgtccatctccagggcaaggaagaatttgagagacagcagaaggaacttctggagaaggaaaacatcatgaaacagaacaagatgcagctagagcaccatcagctgagtcagtttcagttactagaacaggaaatcaccaagcccgtggagaatgatatctccaaatggaaaccatcacaaagtctgccaacgactaactccggtgtgagtgcacaggatcgccagctcctatgtttctactacgatcagtgcgagactcacttcattagcctcctgaacgctattgatgccctgtttagctgcgtaagtagtgcacagcctcctcgcattttcgtggcccatagcaagtttgtaatcctatctgcacacaaattagtattcatcggagacaccttgacacgccaggtgacagctcaggacatccgcaacaaggtgatgaacagcagtaatcagctatgtgagcagttaaagactattgtgatggcaactaagatggccgcactgcactacccctctactacagccctgcaggaaatggtacaccaggttacagatctctcgcggaacgctcaactctttaaacgtagtttgttagaaatggccacattctag

SEQ ID NO: 232258 - DNA, 1212 bp, synthetic construct
  misc_feature 1..1212: note = Description of Artificial Sequence: Synthetic coding sequence
  source 1..1212: mol_type = other DNA
atgttaagacccgaggctggcttagtaggtcttcatggtcctgcgcaggagaattcagcacttccaggcagaagagattcagcatcagagctcagggccctttctggtctcgaggtcgacccgggtgaggggtggggcagggtggttctcatcagcccaaggacagtcagattcagagtgctctccccaggagtgagggaagagggacatgtccagaacaacggccagaaccaggccagaccggcaagaggcgttaccggagctggaggttggggaagtgcggcagtgtgcaggggacgcgctcttcgcggaagggaacctgccctaccaagtgccagtttccccgatgtggcagcctgtcctgggtcccttgactgcgcactgaagaggcgggctcgctgtccccctggagcccacgcctgtggtccatgtctgcagcctttccaggaggaccagcaaggcttatgcgtgcccagaatgagacgacctccaggaggcggacgccctcagccacgtctagaggacgagatcgattttctagcccaggagcttgctcgaaaagagagcggccacagtacaccccctctgcctaaagacaggcaacgcttacccgagccagctactttgggcttctcggccaggggccaaggattggaactcggcctgccatctacgcccggtacaccaacgccaacaccccacacaagccttgggtcccctgtgtcctctgaccccgttcacatgagccctctggagcccaggggagggcagggggatggattggcgttggtgctgattttagccttctgtgtggctggagcggctgctctgtccgtggcatctctgtgctggtgcagattgcaacgggagatccgtctgacccagaaggcagactacgcaactgctaaagctccgggtagccctgccgcacccaggataagccctggcgaccagcgtttggcccagtcagctgaaatgtaccattaccagcaccagaggcagcagatgctgtgtttggagagacataaagagcctccaaaggaattagatacggcatccagcgatgaagaaaatgaagacggagacttcaccgtctacgagtgccctgggctggcccctaccggggaaatggaagtgcgaaaccccctgttcgatcacgcagctctgtcagctcccttaccagctccgtcttctccacctgccctgccttag

SEQ ID NO: 232259 - DNA, 978 bp, synthetic construct
  misc_feature 1..978: note = Description of Artificial Sequence: Synthetic coding sequence
  source 1..978: mol_type = other DNA
atggccactcccctccccccaccctcaccacgccatctgcgtcttctccgcttgctgcttagcggccttgtgctgggtgcagccctgagaggggcagctgccggacatcctgatgtggcagcctgccccggatctcttgactgtgccctaaagcgaagagcgagatgtcccccaggggcacacgcctgcggtccgtgtttacagccttttcaagaagaccagcaagggctgtgcgtaccacggatgaggcgccctcctggcggtggcaggccgcagccgaggctggaggacgagattgatttcctggcacaggagctggcccgtaaagaatctggccattcaaccccacctctcccgaaggacaggcagagattacccgaacctgccacgctgggcttctcggctaggggtcagggtctcgaactgggtctgcctagcactcctggaacacctacaccgactccgcacacctcccttggatcccccgtttcatccgatcccgtgcatatgtcaccactagaacccagaggcggacagggcgacggcctcgccttggtgctgatcctcgcgttttgcgtggccggagccgcagctctctccgtggccagcctctgttggtgcagactgcaacgtgaaatccgactgacccagaaagccgattatgccactgccaaggctcccggttccccagctgctcctagaattagccccggagaccaacgacttgcgcagtccgcagaaatgtaccattaccagcatcagcgtcagcagatgctgtgtttggagaggcacaaggagccccctaaagagcttgatacggcttcaagcgacgaagagaatgaagacggggatttcaccgtgtacgagtgtccaggactcgcccctactggtgaaatggaagttcggaatcctctctttgatcatgctgctctttccgcacccctgcctgcccctagttctcctccagcactgccttag

SEQ ID NO: 232260 - DNA, 297 bp, synthetic construct
  misc_feature 1..297: note = Description of Artificial Sequence: Synthetic coding sequence
  source 1..297: mol_type = other DNA
atgtccgtccgcgagttaaaccgccaattgcgtggctgcggacgcgacgaagccctaaggctcaagcagcgaaggcgcactctgaaaaataggggatacgcacaggcttgccgctcaaaacgccttcagcagcgacgcggattagaagctgaaagggcgaggttagccgctcagctggatgctctgcgcgcagaggtcgctcgcctcgccagggagcgggatctgtataaggcccgttgcgacaggctgacgtcctctgggccaggctctggcgatcctagccacttgtttctatag

SEQ ID NO: 232261 - DNA, 714 bp, synthetic construct
  misc_feature 1..714: note = Description of Artificial Sequence: Synthetic coding sequence
  source 1..714: mol_type = other DNA
atggccttgcccccatcacctctagctatggaatatgtgaatgatttcgacttgatgaagttcgaggtgaagagggagccgtccgagggaagacctggcccacccactgcctcacttggctccaccccctatagttcagttcctcctagccctacttttagcgaaccgggtatggtgggtgccacagaggggacgagacctgggcttgaggagctgtactggctggctactctccagcagcagctcggtgcgggagaggccctcggactgtctcccgaagaagcaatggagctgcttcagggtcagggccctgtccccgtcgatgggcctcacggctactacccgggaagtccggaagaaacaggcgcacaacacgtgcagctcgctgagaggttttcagatgccgcactcgtctctatgagtgtcagagaactaaataggcaactgagagggtgcgggagagacgaagcactgagacttaaacagagaaggagaaccttaaagaaccgtggatatgcccaggcctgccggtccaaacgactccagcagcgacgtggactcgaggcagaacgtgctcggctggcagcacagctagacgcgctccgagctgaagtggccaggctagcccgtgagcgggacctgtataaggctcgttgcgaccggctgacgagcagcggccctggctctggtgatccatcccacctgtttttgtag

SEQ ID NO: 232262 - DNA, 714 bp, synthetic construct
  misc_feature 1..714: note = Description of Artificial Sequence: Synthetic coding sequence
  source 1..714: mol_type = other DNA
atggccctacctccttcacccctggccatggaatatgtgaacgacttcgatttgatgaaattcgaggtaaagcgagaaccttcagagggcaggcctggtcctccaaccgccagcctgggctcaaccccatattctagtgtaccgccttctcccacgttcagcgagcccggaatggttggagctaccgagggaacgcggccaggtttggaggaattgtactggttagcgacactgcaacagcagttgggagccggagaagctctcgggcttagtccggaagaggccatggaactcctgcagggccaaggcccagtgccagtggacggccctcacggatattaccccggaagcccggaggagaccggcgctcagcacgtccagctcgcggagcggttttcggatgctgccttggtaagcatgagcgtgcgtgagctcaaccggcagttaagagggtgtggtcgcgatgaggcactgaggctgaaacagcgacggagaacattaaagaaccgcggatacgcccaagcctgcaggagcaaacggctgcagcaacgcagggggctggaggctgagcgtgctcgcctggccgctcagctagatgcgctgagggcggaggtcgctagattagctcgcgagcgtgacctctacaaggccaggtgtgatagactcacaagcagtgggccaggctctggggaccctagtcatctgttcctctag

SEQ ID NO: 232263 - DNA, 198 bp, synthetic construct
  misc_feature 1..198: note = Description of Artificial Sequence: Synthetic coding sequence
  source 1..198: mol_type = other DNA
atggctctgcccccttctccccttgctatggagtatgtgaatgacttcgatctgatgaagtttgaagttaaaagagagccatccgagggccgtccaggaccacctactgcctcactgggctctacaccctattcgagcgttcctccctctccaacatttagcgaacccggaatggtcggcgctaccgaaggaacttag

SEQ ID NO: 232264 - DNA, 297 bp, synthetic construct
  misc_feature 1..297: note = Description of Artificial Sequence: Synthetic coding sequence
  source 1..297: mol_type = other DNA
atgtccgtcagagaattgaataggcagctgagaggatgtgggagagacgaggcattgcgcttgaagcagagaaggaggacgctaaaaaatcgcggttatgctcaagcttgtagaagcaaacgactgcagcagcggaggggactggaggccgagagggcaaggctcgcggctcagttagatgcccttcgcgcagaggtggctaggctcgccagagagagggatctgtataaggctaggtgtgacaggcttacgagcagtgggccaggctcaggcgaccctagccacctctttctgtag

SEQ ID NO: 232265 - DNA, 714 bp, synthetic construct
  misc_feature 1..714: note = Description of Artificial Sequence: Synthetic coding sequence
  source 1..714: mol_type = other DNA
atggccctccctccatctccgttggctatggagtacgtaaatgactttgatctgatgaagtttgaagtgaagcgagaaccctctgagggaaggcccggaccccctactgcatcccttggaagtaccccttactcttccgtccccccttctccaaccttcagtgagcctgggatggtgggcgcaacagaggggacacggcctggccttgaagagttatactggctggctaccctgcaacaacagctaggtgctggggaagccctgggtctttctcctgaagaagccatggagctcctgcagggccagggtcccgtgcctgttgacggtccccacggctattatccgggttcccctgaagagaccggagcgcagcacgtgcagctggcggagcggttctccgatgcagctcttgtgagcatgtccgtccgtgagctgaataggcagttacgaggttgtggaagggacgaggccctgcggttgaaacagcgcaggcggacactgaagaacagaggctacgcccaagcctgcagatccaaacgtttgcaacagaggagaggactggaggctgaacgcgctcgcctggcagctcagcttgatgccctacgggcagaagtcgccagactagcgcgtgagcgagatctctataaagccaggtgtgaccggttaacaagttcaggacctggaagcggcgaccccagccacctctttctatag

SEQ ID NO: 232266 - DNA, 1674 bp, synthetic construct
  misc_feature 1..1674: note = Description of Artificial Sequence: Synthetic coding sequence
  source 1..1674: mol_type = other DNA
atgggtggacagatcactcgcagcacccttcacgactccatcgggggaccatttccggtcacaagtcataggtgccatcataaacagaaacactgcccagccgtcctcccatcaggcggactgcccgctacaccgctcctcttccatccccataccaaggggagtcagattttaatggatctgtcacataaggctgttaaacgccaagcttctttctgtaatgccataaccttctctaataggccagtgttgatttacgaacaggtcaggttgaagatcaccaagaagcagtgctgctggtcaggcgcactgcgactagggtttacctcaaaggatccttctcgcatccacccagatagccttccaaagtatgcatgcccagaccttgtctcccaatcaggtttctgggccaaggccctccctgaggagtttgcaaacgaagggaatatcatcgccttctgggtcgacaaaaagggtcgggtctttcaccgcatcaatgattccgccgtaatgctgtttttcagcggtgtcagaacagccgatcccctgtgggcattagttgatgtttatggattgaccagaggtgtccaattgttagactctgagctggttctgcctgactgtctgcgtcctaggagctttaccgccctgcgcagaccgagcctgcgacgcgaggcagacgatgccaggctgagcgtgagtctctgcgatctcaatgtgccaggggcagatggtgacgaggcggcacctgccgcagggtgtccaattccacagaactcactaaatagtcagcattcacgagccctgccggcacagttggacggcgacctgaggtttcacgccctgagagccggagcacacgtgcgcatcctcgacgagcagaccgtagcaagggtcgagcacggtagagatgaaagagctcttgttttcacctccaggccagttagggtcgccgaaacaatttttgtcaaagtgacgagatcaggcggagccaggccaggggcactttcctttggtgtgaccacctgcgatccgggaacattacgcccagctgaccttccattcagtcccgaggcactggttgaccgaaaagaattctgggccgtctgccgggtgcccggacctctgcatagcggcgacatcctgggcttggtagttaacgctgacggggaattgcacctgtcacacaatggcgctgctgccggaatgcagctttgtgtggacgcgtcccagccactgtggatgctctttgggctgcacggaaccatcacacaaatccggattctggggagcactatcctggcggaaagaggaatcccatcccttccctgcagccctgcgagtacccccactagcccttccgctctgggatcaagattgagtgacccgctgctgtcaacttgttctagcggaccgctggggtcgtccgctggaggtactgccccaaactcccctgtttctttgccagagtcaccagttacccctggacttggccagtggagtgacgaatgcacaatttgctacgaacacgccgtggacaccgtgatctacacatgtgggcacatgtgcctctgttacgcctgcggactgcgccttaagaaagctctgcatgcatgctgtccaatctgtagaagacctatcaaagacattataaagacctacaggtcctcctag

SEQ ID NO: 232267 - DNA, 1725 bp, synthetic construct
  misc_feature 1..1725: note = Description of Artificial Sequence: Synthetic coding sequence
  source 1..1725: mol_type = other DNA
atgggaaacaacttctcttcaattccctcattgcctaggggcaacccttctagggcgccacgcggacaccctcagaatctgaaagattctatcggcggtcccttccctgtgacgagccatcgatgccaccataaacagaaacattgtcctgccgtgctccccagcggtggcctgcccgcaaccccgctgcttttccatccccacactaagggttcccaaatcctcatggacttatcgcacaaagctgtgaagcgacaggctagcttttgcaacgctattacctttagtaatcggccagtactgatctacgaacaagtaaggcttaagatcactaaaaagcagtgctgctggtctggcgcactgagactggggttcaccagcaaggatccttcccgcattcatcctgactcgctcccgaaatacgcttgccccgatcttgttagccagtctggcttctgggctaaggctttaccggaagaattcgcaaatgaaggaaatatcatcgccttttgggtggacaagaagggccgagtgtttcataggatcaacgactctgctgtaatgctgttcttttcaggagttagaacagccgatcctctttgggctctcgtggacgtgtatgggctgacacgaggggtacagctgttggatagcgagttggtgctacccgactgtttaagaccgaggagtttcactgcactgaggcgaccatcccttcgtagggaagccgatgatgcccgtctcagcgtgtctctatgcgacttgaatgtaccgggagcggacggagatgaggctgctcccgcagctggatgcccgataccacaaaattccttgaattcccagcacagccgggctctccccgcacagttggacggagacctgcgatttcatgctcttagggccggagcgcacgtaaggatcctggatgaacagactgtcgccagggtagaacacggcagagacgaacgggctctcgtgtttacctccagaccagttcgtgtggcggagaccatcttcgtcaaggtgacgaggtccggcggtgcacgacccggagcattgagtttcggagtgactacatgtgaccccggtaccctgcgacccgctgacctgcctttctcgccagaggccctggtcgataggaaagaattctgggccgtgtgccgtgttcctgggccacttcatagcggcgacattctaggactcgtcgtcaatgcagatggagagctgcatctgtctcataatggagctgctgccggtatgcaattgtgcgtggacgccagtcagcccctgtggatgcttttcggattacacggaacgatcacgcagatcaggattttaggttctactattctggcagagagaggaataccgtctctgccttgctcccccgcaagcactcctacgagtccctcagccctgggcagtaggttgtctgaccccttgctcagcacatgctcgtcagggccactggggtcttctgctggaggaaccgcaccgaattctccagtgagcctgcctgaatcgcccgtgaccccaggcctggggcaatggtccgatgaatgtacaatttgctacgagcatgccgtagacacagtgatatatacatgcggacacatgtgtttatgctacgcctgtggtctgagactaaaaaaggcactgcatgcctgctgcccgatttgtcgacgcccaatcaaagatattataaagacctacaggagcagttag

SEQ ID NO: 232268 - DNA, 600 bp, synthetic construct
  misc_feature 1..600: note = Description of Artificial Sequence: Synthetic coding sequence
  source 1..600: mol_type = other DNA
atggggggtcagatcacaagaagtactctgcatgatagcattggcggaccgttccctgtaacaagtcatcgctgccaccacaaacagaaacattgtcctgcagtcctgccctccggcggacttccagccacgccacttctctttcatcctcataccaagggatcacagatcctgatggacttatcccacaaggccgtgaaaaggcaggcctccttttgcaacgccatcaccttctcaaataggccagtcctgatctacgagcaggttaggttaaagattacaaagaaacagtgctgctggtctggagccttacggctgggattcacctcaaaagatcccagtaggatccatcccgatagcctacctaagtacgcgtgcccagacctagtgtctcagtctggcttttgggcgaaggcccttccagaggaattcgccaatgaggggaacattatcgcattctgggttgacaaaaaaggcagggtgtttcatcggattaacgacagcgccgttatgctgtttttttcaggcgtgagaactgcagatccgctctgggctcttgtcgacgtttatggacttactcgcggagtgcagctgctctag

SEQ ID NO: 232269 - DNA, 327 bp, synthetic construct
  misc_feature 1..327: note = Description of Artificial Sequence: Synthetic coding sequence
  source 1..327: mol_type = other DNA
atggacttgtctcacaaagctgtaaagcgtcaggcatccttttgtaacgcaatcaccttcagcaatagacctgttctgatctatgagcaggttagactaaagataactaagaaacagtgctgctggagcggagctcttagacttgggtttacctccaaggacccatcacgcattcatcctgatagtctcccaaagtacgcctgtcccgacctggtgtcccagtctggtttctgggcaaaagctttacctgaggagttcgctaacgagggaaacatcattgcattctgggtggataagaagggaagggtctttcaccggatcaactag

SEQ ID NO: 232270 - DNA, 2553 bp, synthetic construct
  misc_feature 1..2553: note = Description of Artificial Sequence: Synthetic coding sequence
  source 1..2553: mol_type = other DNA
atgcggcaggtgtgctgttctgccctccctccccctccattggagaagggcaggtgttcctcctactctgatagttcaagctccagcagtgaaaggagctcgtcttcgtcctccagctcaagtgagtcagggagtagctctaggagctcgagtaacaatagcagcatctctcgcccagcagcaccccctgagccccgtccacagcagcagcctcagccgagatctcctgcggctagaagagcggctgctcgaagtcgtgccgctgctgcaggcggaatgcggcgtgatcctgcaccaggattctcaatgctgctgttcggagtctccctggcctgttattcccccagccttaagagcgtgcaggaccaggcatataaggcccctgtcgtggtggagggcaaggtgcaaggcctcgtgccggcaggagggagcagctccaactccactagggagccccctgctagcggccgtgttgctctggtaaaggtgttagacaagtggcctttgaggtcaggcggattgcagcgagaacaggtcattagcgtgggtagctgcgtacccctggagaggaatcagaggtatatcttcttcctggagcccacagaacagcccctagtgtttaagaccgctttcgcgcctctggacactaacggcaagaacctgaaaaaagaggtgggcaagatcctctgcacagactgtgccacccggcctaaactgaaaaagatgaagtctcaaacgggacaggtcggagaaaagcaaagcttaaagtgtgaggccgctgcaggtaatcctcaaccttcctatcgttggtttaaggatggcaaggagctgaataggtcacgagatatcagaatcaaatacggcaatgggaggaagaatagtcgccttcaatttaataaggtgaaggtagaggatgccggagagtatgtctgcgaggccgaaaacatactgggcaaggacaccgtgagaggaagactatatgtaaacagcgtcagcactactttgagttcttggagcgggcacgcgagaaagtgcaatgagactgccaagagctattgtgtgaacgggggagtctgctactatatagaaggaattaatcagctgtcctgcaagtgccctaacgggtttttcggacagcggtgtttggagaaactgcctctccgtctgtatatgccagaccccaaacagaaggctgaggaactgtatcagaagcgggtcctgacgatcaccgggatttgtgtggccttgttggtcgtcggaatcgtgtgcgtagtggcttactgtaagaccaagaaacaaagaaaacagatgcacaatcatctcagacagaacatgtgtcccgcacaccagaatcgaagtctcgccaatggtccatcccatccacggttagatcctgaggaaattcagatggccgattatatatctaagaacgtgccagccacggatcacgtcataagacgcgaaaccgagacaacgttctccgggtcccattcgtgttccccaagccaccattgctcaaccgccactccaacatcgagtcaccgccatgaatcccatacgtggtcattggaacgtagtgagtctcttacttcggattctcaaagcggcatcatgctgtcatctgtcggaacctcgaagtgcaattcacccgcttgcgtggaagctagagctagaagagccgctgcttacaatcttgaggagaggagacgggcaacagcaccgccataccacgatagtgtagactccctgagggactccccacatagtgagcggtacgtcagcgcattaactaccccagcacggctgagtcccgttgacttccattactcattggccacccaagtacctacatttgagattacgtctccaaacagtgctcacgctgtttccctgccgcctgctgctcccataagctaccgcctcgccgagcagcaaccactgctgaggcatccagctcctcccggtcctggtcctggccctgggccaggccctgggccaggagccgacatgcaacgatcttacgacagttattactacccggcagccggtcccggtcctcgcagaggcacttgtgcactcggcggatctcttggctcgctgcccgcatccccatttagaatccccgaagacgacgaatatgaaactacccaagagtgtgcacccccaccccctccgaggccacgtgccagaggcgcttctcggcgaacttctgcagggcctcgcagatggaggcgatctagacttaacgggctagccgcacagcgagcacgagccgctagggactctctgtctttgtcgagcggatcgggaggcggatcagcatcagcctcagatgacgacgccgacgatgccgacggtgccctggccgcagaaagtacacccttcctgggccttcgcggagcacacgatgcgttacgatcggacagcccccctctctgtccagccgcagatagtcgcacctactattcattagacagccacagtaccagggcgtcttctcgccactctcgtggacctcctcccagggcgaaacaggacagtgcgccactgtag

SEQ ID NO: 232271 - DNA, 1281 bp, synthetic construct
  misc_feature 1..1281: note = Description of Artificial Sequence: Synthetic coding sequence
  source 1..1281: mol_type = other DNA
atgagacaggtgtgttgctccgcactgccaccccctccactcgagaaaggtaggtgcagctcttactccgattcttcttcgtccagctccgaacgatcgagcagtagttcaagcagttcctccgagagtggctctagttcacgaagttcttccaacaactccagcatcagtcggccagctgcacctcccgagccccgtccccaacagcagcctcagcctcgcagcccggcagccaggagagccgcagccaggagcagggctgctgccgctggaggaatgcggagagatccagccccagggttttcaatgttgctcttcggggtgtctctggcgtgctacagccctagtctgaagtccgtccaggaccaagcttataaggccccagttgtcgtagaaggcaaggtgcaggggctggtccccgcaggcggtagttcgtccaactccacaagagaacctcccgctagcggacgagtcgctctagtcaaggtgcttgataagtggcctttgaggagtggcggattacagcgggagcaggtgatctctgtggggtcgtgcgtcccattagaacgtaaccagcgatacattttcttcttggagccaactgagcagcctttggtgttcaagacagccttcgcacccttggacactaatggaaagaatctcaaaaaggaggtgggcaaaatcctatgtacagattgtgccactagacctaagcttaaaaagatgaagtctcagacgggtcaagtgggtgagaagcaatccctgaagtgtgaggctgccgcaggaaatcctcagccctcatacaggtggttcaaggacggcaaagaactaaacagaagccgggacattcggatcaagtatggtaatggacggaaaaattcaaggctccagtttaataaagtgaaggtggaagatgccggtgaatacgtgtgtgaagctgagaatatcttgggcaaggataccgtgagaggcaggctctacgtaaatagtgtatcaaccactctgtcctcgtggtccggccatgccagaaagtgtaacgagacagctaagagctattgtgtgaacggaggggtctgttactatatcgaggggattaatcagctgagttgtaaatgcccaaacggtttctttgggcaacgatgcctggaaaaactgcctctacgattatacatgcccgacccaaagcagtcagttctttgggacaccccgggtaccggagtttcatcatcacaatggtcgacctcccccaaaccacgttcctgtaccagaagggggagttag

SEQ ID NO: 232272 - DNA, 2577 bp, synthetic construct
  misc_feature 1..2577: note = Description of Artificial Sequence: Synthetic coding sequence
  source 1..2577: mol_type = other DNA
atgcgtcaggtgtgttgtagcgcgctgccccctccccctctagagaaaggaaggtgttcatcctactctgatagctcatcttcaagcagcgaacgttcgtcctcgtcgagctcctcatcgagcgaatccggctcctcctctcggagcagcagtaacaattcatctatttcccgccctgccgctcctccagagcctaggcctcagcagcagccccaacccaggtcgcctgctgccaggagggccgctgcaaggtcgcgagccgctgccgcaggaggtatgaggagggatcccgctcccggatttagcatgctgctatttggggtgagtcttgcctgctactccccaagcttgaaaagcgtgcaagatcaggcatataaagcccctgtcgtggtggaaggaaaggtgcagggtctggtgcccgcaggaggcagcagctccaactcaacacgcgaaccacctgcttctgggcgagtggctctcgttaaggttctcgacaaatggccactgcgcagcggcggacttcagagggagcaggtcatatcggttggctcttgcgtccccctcgagaggaaccagagatacattttcttcctggagcccaccgaacagcccctggttttcaagacagcctttgctccactcgacaccaacggcaaaaatttaaaaaaagaggtgggcaagatattgtgtactgattgtgccaccagaccgaaactgaagaaaatgaaatcccagactggccaggtcggcgagaaacagtccctgaagtgtgaggctgctgccggaaatcctcagccgagttaccggtggtttaaggatggtaaagagctgaaccgctctagagatatcaggatcaagtatggcaatggacgaaaaaactcaagactgcagtttaacaaggtgaaggtggaggacgctggcgagtatgtctgtgaggccgaaaacattctgggaaaagatactgtgcgtggccgtctgtatgtgaatagcgtctctacgactctcagctcatggtcagggcacgctcggaaatgcaacgagactgccaaaagttattgcgtgaacggcggtgtgtgctactatattgaaggaatcaaccagttgagctgcaagtgtcccaacgggttcttcggccagcgctgtctggagaagctgccgttgaggctgtatatgcctgaccctaaacagtccttcctgtccttcgaattgtcaaaagcagaagagttgtatcagaaacgagtgctaaccattaccggaatttgcgtagcgctactggtcgtgggcatcgtttgcgtcgttgcatattgcaaaaccaagaaacagcgtaagcaaatgcacaaccatctgagacagaacatgtgccctgctcaccagaaccggtccctggcgaatgggcctagccatcctcggttggaccctgaggaaatccagatggcagattacatctccaaaaacgtgcccgctactgatcacgtcatccggagagaaactgagaccaccttcagtggatctcacagctgttccccaagccatcattgcagtacggcaacccctacaagcagccaccgtcatgagtctcatacatggtcacttgaacgctccgagtctctaacatctgattcccagtccggaataatgctgagctccgttggcacctcgaagtgtaactcacccgcatgcgtggaggctagggctcggcgagctgctgcttataatctcgaggaacggagacgcgcaaccgccccaccctatcatgattccgttgactcactgcgagattcacctcatagtgagcgctacgtgagcgccttgacaaccccggctcgactcagtccggttgattttcattactccttggctactcaggtgccaacttttgagataacaagcccaaattcagctcatgcagtctctttgccgcctgcggcacccatctcgtaccgactcgcagaacagcagcctctgcttcggcacccggctccaccaggtcccggacctggacccggtccgggtccagggccaggagccgatatgcagaggtcctacgatagctactactaccccgctgccggaccgggacccaggcgtggaacttgcgcactaggcggatccctgggatcccttcctgcatcccctttcaggattcccgaagatgatgaatatgagactacccaggaatgtgctccccctccccctcccagacctcgtgccaggggtgccagtcgaagaacctctgcagggccaaggaggtggcgtaggagtcgtctcaacggcttggccgctcagagagcccgagccgcacgcgactctttgagtttgagtagcggcagcgggggaggctctgcttctgccagtgatgatgacgctgatgacgccgacggggctcttgccgcagaaagcacaccctttctgggcctgcggggtgcacatgatgcccttcgttctgacagcccgccactgtgtccagccgctgactccagaacatactactctttagattctcattctacacgcgcaagctcgagacactcccggggtccccctcctagagctaaacaggactcagcccctctatag

SEQ ID NO: 232273 - DNA, 2355 bp, synthetic construct
  misc_feature 1..2355: note = Description of Artificial Sequence: Synthetic coding sequence
  source 1..2355: mol_type = other DNA
atgcgccaggtgtgctgttctgctctcccaccgccacccctggagaagggcaggtgttcgtcttacagcgatagctcctcaagcagcagtgagaggtctagctctagctcgtcatcctcttccgaatcaggatcgtctagccgcagctctagcaataattctagtatcagccgccctgccgcacctcctgagcccaggccacaacaacagccccagccacgttctcccgcagccagaagggccgcagctcgctctagggcagccgcagccggtggaatgcgtagagaccctgctcccggtttttcgatgctattatttggcgtgtctctggcctgctactctcccagtttgaagtcagttcaggatcaggcctacaaggcaccagtagtcgtggaaggtaaggtccagggcctggtgcccgctgggggaagctcctctaacagcacacgagaaccccctgcttctggtagagtcgcgttggtgaaagttttggacaagtggcccttgcggagtggcggtcttcagagagagcaggtgattagcgtcggcagctgcgtgccattagagaggaaccagagatacatattcttcctggaacccactgaacagcctctagtgtttaaaacagcctttgcgcctttggacacgaatgggaaaaacctgaaaaaagaagttggtaagatcctgtgcaccgattgcgctacccgtccaaaactcaagaagatgaaaagccagaccggccaggtgggtgagaaacagagcctcaagtgcgaagctgctgctggaaacccgcagccatcttaccgctggtttaaagacggaaaggagttgaatcggtcaagggacatcagaatcaagtacgggaacgggcgtaagaatagcaggctccagttcaacaaggtgaaggtggaagacgccggagaatacgtctgtgaagccgagaacatcctcggtaaggacactgtgcggggtagactctacgtgaactccgaagccgaagagctttaccagaaacgtgtgctaacaattaccggtatctgtgtggcgctgctcgtggtcggcatcgtgtgcgtcgttgcctactgcaaaactaagaaacagcgaaaacagatgcacaatcacctgcgacagaatatgtgtccagcccaccaaaaccggtctttagctaatgggccttctcatccaagattggatcctgaggagattcaaatggctgactatatcagcaagaatgttccggctacggaccatgtgatccgcagggaaacagaaactactttcagtgggtcgcacagttgctcaccgtcgcaccactgtagcactgctacaccaacgagttcccaccggcacgaaagtcacacatggtcacttgagaggtcagaaagtctaacctctgactcccaatctggcataatgctgtcgagcgtggggacaagcaagtgtaatagcccggcttgcgtggaggctagggctagacgcgctgccgcttacaacctcgaagaacggaggcgagcgaccgctcccccatatcatgacagcgtcgactcgctgcgggacagccctcatagtgagcgatatgtgtccgcactgacgactccagctagactgtcaccggtggatttccattacagcctggccacacaggtcccaaccttcgagatcactagccccaacagcgcccatgcagtgtccctccctccagctgcccctatctcctacaggctggcagaacaacagcccttactccggcatcctgctccacccggtcctggtcctggacccggacccggtcctgggccaggggctgacatgcaaaggtcgtatgattcttactactatcctgccgctggtccaggtcccagaaggggaacatgtgcactcggagggagcctgggcagcctccctgccagtccctttcgcatacctgaggatgacgagtacgagaccacacaggagtgtgccccacccccacccccaaggccccgagctcgcggtgcctctaggcggaccagcgctgggccaagaaggtggcgccgttcacggttgaacggccttgctgctcagcgggcacgggctgcaagagactctctctccttaagctctggcagcggcggtggctctgcctccgcatcagatgacgacgcagacgatgcagacggagcactggcagccgagtctacgcccttcctcggactgagaggcgctcacgacgctctcagaagcgactctccaccactgtgtccagcggctgattcgagaacctattactccctcgattcccatagtaccagagcctcttctcggcattcccggggtccaccacctcgcgcaaaacaagacagcgcacccctctag

SEQ ID NO: 232274 - DNA, 993 bp, synthetic construct
  misc_feature 1..993: note = Description of Artificial Sequence: Synthetic coding sequence
  source 1..993: mol_type = other DNA
atgcgcagggatcccgcacccggtttctccatgctgctctttggggtatcacttgcctgctattcgccctccttgaaatcagtccaagaccaagcctacaaagcccctgtggtggtagaggggaaagtccagggactggttcccgcaggcggttcgagctccaactcaactagagagcctcctgcctccggtcgcgtggcactggtgaaggtacttgataagtggccattgcgaagtggagggctgcagcgtgagcaggttatctctgtggggagctgcgtcccactggaacggaatcagagatacatcttctttctggaaccaactgagcagcccctcgtgttcaagacagccttcgcacctctcgataccaatggcaagaatttgaagaaggaagtgggcaaaatcctctgtactgattgtgcaaccagacccaaactgaagaaaatgaaaagtcagaccggccaggtaggcgagaaacagtccttaaagtgtgaggccgcagcaggcaaccctcagccgagctacaggtggttcaaagacggcaaagagctaaaccgctcgagagacatccgaattaaatacggcaacgggaggaaaaattcacgcttacagttcaataaagtgaaggtcgaggacgccggtgagtacgtctgcgaggcagaaaacatactggggaaagataccgtcagggggcgtctctacgtcaatagcgtctccactacgctttccagctggtccggccacgctagaaaatgcaatgaaaccgccaagtcttattgcgtgaatggcggagtgtgttactatattgaaggaattaaccaactgtcgtgcaaatgccccaacgggttttttggtcaacgctgtctggaaaagctgcccttaaggctgtatatgcctgacccgaaacagagcgtattgtgggataccccgggtacaggagtatcctcctcccagtggtccacttctccttctaccctggatctgaactag

SEQ ID NO: 232275 - DNA, 2559 bp, synthetic construct
  misc_feature 1..2559: note = Description of Artificial Sequence: Synthetic coding sequence
  source 1..2559: mol_type = other DNA
atgaggcaagtgtgttgcagtgctttgccccctccgccactggagaaaggtagatgcagcagttacagcgatagctcgtcttcctcttccgaaaggagctcaagttcgagctcctcctcttccgagagcggatcctcgagcaggagctcttccaataacagttccatctccaggcccgcagctccgccagaacctagacctcagcaacagccacagccacgttctcctgctgcacgcagagcagctgccagatccagggccgcagccgcaggtggaatgcgccgagacccagcaccaggattcagcatgctgctctttggcgttagtcttgcatgttactctccaagcctgaagagcgtgcaagaccaagcttacaaggccccagtggtcgtagaaggaaaggttcaaggcctcgttccagctggtggctcgtcttccaattcaacccgcgaacccccagcttccgggcgagtggcgcttgtaaaggtgctggacaagtggcctttgaggagtggtggtctccagcgcgaacaggtcatcagtgtcgggtcctgtgttcctttggaacgtaaccagcgatatatcttcttccttgagccaacggagcagccgcttgtttttaaaactgcttttgcccctctggacaccaacggcaagaacttaaaaaaggaggtgggcaagattctgtgcacggactgtgctacgcggccaaagctcaaaaaaatgaagtcccagacaggacaggtgggtgaaaagcaaagtctaaagtgtgaggctgctgcaggaaatccacagccaagctacaggtggttcaaggatggtaaggaactaaatagaagtcgagatattagaatcaaatatggaaacggtaggaaaaattctaggctgcaattcaataaagtgaaagttgaggacgcaggggagtacgtttgtgaggccgagaacatcctgggcaaagacaccgtgcgcggtcggctatatgtgaacagcgtatcgaccactctctcatcctggtcgggacatgccaggaagtgcaatgagacagccaaatcgtactgtgtgaacgggggagtgtgttattatattgaggggatcaaccaactgagctgtaagtgtcctgttggatatacaggagaccgttgccagcagttcgcaatggtgaatttttctacacggctagggggagatgtggaggaggccgaagaattgtatcagaagcgcgtgttgaccatcaccggcatttgtgtggcgttgcttgttgtcgggatcgtgtgcgttgtggcctactgcaagaccaagaagcagaggaagcaaatgcacaatcacctcaggcaaaatatgtgtcctgcacatcagaacagatccctcgcaaacggaccctcacacccacgcctagacccagaggagatacaaatggccgattacattagcaaaaatgtgcctgctactgaccatgtgattcgtcgtgaaaccgaaactacttttagcgggagtcattcctgcagcccaagtcaccactgttccacagctacacccaccagtagccatcgtcacgagtctcatacttggtccctggaaagatctgaaagcctcacatctgattcccagtcaggaatcatgttaagctctgttggcacctccaaatgtaacagtcctgcctgtgtcgaggccagagcacgtagggctgcggcttacaaccttgaggagagaagacgcgcaacagctcccccttatcacgattctgtcgattctctgcgcgattctccccactctgagcgctacgtctcagctttgacaactcccgctagactgagccccgttgatttccactattccttggccacccaagtgccgaccttcgagatcactagtcccaactcggcacacgccgtctccctgcctccagcagctccaatcagttatagactggcggaacagcagccactgctaagacacccagcacccccaggtcctgggccagggcctgggcctggaccagggccaggtgccgacatgcagcgatcctatgacagctactactaccctgctgcgggaccagggcctcgcagaggtacctgtgccctggggggttccctcggatcactgcctgcctcccccttccggataccagaggatgatgaatacgaaacaacacaggagtgcgcaccccctccccctccacgtccaagggctcgaggcgcatcaaggaggacctccgcaggacccagacggtggcggcgtagccggctgaacggtctggctgcgcagagggcgcgagctgctcgcgacagcctgtcattatcatccggaagcggaggcggtagtgcctctgcatctgacgacgacgccgacgatgccgatggtgcacttgctgccgaaagcactccattcttagggttgcggggtgctcatgatgcattgcgttcagattctcctcccctgtgtcccgctgccgattccaggacctactacagcctggattcccattccactcgtgcctccagccgacactctagaggaccccctcctcgtgccaaacaggacagcgccccattatag

SEQ ID NO: 232276 - DNA, 2535 bp, synthetic construct
  misc_feature 1..2535: note = Description of Artificial Sequence: Synthetic coding sequence
  source 1..2535: mol_type = other DNA
atgcgacaggtttgttgctcagcactgccccctcccccactcgagaagggtcgttgctcatcttatagcgattctagtagttcgtcatccgaacgatccagcagttccagcagcagcagtagcgaatccggatcctcctccaggtctagctcgaataacagcagcataagtcggccagcggctccccctgagccgagaccacagcagcaaccacagcccagatcgccagcagcaagaagagcagccgcaaggtcccgggcagccgcagcgggaggcatgaggagggatcccgcaccaggcttcagcatgctcctgttcggagtttctctggcctgctacagtccctccttgaaatccgtccaagatcaagcctacaaagcccctgtggtggtcgaggggaaagttcagggactcgtgcccgctggcggttcttcctccaacagcacccgggagcctccagcctccggtcgcgtcgctctcgtgaaggtcctagataaatggccgctgaggtctggcggactgcaaagagagcaggtcataagcgttggaagctgtgtgccccttgagaggaaccagaggtacatcttcttcctcgagccaacagagcagcccctcgtgtttaagacggccttcgctccgcttgacaccaatgggaaaaacctaaagaaggaggttggaaagatcttatgtaccgattgtgcaaccaggcccaaattgaagaagatgaagagccagaccggacaggtgggtgagaaacagagtcttaaatgcgaggctgcagccggaaacccccagccttcctaccgatggtttaaggacggcaaagagctcaacagatcccgggacatccgtattaagtatggcaatggaagaaagaactcccgcctgcagtttaacaaagtaaaagtggaagacgcaggcgagtacgtctgtgaagccgaaaatattctgggaaaagacacagttcggggtcgcctttacgtgaattctgtgtccacaacactttctagctggagtgggcatgccaggaagtgtaatgaaactgcgaaatcatattgcgtgaacggcggagtctgctactatatcgaaggcattaaccagctgtcatgtaagtgccccgtgggttatacaggggataggtgccagcaatttgccatggtaaactttagtaaagcagaggagctctaccaaaaaagagttttaaccattactgggatctgtgttgcactacttgttgtgggcatcgtttgtgtcgttgcttactgcaagaccaagaaacaaaggaaacaaatgcataaccacctgcgccagaacatgtgccccgcacatcaaaatcgtagtctggctaacggtccgagtcacccaaggttagaccctgaggaaatccagatggctgactacattagtaagaatgtgccagcgacagaccatgttatccgtagagaaacagaaaccacgttttctggatcccattcctgcagtccaagccatcactgctctaccgccacacctaccagtagtcatcggcatgagtctcacacatggtcattagaacgatcagaaagtctcacctctgattcccagtcaggcattatgcttagttccgtaggtacatctaaatgcaattcccccgcatgtgtcgaagccagggcgaggagagccgcagcatacaatctggaggagcggagacgagccacagctccaccttaccatgatagcgttgacagccttcgcgactccccacattcggagaggtatgttagtgccctcactactcccgctagactgtccccagtcgactttcactactccctggcgacccaggtgccaacgttcgagattactagccccaacagtgcacacgcagtgagcttaccacctgctgccccaatttcatacaggttagcagaacaacagcctctgcttagacacccagctccccctggcccaggacccggaccgggtccagggccaggacccggagctgatatgcaacgcagctacgatagctactactatccagcagcagggcctgggccacgcagagggacatgtgccctgggtggaagtctggggtcactgcccgcatcacccttcaggattccggaagatgacgagtacgaaacaactcaggaatgcgcccctccgccacctcctcgaccacgggctagaggcgcttctcgtcgcaccagtgccggaccacggcgttggcgacgaagcagactaaatgggttggccgctcagcgcgcacgggctgctagggattctctgagtctgagcagcggcagcggagggggatccgcttccgcatcagatgatgacgccgatgacgctgatggagccctggctgccgagtccacaccgtttctcggactacgcggtgcacacgacgcactgaggtcagactctcccccactgtgtccagctgccgactcaaggacctactattcgctcgacagtcactcaacacgcgcatcatctagacactcaaggggccctccaccgagagcaaaacaagacagcgcacccttgtag

SEQ ID NO: 232277 - DNA, 2577 bp, synthetic construct
  misc_feature 1..2577: note = Description of Artificial Sequence: Synthetic coding sequence
  source 1..2577: mol_type = other DNA
atgcgccaagtgtgttgcagcgctctgcccccaccccctctagaaaagggacgctgttccagctactcagatagttcaagcagcagcagtgaaaggtccagcagctcttctagttcaagttctgaatcaggaagtagttcaagatccagctctaacaactcaagcatctcccgtccagctgccccacccgaacccagaccacagcaacagccacagcccagatctcctgccgctcgcagagctgcggctcggagcagggccgcagccgcaggaggcatgcgccgagaccctgccccaggattcagtatgctgctttttggagtgtctctggcatgctactccccttcccttaagagcgttcaggatcaggcttacaaagcccctgttgtggttgagggaaaagtgcaagggctggtgcctgcaggtggttcatccagcaattctacaagagagcctccagccagcggccgagtggccctggttaaggtcttggataagtggccattgcgaagcggaggcctccagagggagcaggtgatctcagttggctcatgcgttcccctggaacggaatcaaaggtatattttcttccttgagccaactgagcaaccactagtgtttaagacggcattcgccccactggacactaatggtaagaatctcaagaaagaagttggaaagattttgtgtacagactgcgccaccagaccaaaactgaagaaaatgaagtcacagactggacaggtaggcgagaaacagagcctgaagtgcgaggccgcagctgggaatcctcagccttcgtaccgctggttcaaggacggaaaagagctgaataggtctcgcgacatccggattaagtatggaaacggaagaaaaaattctagattacagttcaacaaggtcaaggttgaggacgcaggcgagtacgtctgcgaggccgagaacatcttagggaaagatactgtgcgcggtcgtctgtatgtcaacagtgtatccaccacattgagttcatggtctggccatgcccgaaagtgcaacgagactgcaaagtcttactgcgtaaacggcggtgtctgctactacattgaagggataaaccaactgagctgcaaatgtcccaacggcttctttgggcagagatgtttagagaaactgcccctaaggctctacatgcccgaccccaaacagaaacacttggggttcgaattaaaagaggccgaggagctgtatcagaagcgcgtgttgacgattactggtatttgcgtcgcactgcttgtcgtaggtattgtgtgcgtggtggcctactgtaagaccaaaaagcagaggaagcagatgcacaatcacctaagacagaatatgtgccctgcccatcaaaaccggagcctcgctaatggcccttctcacccccgtttggacccagaagaaattcagatggccgactacatcagtaagaatgtgcctgctaccgatcacgtaatacgacgggaaacagaaacaaccttctctggctctcactcctgttcacctagccatcactgttccacggccacacctacgtcatcgcatcggcatgaaagccacacctggagtctcgaacgttctgagagccttacgtctgactcacaaagcgggatcatgctgtccagtgtcgggacaagcaagtgtaattcacccgcttgcgtcgaggcaagggcacgcagagctgctgcctacaacttagaggagcggaggcgggctacagcccctccttaccatgactccgtggacagcctaagggacagcccacactctgaacgatacgttagcgccctaactacaccagcccgtttgtccccagttgacttccactattctcttgccacacaagtaccaactttcgaaatcacttcccccaattccgcccacgctgtctccctgcctccagcagcgcctatcagttaccgtctcgccgagcagcaaccattgttacgacacccagcacccccaggcccagggccaggacctgggcctgggccagggccaggcgctgatatgcagcggtcttacgactcttactactaccccgcagccggtcccggaccacggaggggaacatgcgcactggggggatcccttggctccctgccagctagtccattcagaatccctgaagatgatgagtatgagaccactcaagaatgcgctccaccacctcctcctcggcctagagctcgaggcgcatctaggagaacttccgccggtccgagacggtggaggcgcagccgccttaacggcctcgcagcccaacgcgcaagagctgcacgagattctctgagtctgtcgtctggctccggagggggatctgcctccgcctcggacgacgatgccgacgacgcagacggggctctggccgctgagtccacaccctttctcgggttacggggtgctcatgatgccctgcggtcagactctccacctttgtgcccagccgcagattcgcgtacctactattctttagacagtcattctactcgggcatcatcccgtcattccagaggaccacctccacgggctaaacaggattccgcacctttatag

SEQ ID NO: 232278 - DNA, 2091 bp, synthetic construct
  misc_feature 1..2091: note = Description of Artificial Sequence: Synthetic coding sequence
  source 1..2091: mol_type = other DNA
atgagcgaaggcgctgctgcagcctctccacccggagccgcaagcgcagccgcagcctctgccgaagagggcaccgctgctgctgcggctgctgcagctgccggaggagggccagacggcggaggtgaaggggcagctgaacctcctagggagttgagatgtagtgactgtatcgtctggaatcgtcagcagacttggctgtgcgttgtccctttgtttatcgggtttattggcctcgggctgtccctgatgcttctgaagtggattgtagtcgggtcggtgaaagagtatgttcctaccgacttagtcgattcaaaaggcatgggacaggatccatttttcctctccaagccatcctcattccctaaggccatggagactactacaacgacaactagtacgaccagccccgcaaccccctccgcaggaggcgctgccagttcccgaactccaaatcgcatcagcacccgactaaccacaattactcgggctccaacgaggtttcctggacacagggtccccatccgcgcttctcccagatctaccactgcacggaatactgctgctccagcgaccgtaccgagcacaactgcacctttctttagttcttctaccctgggcagccgcccaccagtgccgggaaccccatcaacccaagcaatgccttcatggcccaccgctgcctacgccacatcaagttacctccacgactctactccttcctggacactgtcaccattccaggacgctgccagttcatcatcaagcagcagctcatccgccacaactaccacacccgagacatcgacctcccctaagtttcataccaccacctacagtactgaacgctcagagcacttcaagccttgtcgcgataaagatttggcctactgtctgaacgatggggagtgcttcgtgatcgagactctcaccgggtctcacaagcactgtcggtgcaaggagggttatcagggagttagatgcgaccagtttctgcccaagactgatagtatcctgtctgacccaactgaccatcttgggattgaattcatggaatccgaagaagtgtaccaacgacaggtgctctccattagttgcattattttcgggattgtcatcgtcgggatgttttgcgccgcattttattttaaaagcaaaaagcaagcaaaacagatccaggaacagcttaaagtgcctcagaacggcaagtcgtattcattgaaagcgagtagcaccatggccaaaagcgagaatctcgtgaaaagccatgtccagctgcagaattattcaaaagtggaacggcatcccgtgacggcactggagaagatgatggagagtagctttgtgggcccacagagcttcccagaagtgccaagccccgacaggggatcgcagtctgtgaagcatcaccggagcctcagcagctgttgtagcccaggacagagatcaggaatgctccatagaaacgccttccgtcgcacacctccctcacccaggtcaagacttggtggcattgtagggccagcgtaccagcaactcgaggagagccgcatcccagatcaggacactatcccatgccaaggatattcttcatcaggattgaagacccagcgcaacacctcaatcaacatgcagctgcccagtcgcgaaaccaatccctatttcaactcgctggagcagaaggacctagttgggtatagttcgactcgcgctagtagcgtgcctatcatcccctcagttggacttgaagaaacctgcctccagatgccaggaatctctgaggtgaaatcaatcaaatggtgcaagaacagttattcagccgatgtggttaatgtgtcaattcccgtctccgattgtctgattgccgagcagcaggaggtgaaaatcctccttgaaacagttcaggaacaaattagaatcctcacagacgcgcgtaggagcgaggattacgagttggcctctgtggagacagaagactctgctagcgaaaatactgctttcctgccccttagtcctaccgccaaatcagagagagaggcacaatttgtgcttcggaatgaaatccagcgagacagcgcccttacaaagtag

SEQ ID NO: 232279 - DNA, 1500 bp, synthetic construct
  misc_feature 1..1500: note = Description of Artificial Sequence: Synthetic coding sequence
  source 1..1500: mol_type = other DNA
atggagtgtggcattcctccgaccctggtatgcgtgggcaggggcggtgggttacatactatcaatatcatcatttggtattatttcccaagcgcgtggcgcacgtgtttcaatatctcatcctctgtgggacttttgctcactaactcctataagttctataccaccacatattctacagagcgcagcgaacatttcaaaccatgtagggacaaagatctggcctactgcctgaatgacggggagtgctttgtgatagaaaccttaactggatctcataagcattgtcggtgcaaagagggctatcagggcgtacgttgtgaccagttcctgcccaagacagattccattctctctgatcccacagaccacctgggcattgagtttatggagtctgaagaagtctatcaaagacaggtgctgtcaatctcttgcatcattttcggtatcgtgatcgttgggatgttttgcgcggctttttacttcaagtcaaagaagcaggccaagcaaatccaggagcaactgaaggtccctcagaatgggaagagctactccctgaaagcatccagtacgatggctaagtcagaaaatctggttaagagtcatgtccagcttcagaactatagcaaagtggagcgccacccagttacagccctggaaaaaatgatggagagttcctttgtgggccctcagtcctttcccgaggtccctagtccagaccggggatctcaatccgtcaagcaccacaggtctctcagctcgtgttgttcacccggacagcggagcggcatgctccatagaaatgcctttcgccgtacccccccttccccacgcagcaggttgggcggaatcgtgggacccgcatatcagcagctcgaagagagccggatacccgaccaggacacgatcccgtgtcagggcatcgaggtgcgaaagactatcagccatttgcccatacaattgtggtgcgtggagcgccctttggacctgaaatactcatcttccggcttaaagacccagcgcaatacaagcataaatatgcagctgccatctcgggagacaaacccttatttcaactctctggaacagaaagatttagtaggatacagcagtacaagagcctcaagtgtgcccattatcccatccgtcggtctggaggaaacctgccttcagatgccgggaatatccgaagtcaagagtattaaatggtgcaagaattcatacagcgcggatgtagtgaacgtctcaatcccagtgtcagactgcctaatagcagaacaacaggaagtgaaaatcctccttgagaccgtgcaggaacagattaggattctgacagacgcgaggcgctccgaagattacgagctggcctccgtggaaacagaagattctgccagcgagaacacagcatttcttcccctgtccccaacagcaaaatctgaacgcgaggcacagtttgtcctgcgtaatgagatccaacgcgactctgcactgaccaaatag

SEQ ID NO: 232280 - DNA, 2163 bp, synthetic construct
  misc_feature 1..2163: note = Description of Artificial Sequence: Synthetic coding sequence
  source 1..2163: mol_type = other DNA
atgtctgagggcgcagcagcagctagcccacccggtgctgcgtctgccgcagcggcttccgccgaagaggggactgccgctgcggcagccgctgctgccgctggcggaggtcccgacggcggtggagaaggtgccgctgaaccccctagagaactacgctgcagcgactgcatcgtgtggaatcgccaacagacctggctctgcgtggtgcctctgttcattgggttcatcggactcgggctatcattgatgctcttaaaatggatcgttgtaggaagcgtgaaagagtacgtgccaactgatctcgttgactctaagggcatgggccaggatccctttttcctgtctaagcctagcagcttccctaaggcaatggagactaccacaactaccacgtctacaaccagcccagcaacaccatctgcaggaggtgctgcctcctcacgcacccccaatcggataagcacacgactgacaactatcacacgggcacccaccaggtttccagggcaccgcgttccaatccgcgcttcacctcgaagtacaactgctagaaacactgccgcaccagctactgttcccagcacaactgcaccgttcttttcttcatcgacacttgggtctcggccaccagttcctggtaccccttctacacaagcgatgccaagttggcctactgctgcctatgccactagcagctacctgcatgactctactccatcctggaccctttcaccctttcaagatgcagcctcatcatccagttcctcctcgtcatccgcaaccacaaccacccccgagacttctacgagtcctaaattccacacgaccacatattcaactgaaagatctgagcacttcaagccttgccgagacaaggatctggcctactgtctcaacgatggggagtgcttcgtcattgaaacgcttactggttcccataaacattgtagatgtaaggaagggtaccagggagttcgctgcgatcagtttttgcccaagactgacagtatactttccgacccgacagaccacctgggcatcgaattcatggagtccgaagaggtctatcagagacaagtcctgtccattagttgtatcatattcggcattgtgatagtcgggatgttctgcgctgctttctatttcaagagtaagaagcaggccaaacagattcaggagcaacttaaagtgccccagaatggaaaaagttatagtctcaaggctagctctacaatggccaagtctgagaacttggtgaagagtcacgtgcagctgcagaactacagcaaggtggaacgccacccagtgacagctctggagaaaatgatggagtcaagctttgtcggcccacagtcatttcctgaggtaccatctcctgatagggggtcccagtccgtgaaacaccacagaagcctgtcatcatgctgcagtccagggcagaggtccgggatgctccatcgcaatgcatttagacgaacaccgccttcacccaggtccagactggggggaatcgttggacctgcctaccagcagctcgaggagtcccgcataccagatcaagatacgatcccttgccagggtattgaggtcaggaagaccataagccatctgcccattcagttgtggtgtgtcgagcgccctctggatttgaaatatagtagctctggcctcaaaactcagcgaaataccagtatcaatatgcagctgccaagtcgggagaccaatccatactttaactccttagaacagaaggacctggtgggatattcatcaactcgggcttccagcgtcccaattatcccatcagtgggtcttgaggaaacctgcttgcagatgcctggcattagcgaggtgaaatccatcaaatggtgcaaaaactcttacagtgccgacgtggtcaacgtgagtattccagtctccgactgcttgatcgccgagcaacaggaggtaaaaatactgcttgagactgtccaggagcagatccgcatactgacggacgccagaaggtcagaggactacgagctcgccagtgtcgaaacagaagattctgcatccgaaaatactgcctttctcccactcagtcctaccgccaagagtgaacgcgaggcgcagttcgtgctgagaaatgaaatccagagagactcagcgctgaccaaatag

SEQ ID NO: 232281 - DNA, 2088 bp, synthetic construct
  misc_feature 1..2088: note = Description of Artificial Sequence: Synthetic coding sequence
  source 1..2088: mol_type = other DNA
atgagcgagggggctgcagcagcctccccccctggggcagcatctgcagctgccgcatctgctgaagaggggacagcggctgccgcagcggctgctgcggcagggggtggacccgacggcggaggcgagggagcagccgagcctccccgagaattgcggtgctcggactgtatcgtctggaatcgccaacagacctggctatgcgttgtgccactcttcataggatttattgggcttggcctcagcctaatgctgctcaagtggatcgtcgtgggcagtgtcaaggaatatgtgcctacagacttggtggatagcaagggcatgggccaggaccccttttttctgagcaagcccagtagttttccaaaagccatggaaactactaccaccaccacgagcactactagtcctgcaactcctagtgcgggaggagctgcatctagccggacaccgaaccgaattagcactagactaacaacaatcacccgggctcccacacgatttcccggtcacagggtccctatacgcgcaagtccacggtcaaccacagctaggaataccgccgcacccgcaacagtcccttccaccacagcccctttcttttcaagctctacgctgggatccaggcccccagttccaggtacaccctccactcaggcgatgccatcctggcctacagctgcttacgccacatcttcctatctgcatgatagcacgccttcatggacactcagcccttttcaggacgcggcttctagctcatcttcatcatctagttctgctactactaccacacccgaaacctctaccagccctaagttccacacaactacctacagtaccgagaggtccgaacactttaagccctgtagagacaaggatttggcttattgtctcaatgatggtgagtgcttcgtgatagagactcttacaggatctcacaaacactgccggtgcaaggagggctaccagggtgtgagatgcgaccagttcttgcccaaaaccgacagcattttaagcgatccaacgcacatcggtattatattcaccgagagtgaagaggtctaccagcgtcaggtgctgtctatcagctgcatcatctttggaatcgtcatagtgggtatgttttgtgctgctttctattttaaatccaagaaacaggccaagcagatccaggagcagctaaaggtgccccagaatggcaagtcttattccctgaaggcctcaagtacgatggctaaatccgagaacttagtgaagagtcatgtgcaactgcaaaactacagcaaagtggagcgacatcccgttacagctcttgagaagatgatggagagctcttttgtcggcccacagtcttttcccgaagttccgtcgcccgacagagggagccagtcagtcaaacaccataggagcctcagctcatgttgttctcctggccagcggtcgggaatgctgcaccgcaatgccttccgcaggactcccccttctcccaggtcgcggctgggaggaattgtggggcctgcatatcagcaacttgaggaatctagaatccccgatcaggataccataccctgtcagggttactccagtagcggactgaagactcagcgaaatacttccatcaatatgcaactaccatccagggagacaaacccatattttaattctctggaacagaaagatttggtaggctactcaagtactagagcgtctagcgtgccgatcatcccctcggtgggactcgaggagacttgtctgcagatgcctggcatcagcgaggtgaaaagcattaagtggtgcaagaattcatactctgctgacgtggtgaatgtgtcaatccccgtctcagattgcttgattgctgagcagcaggaggtgaaaattctcctcgagaccgttcaggagcagataaggattctgacagatgcccgacggtccgaggactacgagctcgcttccgttgagacagaagactcagcctccgagaataccgccttcctgcccctctcaccaactgccaaatccgagcgagaagctcagttcgtgcttcgcaatgagatacagagagacagtgcactaaccaagtag

SEQ ID NO: 232282 - DNA, 1041 bp, synthetic construct
  misc_feature 1..1041: note = Description of Artificial Sequence: Synthetic coding sequence
  source 1..1041: mol_type = other DNA
atggagtcagaagaggtgtatcagcgacaggtgttatcaatcagctgtattatcttcgggattgtgattgtgggcatgttttgcgctgcattctatttcaaatcgaaaaagcaggcgaagcagatccaggaacaattgaaggtgcctcagaacggcaagtcttatagtctcaaggcgagttctaccatggctaagtcagagaacttagtgaaaagccatgtacagcttcagaactatagcaaagttgagcgacatccggtgaccgccctcgagaaaatgatggagtctagtttcgtcggccctcagagtttccccgaggtgcccagcccagacaggggttctcagagtgtgaaacaccataggtcccttagcagttgctgcagccccggtcaacgatctggaatgttacataggaatgctttcaggcgcacgccgccatctcctaggagccggcttggcggtatagtgggccctgcttaccagcagctggaagagagcaggatccctgatcaggacaccatcccttgccaagggtacagcagttcagggttgaagactcaacgaaataccagcatcaacatgcagctcccatccagagaaactaacccgtatttcaatagcctggagcagaaagacctggttggctatagcagcacccgagcctctagcgttccaataatcccatccgtgggtctggaagaaacatgtctgcagatgccaggaataagcgaagttaagtctattaaatggtgtaaaaactcatattcagcagacgtcgtcaatgtgagcatacccgttagcgactgtctcatagccgaacagcaagaagttaagattctgctggagaccgtccaagaacaaattagaattctgactgatgcacggaggagcgaggactatgagttggccagtgtcgagactgaggattcagcttcagaaaatacagcatttctgccactgagccccaccgcaaagagcgaacgagaagcccaattcgttttgcgtaacgagattcagcgcgacagcgctctgaccaagtag

SEQ ID NO: 232283 - DNA, 1041 bp, synthetic construct
  misc_feature 1..1041: note = Description of Artificial Sequence: Synthetic coding sequence
  source 1..1041: mol_type = other DNA
atggagtccgaggaggtgtaccaaagacaggtcctgtccataagctgtattatatttggcatcgttatcgttggaatgttctgcgcagccttctatttcaaatcaaaaaaacaggccaagcagatccaagagcaactgaaagtgcctcagaacggcaagagctacagtctgaaagcatcatctaccatggcaaaatcagagaatctggttaagtctcacgttcagctccagaactacagcaaggtcgagcgccatcccgtaactgctctggagaagatgatggagtcttctttcgtcgggccacagagttttccagaagtaccctctccagatcgcggaagccaaagtgtgaaacatcacagatccctgagcagctgctgttcccctgggcagagatctgggatgcttcaccgcaacgctttccgacggacgcctccttcacctaggtcacgacttgggggtatagtgggcccagcttaccagcagctggaagagtctagaattccagatcaggacacaatcccttgccaaggctattcctcatccggattaaagacacagagaaacacttcaatcaacatgcaactacctagcagggagacaaacccatattttaattctctggagcagaaagaccttgtgggctactctagcacacgcgcttcttcagtacctattattccgtcagtcgggctggaggagacttgcctacagatgccaggtatcagcgaggtgaaaagcatcaagtggtgcaagaactcctattctgcagacgtggttaacgtgtctatccccgtcagcgattgcctgatagccgagcagcaggaggtgaaaatccttttggagactgtccaggagcagataagaattctcacggacgccagaaggtccgaggactacgagctcgccagcgtggaaacagaggatagcgcttcggagaacaccgcttttctgcctttaagtccgaccgccaaatccgagcgggaagcccagtttgtgctgcgcaacgaaatccagcgagatagcgcattgacaaaatag

SEQ ID NO: 232284 - DNA, 171 bp, synthetic construct
  misc_feature 1..171: note = Description of Artificial Sequence: Synthetic coding sequence
  source 1..171: mol_type = other DNA
atgcccacagatcatgaagagccatgcgggccatctcataaaagcttttgtctgaacggcggactttgctacgtcatcccaacaatcccaagccctttctgttcactacacgagaacgagaatgataacaacgaggatctttacgatgatcttctacctcttaacgagtag

SEQ ID NO: 232285 - DNA, 348 bp, synthetic construct
  misc_feature 1..348: note = Description of Artificial Sequence: Synthetic coding sequence
  source 1..348: mol_type = other DNA
atgcctactgaccacgaagagccgtgcggaccctcccataagtcgttctgtctgaatgggggactatgttacgtgattccaaccattcccagcccattctgccgttgtgtggaaaattacacgggagcccgttgtgaggaagtgtttctaccaggaagcagcattcagaccaagtccaacttatttgaagctttcgtggcgctggctgttttggtcaccctgatcatcggcgcattctacttcctgtgccgaaaagggcactttcagcgggcttcttccgtccaatacgacattaatctggttgaaacaagttctaccagtgcgcaccactctcacgagcagcattag

SEQ ID NO: 232286 - DNA, 273 bp, synthetic construct
  misc_feature 1..273: note = Description of Artificial Sequence: Synthetic coding sequence
  source 1..273: mol_type = other DNA
atgcccaccgatcatgaggaaccctgcggcccatctcacaaaagcttttgcctgaacggcggattgtgttacgtaatacctaccatcccctctcccttttgccggtgcgtcgagaactacactggcgctagatgcgaggaggttttcttgcctggctcctctatccagacgaagtctaacctgtttgaggctttcgtagctttagccgttctggtaacactgattatcggcgcattctatttcctatgtcgctgcgggaacacctgcatgtag

SEQ ID NO: 232287 - DNA, 615 bp, synthetic construct
  misc_feature 1..615: note = Description of Artificial Sequence: Synthetic coding sequence
  source 1..615: mol_type = other DNA
atgatgcctagctgtaaccgctcttgctcctgctcacgaggaccgagtgtggaggacggaaagtggtacggcgtgcgttcatacttgcacctattttacgaagattgcgcaggcactgccctcagtgatgatccagagggtccccctgtgctttgtcccaggcggccttggccaagtttgtgttggaagatttcactttcgtctggcaccctgttgctgttgttgggtgttgccgcactcacgaccgggtacgccgtgccccctaaactggaggggataggtgaaggcgaatttctcgtgctggatcagcgcgcagcggattacaaccaagctctgggcacctgccggctcgccggaaccgccctgtgtgtggctgccggagtcctcctcgccatctgtctgttttgggccatgatcggctggttatcgcaagacaccaaggctgagcccctggacccggaagcagactctcatgtcgaggtctttggagacgaacccgaacagcagctgtcaccaatcttccgtaatgcatcagggcagtcatggttttcaccacctgcatctccgtttggacagtcaagcgtgcagaccatccagcctaaaagggattcctag

SEQ ID NO: 232288 - DNA, 615 bp, synthetic construct
  misc_feature 1..615: note = Description of Artificial Sequence: Synthetic coding sequence
  source 1..615: mol_type = other DNA
atgatgccctcttgcaaccgcagctgctcgtgctcacgcggacctagcgtggaagacggaaaatggtatggcgttaggtcttacctgcatctcttctacgaggattgcgcagggaccgcattgtccgacgatcctgagggacccccagttctgtgccccaggagaccttggccctcgttatgctggaaaatttcactctcctcagggacgcttcttctgctcctgggcgtggcagccttgaccactgggtacgctgtgccgccaaaattggagggaattggagagggcgaatttctcgtcctcgatcagcgggcagcagactacaatcaggctctgggcacatgtaggttggccggaacagccctgtgcgtcgccgcaggagtgttactggctatatgcctattttgggctatgattggctggttatcgcaggacaccaaggccgaacctctggatcctgaggccgactcccatgtggaggtcttcggggacgagcccgagcagcaactcagccccatattccgcaacgcttccggacagtcctggttttctcccccagccagcccctttggtcagagtagcgtgcagaccattcagccaaagagggattcatag

SEQ ID NO: 232289 - DNA, 1329 bp, synthetic construct
  misc_feature 1..1329: note = Description of Artificial Sequence: Synthetic coding sequence
  source 1..1329: mol_type = other DNA
atgtatcaaaggatgttacggtgcggggctgaactggggtctcccggaggcggtggcggtggaggtgggggtggcggagccggtggcaggctcgctttgctgtggatagtccctctaacgctatccggtctactgggcgtggcctggggagcctcctccttaggggcacaccacattcatcatttccacggttctagcaagcaccactctgtgcccatagctatttaccggtcacctgcgagcttacgaggaggacacgccggaaccacttacatctttagtaaaggaggtgggcagatcacgtacaaatggcccccaaatgacaggccttccacccgagcagatcgcctcgccattggcttttcaacagtccagaaggaagcagtgctcgtccgggtagattcaagttccggcttgggagattatctagagctccacatccatcaaggcaagatcggcgtgaagtttaacgtagggactgacgacatcgcgatcgaagagtccaacgctattattaacgatggaaaataccacgtggtgaggtttacccgatcagggggtaacgcaaccttacaggtggattcctggccagttattgagcggtatccagccggaaggcagcttaccattttcaattcccaggctacgattattattggaggaaaagaacaggggcagccgttccagggtcaactctccggcctttattataatggtcttaaggtgctgaacatggccgctgagaacgatgccaatatagccatagtaggcaatgtccggctcgtcggtgaagttccatccagcatgacaaccgagtctacagcgaccgcaatgcagagcgagatgagtacaagcatcatggagaccacaacgacactggcaacatctactgctcggaggggaaaaccgcctaccaaggagcccatttcacagacaacggacgatatcctggttgcatcagccgaatgcccttccgacgacgaggatatcgacccctgtgagccttctagcggcggactggccaaccccacgagagcaggaggcagagagccctatcctgggtccgccgaagtgattagagaaagcagctccacgacagggatggtggttggtattgtcgcggctgcagccctctgcatccttatcctattgtatgcaatgtataagtaccgcaatagggatgaaggaagctaccacgtggatgagagccgtaactatatcagcaattccgctcagagcaatggagctgtggtaaaagaaaagcagccctcttctgctaaatcctcaaataagaacaagaagaataaggacaaagagtactatgtgtag

SEQ ID NO: 232290 - DNA, 4524 bp, synthetic construct
  misc_feature 1..4524: note = Description of Artificial Sequence: Synthetic coding sequence
  source 1..4524: mol_type = other DNA
atggggaccgctctcttgcaacgagggggttgttttctcctatgtctgagcctgttgctcctgggatgttgggctgaacttgggtccggcctcgaatttcctggggcagaggggcaatggacccggtttcctaaatggaacgcttgctgtgagtcggaaatgtcttttcagctgaagacccggtctgcccgtggattggtgctgtatttcgacgatgaaggattttgcgattttcttgaactaatattaacccggggagggcgtttgcagctatcctttagtatcttttgtgccgaacccgctacactcttagcagataccccagtgaatgatggggcttggcactctgttagaatcagaagacaatttagaaatacaacgctgttcatcgatcaggtggaggcaaaatgggtggaagtaaagtcaaagagaagagatatgacggtgttttccggcttattcgtaggtggactgcctcctgagctcagagcagccgcactcaaactaacactagcctccgtgcgggaaagagagccgttcaaagggtggatccgggacgttagagtgaacagttcccaggtcctgccagtggattccggcgaagtaaagctggatgacgagcctcccaattccggcggtggctctccctgcgaagctggcgaggaaggtgaagggggagtgtgtctgaatggaggagtgtgttctgttgtggacgaccaggctgtctgtgactgttctaggacgggattccgcggaaaagactgctcacaggaggataacaacgttgagggacttgcgcacttgatgatgggtgaccagggaaagagtaagggcaaagaagaatatatcgctacatttaagggatcggaatacttctgttatgacctgtcacagaatcctatccagagcagtagcgatgaaataactctcagctttaagacgctccagaggaatggactgatgctccacacaggaaagtccgccgactatgtcaatctggcccttaagaacggggctgtgtctctggtcattaatttggggagcggcgcatttgaggccctagttgagcccgtgaatgggaagttcaatgataacgcctggcatgacgtcaaggtgacacggaacctgagacagcatagcgggattggtcatgcaatggttacaattagtgtcgacggcatcctcactaccactggctatacacaggaagactacaccatgcttgggagcgacgatttcttttatgtgggaggaagtccgtctacggcagatctgccaggcagtcccgtctctaacaatttcatggggtgcctgaaggaggtggtctacaaaaataatgatgtcagactggagctatcccggcttgccaagcaaggcgatcccaaaatgaaaattcacggagtggtggcgtttaaatgcgaaaatgtggcgaccctggaccccatcacattcgagacgccggaatctttcatctctctgcctaaatggaacgccaagaaaaccggaagcattagcttcgatttcaggaccactgagcctaacggtctgatcctattttcccacggtaagccgaggcatcaaaaagatgctaaacatcctcagatgatcaaagtggacttcttcgcaatcgagatgctcgacggccacctgtacctcctcctcgacatgggctctggcaccattaagataaaggctttgttgaaaaaggttaacgacggggaatggtaccatgtagactttcagagagatggacgctccggaacgatatctgtgaacaccctccgcacgccatatacagcgcctggcgaaagcgaaatccttgacctggacgatgagctttatctgggcggattaccagagaacaaagctggattagtgtttccaaccgaggtgtggacagcgttgcttaattatggctacgttgggtgtattagagatctctttatagatggccaaagcaaagacattcgccaaatggccgaagtgcaatcaacagcaggagtgaagccatcttgtagcaaagagactgccaagccgtgtctgtcaaatccttgcaagaataatggaatgtgcagggacggttggaacaggtatgtctgtgactgttccggtaccggatacttggggaggtcttgcgagagagaagcaacagttctgagctatgatggcagcatgtttatgaagatacagttaccagttgtgatgcacacggaagccgaagatgtttctctcaggtttagatcgcaacgagcatatggtattctaatggcaacaacttccagggatagcgccgacactcttcggcttgagctcgatgccggaagggtgaaactaacagtcaacttggattgcatccgtatcaattgcaactcatccaagggtccagagacattgtttgccggatacaatctgaacgacaacgagtggcatacagtgcgggtagtgagacgaggaaaaagccttaagctgaccgtggacgatcagcaggccatgaccgggcagatggctggggaccatactcggttagagttccacaatattgagaccggtattattacagagcgacggtacctgagtagcgtcccctctaactttattggacatttgcaaagcctcacatttaacggtatggcttatatcgacctgtgcaagaatggggacattgactattgtgagctgaacgcgcgattcggattcaggaatatcatagccgatccagtgaccttcaaaaccaaaagtagctacgttgcactggcaactctgcaggcatacacaagtatgcacctcttctttcaatttaaaaccacttctctggacggcctcattctgtacaattcaggtgacggaaacgattttatagtggtcgagctggtcaagggttatcttcattacgtatttgatctcggcaatggtgccaatctcatcaagggcagctccaataagcccctcaacgacaaccaatggcataatgttatgatttctcgggatacgtctaacctccacaccgtcaagatagatactaaaatcactacccaaatcaccgccggtgcccgaaatcttgacctcaaaagcgacctttatatcgggggtgtggcaaaggagacttacaagtctcttccaaagctggtccatgccaaagagggcttccaggggtgtctagcctctgtcgaccttaatggcaggcttccagacttgattagcgacgcactgttttgcaatggccagatcgagcggggttgtgaaggaccatccactacttgccaggaggatagttgctcaaatcagggagtgtgccttcagcagtgggatggattctcctgcgactgttcgatgacatcgttctcagggccactgtgtaatgatcctggcaccacatatatcttttctaaagggggaggccagatcacgtataagtggcccccaaacgacagaccatcgactagggccgaccgtttagctatcggcttcagcaccgtgcagaaggaggcagtactagttagagtagatagctcatccgggctgggggactaccttgaactacatatccaccaggggaagattggggtgaagtttaatgtggggacagatgacatcgccatcgaggaaagcaatgccatcatcaatgacggaaagtaccacgttgttcggttcacaagatccggagggaacgctactcttcaggtcgatagctggcctgttattgagcgctatcctgctggaaacaatgacaacgaaagacttgccattgcgagacagcggattccctaccggctggggagggtggtcgacgagtggcttcttgacaagggtcgccagctcactattttcaattcccaggccactatcattattggcggaaaggagcagggccaacccttccagggccagctcagcgggctctactataatggactcaaggtgcttaatatggctgcagagaatgatgcaaatatcgcgatagttggtaacgttaggctggtgggcgaggttccatccagtatgacaacagaatccacggccactgcgatgcagagcgaaatgagtacttcaatcatggagacaactaccaccctggcgacctccacagctagacgcggaaagccaccaaccaaagaacccatctcccagaccacagacgacattctggtggcctccgcggaatgtccctctgatgacgaggacatagatccatgcgaaccaagttcggggggattggctaatccaaccagagccggaggtcgagagccgtaccccggtagtgccgaggtaatacgagagtcgtcctctacaacgggcatggtcgttggaattgtggcggctgccgctctgtgtatcttgatcctcttgtacgccatgtacaagtacagaaatcgcgacgaggggagttaccatgttgatgagtctaggaactatataagcaattccgcccagtccaatggagccgtggtgaaagagaagcagccctcgtctgccaagagttcaaataaaaacaaaaaaaacaaagacaaggaatactacgtttag

SEQ ID NO: 232291 - DNA, 1488 bp, synthetic construct
  misc_feature 1..1488: note = Description of Artificial Sequence: Synthetic coding sequence
  source 1..1488: mol_type = other DNA
atgatatccagagatactagcaacctgcataccgttaaaatagacaccaagattacaacgcagatcacggccggagcaaggaatctggaccttaaatccgacctatatatcgggggtgttgccaaggagacttacaaaagcctgccgaagttagtccatgctaaggagggctttcagggctgtttagcatccgtcgaccttaatggcaggcttcccgatctgatttccgacgcactgttttgtaacggacagatagagcgcggttgtgaggtcgccttgatgaaagctgatcttcaggggccatcgaccacatgccaggaggacagttgcagtaaccagggggtttgcctccagcaatgggatggcttctcatgcgactgttcaatgacctcattctccgggccactctgtaacgaccccggaacaacgtacatcttcagcaagggcggaggacagatcacctacaaatggccccctaatgaccgaccatcaactcgagccgaccgcctggctatcggtttctctaccgttcaaaaagaggcggttttggtgagagtagattcaagctctggtctgggcgactacctggagctgcacattcaccaggggaaaatcggcgttaagttcaacgtgggcacagatgacatagcaatcgaggaatccaacgccattatcaacgacgggaagtaccacgtagtccgcttcacgcgctccgggggtaacgctaccttgcaggtggacagttggccagttatcgagagatatccggctggcaggcagcttactatctttaattctcaggccacaatcatcatcgggggtaaggagcaagggcagccctttcagggacagctctcaggcttatactacaacggcctcaaggtgttaaatatggcagcggaaaatgatgctaatatcgctattgtcggcaatgtccgcctagtcggtgaggtgccatcctcgatgactaccgaaagcactgccacagccatgcaatcggagatgagcacatctattatggaaacaactaccacattggctacctcaaccgcaagaagaggaaaaccacctaccaaggagccgatctcccaaacgactgacgatatcctggtcgcttctgctgagtgcccttctgacgatgaagatatcgacccttgcgagccatcctcaggagggctagcaaacccaacgcgtgccggtggtagagagccctaccccggttcagccgaagtgatccgcgagagctctagcacaacaggcatggtggtggggatcgtcgctgcggctgccctgtgtattctgattttgctctatgccatgtataagtatcgcaaccgtgatgagggctcctatcacgtggacgaaagcagaaattacatctccaattctgcccaaagcaacggagccgtcgtgaaggagaaacagcccagctccgccaaaagcagcaataaaaacaaaaagaataaagataaagaatactacgtttag

SEQ ID NO: 232292 - DNA, 4500 bp, synthetic construct
  misc_feature 1..4500: note = Description of Artificial Sequence: Synthetic coding sequence
  source 1..4500: mol_type = other DNA
atgggtactgcattactgcagcgtggcggatgctttctgctgtgtctctcgctcctactgctgggttgttgggccgagctgggatccgggttggaattccctggggcagaaggtcagtggacgcgatttcctaagtggaacgcctgttgcgaatccgagatgagtttccagcttaagacaaggtcggctcgcggactcgtcttgtactttgatgatgaagggttctgcgattttctggaactgattttgacgaggggagggcgactccagctcagcttttctatcttctgtgcagaaccagctacactgcttgccgatactcccgtcaatgacggtgcctggcatagcgtgaggatcaggaggcagtttaggaacaccacactgtttatagatcaagtcgaagccaagtgggtcgaagtcaaaagcaagaggcgtgacatgaccgtgttttccggtcttttcgtggggggactgcctcccgaattgcgagccgcagcactgaagctgacattagcctctgtgcgcgaacgcgagccgtttaaaggttggattcgggatgtcagagtgaatagctctcaggtgcttccggtcgacagcggggaggtgaagctggatgacgagccaccgaactcggggggtggttcgccgtgcgaagccggtgaagagggcgaagggggagtatgtctcaacgggggagtttgcagtgttgttgatgatcaagctgtatgcgactgctctagaacaggatttaggggaaaggattgctcgcaggctgacaccaatctggaaggtctggcgcaccttatgatgggagatcaggccaagtctaagcggaaggaggagtacattgcaacttttaaggggtctgagtatttttgctacgatctctcgcagaacccaatacaaagctcaagtgatgaaattacgctgagctttaaaaccctacagcggaacgggctcatgctgcacaccgggaagagcgctgactatgtgaatttagcattgaagaacggcgctgtgtctctcgtgattaacctaggctcaggagctttcgaggcactggtagagcccgttaatgggaagttcaatgataatgcgtggcacgatgtcaaggtgactagaaacctgagacaggtcacaatcagcgttgacggcatcttgaccaccaccggctacacacaggaagattataccatgctggggtccgacgactttttctacgtagggggaagtccttccacagcggacctgcccggttccccagtgtcaaacaactttatgggttgcttgaaggaagtggtatacaagaacaatgacgttaggctggagttgagtcgtcttgccaaacagggggatcccaagatgaaaatccacggagtcgtagcctttaaatgtgagaatgtggccacactggaccccataaccttcgagactcccgaaagcttcatctctctgccaaagtggaacgccaagaagacagggtcgatatcatttgacttcaggactaccgaacctaatggcttgatactgttctctcatggtaagccccgacatcagaaggacgctaagcaccctcagatgatcaaggtcgatttctttgccatcgaaatgcttgacgggcacctgtaccttttacttgatatggggagcgggaccattaagatcaaagccctgctgaagaaggtcaatgatggcgagtggtaccacgtggacttccaacgagacggacgatctggcacaatcagcgtgaatacattgaggacgccatatactgccccaggtgagagcgagattctcgatctcgacgacgaactttatctcggtggattgcccgagaacaaggccggtcttgtcttccccactgaagtatggacagccttattaaattacggttatgttggatgtatccgcgacctttttatcgatggacagtcgaaggacatacgccagatggccgaagttcagtctacggccggagtcaagccctcttgctctaaagagaccgccaaaccctgcctgagcaacccctgtaagaataacggtatgtgtcgtgacggatggaaccgatatgtatgcgactgtagcggcactggctacctcggcagaagttgcgagagagaggctactgtgctctcatatgatgggagcatgttcatgaagattcagctgccggtggtcatgcacactgaagccgaggacgtgagcctgcgttttcggagtcagcgggcttacggcatcctgatggccacaacatcacgcgattcagccgacaccctgaggctcgagcttgacgccggacgcgtcaagctgacagtgaatctggactgcatacgcataaattgtaacagcagtaaaggcccagaaaccctgttcgcgggttacaatttaaatgataacgagtggcacacagtgcgagtcgtacggcgaggcaagagcctaaagcttacagttgacgatcagcaagcgatgaccggacagatggccggagatcacacgaggcttgagttccataacatcgagactggcataatcacagagcgccgatatcttagctctgtgccatccaacttcatcgggcatctccaatctcttacgttcaacgggatggcttacatcgatctctgtaagaacggggacatcgactactgtgagctaaacgctaggttcggattcaggaatatcatcgctgaccctgtcacattcaaaaccaagtcctcctacgtggcactcgccacactgcaggcgtacacatctatgcacctgtttttccaatttaaaaccacaagcttagacggacttattctgtacaactccggggatgggaacgacttcatcgtcgtggagctggtcaaggggtatctccactacgtattcgacttgggaaacggcgctaacctgatcaaaggcagcagcaataagccgctgaatgacaaccagtggcacaacgtaatgatctcccgggatacatcaaatctccacactgtgaagattgacactaagatcacgacccagatcacagctggcgctagaaacttagacttgaagagcgatctctacattggtggggtagctaaggaaacctataaatccctacccaaactagtgcacgctaaagagggatttcagggctgtttagccagcgtcgacctaaatggcaggctgccagacctgataagcgatgcgctgttttgcaatggccaaattgagcgcggatgcgagggcccaagcaccacatgccaagaagactcttgttccaatcagggtgtctgcctgcaacaatgggatggtttctcatgtgactgttcaatgaccagcttctctggacctctgtgcaacgaccccggtactacatacatcttttccaagggtggaggtcagataacatacaagtggccgccaaatgaccggccatcaacgcgtgccgaccggctagcaattgggtttagtacagtccagaaagaagctgtgctggtgagagtggattcttcttcggggctaggggattacctggagttgcatatccaccagggcaaaatcggggtgaagtttaacgtggggacagacgatattgccatcgaggaaagtaatgcaattataaatgatggcaagtaccatgttgtgcgcttcacacgcagcggaggtaatgccaccctgcaggttgactcctggccagttatcgagagatatccagccggaaacaatgataacgagcgtctggcgatcgccaggcaacggattccatatagactaggacgcgttgtcgacgagtggctccttgacaaaggtcggcaactgaccatttttaactcacaggccaccatcatcattggcggaaaagagcagggccaaccctttcagggacaactgagcggattgtactataatggtctgaaagtgctgaatatggccgcagaaaacgacgcaaatatcgccattgtgggtaatgtgagattggtcggcgaggttcctagcagcatgactactgaatcgacagcaactgccatgcaatcagagatgtctacatcaatcatggaaacaactacaacacttgccactagtactgcaaggcgaggcaaaccacccacgaaggagcccatctcacagacaactgatgatatcttagtggcatcggctgagtgcccgtcggacgacgaagatattgacccatgcgaaccgtccagtggaggcctagccaaccctacaagagctggaggcagggagccatatccaggcagcgcagaagtgatcagagaatcatccagcaccaccgggatggtggtcgggatcgtcgccgctgcagcgttgtgtatccttatccttctctacgcgatgtacaaatataggaacagggatgagggctcctatcacgtcgacgaatcgcggaattacataagcaattccgctcagagcaacggtgccgtcgtcaaagaaaaacagccttcatccgcgaagtcctctaacaagaacaagaagaacaaggataaggagtactacgtgtag

SEQ ID NO: 232293 - DNA, 4644 bp, synthetic construct
  misc_feature 1..4644: note = Description of Artificial Sequence: Synthetic coding sequence
  source 1..4644: mol_type = other DNA
atggggacagcactgctgcagaggggcggttgtttccttctctgtcttagtttgttactcctgggctgttgggctgaactggggtcagggttagagttccccggagccgagggccaatggacgcgctttccaaaatggaacgcttgctgcgagtctgaaatgtcattccagctcaagacgcgtagcgcccgaggcttggtgctatattttgacgatgagggcttttgtgactttctagagctgattctgacacgtgggggtagattacagctgtctttctcgatattctgtgccgagccagccaccctgttagcagacactccagtgaatgatggcgcttggcactctgttcggattagacgccagtttagaaatacaactctgttcatcgaccaagtggaggcaaaatgggtcgaggtcaaatctaagcgcagggacatgaccgttttcagcggcctcttcgtgggcggtttgccccctgaactccgagccgctgctctgaaacttaccctggcatccgtacgggagcgtgagccattcaagggctggatccgagatgtgcgggtaaatagctcccaggtgctgcccgtggactcaggcgaagttaaactggatgacgaacctccaaatagcggcggagggagcccatgcgaggcgggagaggaaggcgaggggggagtgtgtctgaatggtggggtttgcagtgtcgtagatgaccaggctgtgtgcgactgcagccggacaggctttagggggaaagactgcagtcaagagattaaattcggcttgcaatgcgtgcttcccgtactgctgcacgacaacgaccaaggtaagtactgctgtataaatacggctaagcccctcacggagaaggacaataacgtcgagggcctcgctcacctcatgatgggagatcaaggcaaatccaagggaaaggaggaatatattgctactttcaaagggagcgaatatttctgttatgatctctcacagaaccccatccagtccagttctgacgagataactttgtcgttcaagactcttcaacggaatggcctaatgctgcacaccggcaagtcagctgactacgtgaatttggcgctgaagaacggagccgtgagcctggttattaatttgggatcaggggctttcgaagccctagtggagccggtgaacggaaagttcaatgacaatgcttggcacgacgtgaaggtgacccggaatctccgacagcattctggcatcggccatgccatggtgaataaacttcactgctccgtgaccatttcagtggacgggattctgaccaccaccggctacacacaggaggactatactatgctgggcagcgacgattttttttacgtgggcggttctccatcaacggctgatctacccggaagcccggtgagcaacaatttcatgggatgccttaaggaagtagtctataaaaataacgacgtgcgattagaactgagcagattagccaaacagggagaccctaaaatgaaaatacacggcgttgtggccttcaaatgtgaaaatgtggccacactggaccccatcaccttcgaaacccctgagagcttcatcagcctgccaaagtggaacgcaaaaaaaacaggctccatctcttttgatttcagaacaacagagcctaacggtctgatcctgttcagccacggcaagcccagacaccagaaggacgcgaaacacccccagatgatcaaggtagattttttcgcaattgaaatgctggatgggcacctctacctcctcttggacatgggaagcggcaccatcaaaataaaagcactgcttaaaaaggtaaatgatggtgagtggtaccacgtggactttcaaagggatgggagaagcggcacgatcagtgtgaatacactccggaccccctacaccgcaccgggtgaatctgaaatactggacctggacgacgagttgtatctggggggactgcccgaaaacaaagccggtctggtgtttccgacagaagtgtggacggcattactgaattatggatacgtgggctgcatcagagatctgtttattgacggccaatcgaaggatattagacaaatggccgaagtacaatccacggctggggtgaaaccctcctgctctaaggaaacagctaagccctgcttgtctaatccatgcaagaacaacggaatgtgtcgggatggctggaacaggtacgtctgtgactgctccggaactgggtacttagggagatcatgtgaaagggaggctacagtgttgagctacgatgggtctatgtttatgaagattcagctgcctgtagtcatgcacaccgaggccgaagatgtcagtttgcggttcaggagtcagagagcctacggaattcttatggccactacaagcagagattccgccgacacccttaggctcgagttagacgctggaagagtgaagctgaccgtgaacttagactgtattcgtattaactgtaattcctccaaaggcccagaaacccttttcgccggatacaatctgaatgacaatgaatggcacacggtacgtgtagtgaggcgaggcaagagccttaagcttactgttgacgaccagcaggccatgaccggacagatggctggagatcacacgaggctggaatttcacaacatcgaaaccggcatcatcaccgaacgccgatatctgagcagtgtgccttctaacttcattgggcacctgcaatccctgactttcaacgggatggcatatatcgacctttgcaagaacggcgacatcgattactgtgaattgaatgcacggttcggctttagaaacatcatcgccgatccggtgactttcaaaaccaagtcatcttatgtggcattggctaccctgcaagcctatacgtccatgcacctgttctttcagttcaagactacaagcctggacggactcattctatataactctggcgacggtaacgacttcatcgtcgtcgaactggtgaaaggttacctacattacgtctttgatttgggcaacggggcaaatctaatcaagggctccagtaataaacccttaaacgacaaccagtggcacaatgtgatgatctctagagacacttctaatctgcatacggtaaagatcgatacgaagattacgacacagatcacagcaggggcaagaaatctggaccttaagtctgatctttatattggaggcgtggccaaagaaacatacaaatccttaccgaagttggtgcatgccaaggaagggttccagggatgcctggccagtgtagaccttaacggcagactcccagacttgatctccgatgcactgttctgcaatggacaaattgaacgcggttgcgaaggtcctagcaccacgtgccaagaggatagttgtagtaatcagggggtatgcctgcagcagtgggatgggttctcctgcgactgctctatgacaagcttttccgggccactgtgtaacgatcctggaactacctatatcttctccaagggaggaggtcaaataacgtacaagtggcccccaaacgatcgccctagcacgagagctgaccgactggctatcggatttagcaccgtgcagaaagaggctgtgcttgtgcgtgtcgatagctccagtgggcttggcgattatctggaattgcatatccatcagggtaagataggcgtcaagtttaacgtaggtacagacgacatcgccattgaagagtcaaatgccattatcaacgatggtaaataccatgtggtgaggtttacaagaagcggcggtaacgctactctgcaggtggactcctggccagtcattgagcggtatcccgctggtaataatgacaacgaacggctcgctatagcaaggcagcgcatcccatatcggctgggtcgggttgttgatgaatggctcctggataaagggaggcagttgacaatcttcaattctcaggcgacgatcatcattggaggcaaggagcagggccagccctttcaaggacagttatcaggcctctactataatgggttgaaggtccttaatatggccgctgaaaacgatgccaacattgccattgtggggaatgtgcgattggtcggtgaggttccttcctccatgaccacggagtctacagccaccgcaatgcagtccgaaatgagtacatcgattatggagaccaccacaaccctggccacctccacagctaggcggggaaaacctcccaccaaggagcccatctctcagacaacagatgacattctcgtggcatctgccgagtgccctagtgatgatgaggacattgatccctgcgaaccgtcctcagggggacttgcaaatcccacacgcgcaggcggaagggagccttatccagggtctgccgaagtcatacgcgagagtagcagcactactgggatggttgtcgggattgtggcagctgccgcactgtgtattctaatcctgctgtacgcaatgtacaaatatagaaacagagatgagggctcttatcacgtggatgaatctagaaattacatcagcaatagtgcacagagtaatggcgctgtggttaaggagaagcagccaagttctgccaagtcctctaataaaaataaaaaaaacaaggacaaggagtattacgtgtag

SEQ ID NO: 232294 - DNA, 4434 bp, synthetic construct
  misc_feature 1..4434: note = Description of Artificial Sequence: Synthetic coding sequence
  source 1..4434: mol_type = other DNA
atgggcactgcacttctgcagcgaggtggatgttttctcctgtgtctgtcactgcttctgctgggctgttgggccgagttgggatctgggttggagtttccaggggctgagggccagtggactcgctttcctaagtggaacgcatgttgtgaatcagaaatgagcttccagctgaagacgcggagtgctaggggactggtgctctacttcgacgatgagggtttctgcgattttctggaacttatcctaaccaggggaggtcgcctgcagctcagcttcagcattttctgtgcagaacccgcaaccttactggcagacacacccgttaacgacggcgcttggcactcagtgcggatcagaagacagttccgcaacacaaccttgttcatcgatcaggtagaggcaaaatgggtagaagtgaaatccaaaaggagagacatgactgtgttcagtggactatttgtcgggggtctccccccagagctgagagccgctgcactgaagttgacccttgcttctgttcgagagcgtgagcctttcaaaggctggatccgggatgtccgggtcaattctagccaagtgctcccagtagatagcggcgaagtgaagttggacgacgagcccccaaatagcggcggaggatcgccttgcgaggctggtgaggaaggagaagggggtgtgtgccttaatggtggcgtgtgctctgtggttgacgatcaggccgtgtgtgattgttctcggaccggatttcgcggaaaggactgttcacaagaggataacaatgtggagggactggcccacttgatgatgggggaccaaggcaagagcaagggaaaggaagagtacatagccactttcaaggggagtgaatatttctgttacgacctcagtcaaaaccctatccagtcgtcatcagacgagattactttatccttcaaaacacttcagcggaatggcctcatgctccacactgggaaaagcgccgactatgtgaacttggcactgaagaacggtgctgtctccctggtgatcaaccttggtagtggcgcattcgaagccctggtggaacccgtgaacggaaagttcaatgacaatgcctggcacgatgtcaaggtgaccagaaatttgcggcaacattccggcattggccacgctatggtcaccataagcgtcgacggcatcctgactacaacgggctacactcaggaggactacacaatgctgggatccgacgattttttctatgttgggggaagtccatcaacagcagatctgccaggctcccccgtttctaataactttatgggttgcctgaaggaggtcgtttataagaataatgacgtgcggcttgagctgagccgcttagccaagcaaggtgaccccaaaatgaaaatacacggtgtggtggccttcaaatgtgaaaacgtggcgacgttggatcccataaccttcgaaaccccagagtcttttattagtttacctaaatggaatgctaagaaaacgggtagcatctcctttgatttccgaacgactgagcccaatggcctgatcctattcagtcacgggaaacctcgacatcagaaggatgcgaagcacccacaaatgattaaagtggatttcttcgcgattgaaatgctagacggtcatctctacttgctgctagatatgggatcagggacaatcaagatcaaggcacttttgaagaaggtgaacgacggcgagtggtaccacgtggatttccagcgggatggacgaagtggtacgatcagtgtgaacacactgcgtacaccatacaccgctcctggagaatctgaaattttggatctggatgacgagctgtacctgggagggttaccggaaaacaaagcagggctcgtttttcccaccgaggtgtggacggcactgttaaattacggctatgtaggctgtattagagatctttttatagacggtcaatcgaaggacattcgtcagatggcagaggtgcaatccacggctggcgttaagccaagttgctctaaggaaaccgcaaaaccctgcctgtcgaacccgtgcaagaataacggcatgtgtagagacggctggaatcggtacgtatgcgactgcagtggcacaggatatctgggacgatcctgcgaacgcgaggccacagtcctctcttatgacggctccatgttcatgaaaatccagctgcctgtggtgatgcacacagaagcagaagatgtctccctaaggttcaggtcccagcgagcctatggaattttgatggcgaccacaagtcgggattccgcagacaccctgcgcctagagctcgacgccggacgcgtgaaactgactgtgaatctggactgcattcggattaactgcaactcaagcaaaggccctgaaacgctctttgccggttataacctcaatgataatgaatggcatactgtgcgcgtggtgcggcgtggcaagtccctcaaactcactgtggacgaccaacaggctatgacagggcaaatggcgggagaccacactcggctagaatttcacaatattgagacgggaattatcaccgagcgtcgttatctgagcagcgtgccgtctaatttcatcggccatctgcagagcctgaccttcaatgggatggcctacatcgatctctgtaaaaacggcgacatcgattactgcgaacttaacgccaggttcggctttcgaaacatcattgcagacccagtgactttcaagacaaagtcctcgtacgttgccctggctaccctgcaggcatatacctctatgcacctattcttccagtttaagacaactagtctggatggtctgattttgtataacagcggcgacggaaatgactttatcgtggtcgagctggtcaaaggttatctgcactatgtgttcgaccttggcaacggcgctaatctgataaagggaagcagcaacaagccgctgaatgacaaccagtggcacaatgttatgatatctagggacacatccaatctccataccgtcaaaatcgatacaaaaattaccactcaaatcaccgctggcgctaggaacctggatctcaaaagcgatctgtacatagggggagtcgcgaaggagacatacaaaagcttgcctaagttagtgcacgctaaggaggggttccaaggctgcctggcctctgttgacctgaacggacgcttgccagaccttatttcagacgctctgttctgcaatggccagattgaaagggggtgcgaagggccatcaacgacgtgtcaggaggacagctgttccaaccaaggcgtttgtctccagcagtgggatggattctcgtgtgactgtagcatgacttcattcagtggacccctctgtaacgatcccggtacaacgtatatctttagcaaaggcggtggccagattacctataagtggccgccaaatgaccgccctagcaccagggctgatagactggcaatcggcttcagtaccgtccaaaaagaggccgtcctggtccgtgtcgattcttctagtggacttggcgactatctggaacttcatatacaccagggaaaaattggcgttaagtttaacgtcgggacagatgatatagctattgaggaatcaaacgccataattaatgacgggaagtatcacgtggtgcggttcacccgcagcggagggaatgctacacttcaggttgattcttggcctgttatcgagcgataccccgctgggcgacagcttaccatcttcaactcccaggccacgattatcatcgggggaaaggagcaagggcagcccttccaggggcagttgtcaggcttatactacaacgggctgaaagtactgaatatggcagctgaaaacgatgcaaatatcgcaatcgtggggaacgtcagactagtcggggaggtgccctcaagtatgacaacggagagtaccgccaccgcgatgcagtccgaaatgtccacatccatcatggagactacgactaccctcgctacgtcaacagctcgcaggggcaagcctcccaccaaagaaccaatctcacagacaacagacgatatacttgttgcgtctgcagagtgcccatcagacgacgaggatatagacccctgtgagccctcaagtggagggctggccaacccgacaagagcgggaggcagggagccgtatcctggctccgcagaagtgatccgggagtccagcagtactacaggcatggttgttgggatagtggcagccgcagccctgtgtattctgatccttctgtacgctatgtacaaatatcgcaatagagacgaaggaagttatcatgtcgacgagtcaagaaattacatctcaaatagcgcccagtccaacggcgcagtggttaaggagaaacaacctagcagcgcgaagagctcgaataaaaataagaagaataaggataaagagtattatgtctag

SEQ ID NO: 232295 - DNA, 4434 bp, synthetic construct
  misc_feature 1..4434: note = Description of Artificial Sequence: Synthetic coding sequence
  source 1..4434: mol_type = other DNA
atgggcactgccctgctgcagaggggcggttgtttcctcctgtgtctgagtttgctccttttaggttgctgggcagagctggggtccgggctcgagttcccaggggcagagggccagtggacccgttttccgaagtggaatgcatgttgtgaatctgaaatgagcttccagctgaaaacccgatctgcccgtgggctcgtcctgtacttcgacgacgaggggttttgtgatttcttggaactcatactcacaaggggagggagactgcagttatcgttttcaatattctgcgctgagccggctactctgttggccgacacgccagttaatgacggagcttggcactctgttcggattcgccgtcaattccgcaatacgaccctttttatagaccaggtcgaagcgaaatgggttgaagtgaaaagcaagagacgagatatgacagtcttttccggactgtttgtgggaggcctgcctcccgagcttcgtgccgctgcattgaagctgaccctagccagcgtgcgagaaagggaaccctttaaagggtggatccgcgacgtaagggtgaactcgtcccaggtccttcctgtggactcaggagaagtgaaacttgatgatgagccccctaactcagggggaggaagtccctgcgaagctggcgaggaaggcgaagggggtgtgtgcctgaacgggggagtatgtagcgtcgtcgacgaccaagccgtgtgcgactgctcccgcaccggattccggggtaaggattgtagtcaggcagatacgaatctcgaggggctggcacatctcatgatgggagaccaggccaaaagtaagagaaaagaagagtatatcgctacctttaaaggctcagagtatttctgctatgacctgagccagaatcctatacaatcttcttccgacgaaattacactgtccttcaagacactccaacggaacgggctgatgctacacacgggcaagagcgcagactatgttaacctggccctgaaaaacggcgctgtcagcctggtgatcaaccttggatccggcgctttcgaagcacttgtagagcctgtgaacgggaaattcaacgacaacgcctggcacgacgtaaaggttaccagaaacctaaggcaacattccggcatcggtcacgccatggttactatctcggttgatggcatcctgaccactacagggtacacgcaggaggactacacaatgcttggctctgacgactttttctatgttggcggtagccctagcactgcagacctgccagggagccccgtgtcaaataacttcatggggtgcctgaaagaagtggtttacaaaaataacgacgtgcgcctggaactgtcacggctggccaagcagggcgaccccaaaatgaagatacatggcgtcgtggctttcaagtgtgaaaatgtagccacacttgatcctattacattcgagacgccagaaagctttattagcctcccgaaatggaatgcaaagaagacgggctccatctccttcgacttcagaactacagagccaaatggcctgattcttttctcccacgggaaaccgaggcatcagaaggatgccaaacacccgcagatgatcaaggtcgactttttcgcgatagagatgcttgacggccacttgtatcttcttctggatatggggtctggaacaataaagattaaagccctgttgaagaaagtgaatgatggtgagtggtaccacgtggattttcagcgggatgggaggtccggaacgatcagtgtgaacaccctgcgaactccctacaccgcccctggcgagtctgaaattctggatctcgacgacgaactttaccttggcggactgcctgaaaataaggcgggactggtcttcccgacagaagtgtggacagcattattgaactacggctacgtcggatgcattcgtgatctgttcattgacggccagagtaaagatatcaggcagatggctgaggttcagagcaccgccggagttaagccttcatgttcgaaagaaaccgctaaaccctgcctgagtaatccgtgcaagaacaacggcatgtgtcgggacggatggaaccggtatgtgtgtgattgcagcgggaccggctaccttggcagatcttgcgagcgagaagcaactgttttgagctacgacggaagtatgtttatgaaaatccagctcccggttgtgatgcataccgaagcggaggacgtgagtctgcgtttcaggtcacagcgagcttatggcattctgatggctaccacgagtcgggacagcgctgatactttgagactagagctcgatgcaggtagggtgaagctcaccgtcaatctcgattgcatccgaatcaattgtaactccagtaaaggaccagagactctttttgccggatataacttgaacgacaatgagtggcatacggtgcgggtggtacgcagggggaagtctctgaaactaacagttgatgaccagcaggcaatgactggtcagatggccggagatcacactcgcctcgagttccacaatattgaaaccggcataatcacagagaggcgatatcttagtagcgtgccctcaaacttcattggtcacctgcaatccttgaccttcaacggtatggcttatatcgatctgtgcaaaaacggtgatatcgactactgcgagttgaatgctaggttcggcttcagaaacatcatcgcagaccccgttactttcaaaactaaatcctcatacgtggctctcgccactctgcaggcctacactagcatgcacctgtttttccaatttaagacgacatcactggacggcttaattctgtacaacagtggagacggcaacgattttatcgttgtcgagctcgtgaaaggatatttgcactatgtgttcgatctggggaacggagctaatctgattaagggaagttccaataaacctcttaacgataatcagtggcacaatgtaatgatctcccgtgacacaagcaatttacacacagtcaagattgatactaagattacaacacagatcaccgcaggcgcacggaacttggatcttaagagcgatttatatattggaggcgtggccaaggaaacctacaagagcctacccaagctggtgcacgctaaggaggggtttcagggttgccttgcttccgtggatctgaatggcaggttaccagatctgatttccgacgccctcttctgtaacggccagatcgagcggggttgtgagggtccttcaacaacctgtcaggaggattcctgctccaaccagggggtgtgccttcagcagtgggacggtttctcgtgtgactgctcaatgaccagtttctcgggcccactgtgcaacgacccaggtacaacatacatattctccaagggtgggggacagattacttataaatggcccccaaacgaccgacctagtactcgggcagatcggctagccatcgggttttcaacagtacaaaaggaggctgttctcgtgcgtgttgacagttcatcaggcctcggcgactacctcgaactgcacattcatcagggaaaaataggagtgaaattcaacgtcgggactgacgacatcgctatcgaggagagtaatgcgataatcaacgatggcaaataccatgtggtccggttcactcggtccggcggtaacgcaacgctccaggtggactcttggccagtaatcgaacgctatcccgcagggagacaactgactatcttcaattctcaggcaaccattatcattggcggaaaggagcaagggcagccgttccaagggcagctcagtggtctttactacaatggcctgaaagtcctgaatatggccgctgaaaatgacgcaaacatcgcaatagtcggaaatgtgagactggtgggggaggtaccttcttccatgaccaccgagtcaactgcaaccgcaatgcaaagcgagatgtccacgtcaattatggaaaccacgacaacactggcgactagcaccgccagaagaggcaaacccccaactaaggagcccatttctcagacgaccgacgatatcctggtcgcctccgctgagtgcccatctgacgatgaggacatcgatccatgtgaacctagctcaggaggtcttgcaaatccaaccagggccggtggcagagagccatacccgggaagcgccgaagtcattcgggagagtagctccactaccggcatggtagtgggaatagttgctgctgccgctctgtgtattctcatccttctctatgctatgtataaatatagaaatagagacgagggctcctaccacgtggatgaatctcgaaactatatttcaaattccgctcagagcaacggggctgtggttaaagaaaagcaaccctcctccgctaagtcctccaacaaaaacaagaagaacaaagacaaagagtattatgtctag

SEQ ID NO: 232296 - DNA, 4647 bp, synthetic construct
  misc_feature 1..4647: note = Description of Artificial Sequence: Synthetic coding sequence
  source 1..4647: mol_type = other DNA
atgggtacggccctgctgcagagagggggatgcttcctgctgtgtctgagcctgctgctgctcggctgctgggcagaactcggctccggcctcgaatttcccggtgcagagggccagtggacccgattccctaagtggaacgcatgttgtgagtccgagatgagtttccagcttaaaactcggagtgctcgaggcctggttctctactttgatgacgagggcttctgcgattttttggagctgattttgacgcgaggtgggaggttgcagctcagtttttctattttctgtgctgaaccggctactctgctagctgacacaccggttaacgacggcgcttggcattcagtgcgaattcgtcgccaatttcgcaatacaacattgtttattgatcaggtggaagcaaagtgggtcgaggtgaaatctaaacgaagggacatgaccgttttcagcggcctgttcgtcggaggtctgccccctgaactgagagccgctgctctgaagctaaccctggctagcgtccgggaacgggaaccatttaagggctggattagggatgttagagtcaattcctcccaggttttgcccgtggattcaggcgaggtcaaattggacgacgaaccccctaatagtggcggaggaagtccctgcgaggcgggagaagagggggaagggggagtttgtctgaatggaggcgtatgttcagttgtggacgaccaggcggtctgtgattgcagtcgcactggcttccggggaaaggattgctcacaggagataaaattcggcctgcagtgcgtgctgcctgtcctcctccatgataatgaccaaggcaagtattgctgtataaacacagccaagcctctgaccgagaaaaaggacaacgattttgagggactcgctcacttgatgatgggagaccaggctaagagcaaacggaaggaagagtacatcgcaacgttcaaaggatctgagtatttctgttacgacctgtcccaaaatcctatacagtcgtccagtgatgaaataactctttcctttaaaacgctccagcggaatggcttaatgcttcacacagggaaatccgccgactatgtgaacttggcattgaaaaatggcgcagtatccctggttatcaatttaggaagtggtgctttcgaggctctcgtggagcctgtgaacgggaagtttaacgataatgcctggcatgacgtgaaggtcacgaggaatctgaggcaacacagcggaattggccatgccatggttaataagctccactgttccgtgacaatttcagtggacggaattctgaccactacaggatatactcaggaggattacacgatgctagggtctgacgacttcttctatgtcggcggtagccccagcacagccgacttgcccggatctcccgtgtctaataacttcatgggatgccttaaggaggtggtgtataaaaataacgatgtccggctggagttgtcccgcctggccaaacagggagacccaaagatgaaaatccatggggttgttgcctttaaatgtgagaacgtcgccactttggatcctatcaccttcgaaactcctgaatccttcatttccctccctaagtggaatgcaaagaagactggctcaatctcatttgacttccgcactacagagcccaacggcctcatcttgttctcacacggtaaacctcgacaccagaaggacgccaagcatcctcagatgattaaggtggacttcttcgccatcgaaatgctagacggccacctgtacttattactggatatgggcagcggaactataaaaataaaggctctgttgaagaaagtgaacgacggagaatggtatcacgtggacttccaaagagacgggaggtcaggcacgatctccgtcaatactctgcgaacgccttacacagcaccaggagagtcagagatcctggacctggatgacgaactgtatctgggagggctccctgagaataaggcgggactggtgtttccaacagaggtgtggactgcactgctcaattatgggtacgtaggctgcatcagggatttattcatcgatggccaaagcaaggatattagacagatggccgaagtgcagagtaccgccggtgtgaaacctagttgtagtaaggaaaccgccaaaccatgtttaagtaatccatgcaaaaataatgggatgtgccgggacggatggaacagatatgtttgcgactgtagtggcacaggataccttggtaggagctgcgaacgcgaggcaactgtgctgagctacgatggatcaatgttcatgaagattcagctgcccgtcgtgatgcacaccgaggccgaagatgtatccctgcggtttaggtcacagcgtgcttatggtatccttatggccaccacatcacgagactcagcagacactctgcgcttggagctcgacgctgggagggtgaagctcacggtgaatctcgattgcatccgcatcaattgtaacagctccaaaggcccagagactctgtttgcaggctacaacctgaacgacaacgagtggcacacagttagggtagtacggagaggaaaatctctgaaactaaccgtggacgaccagcaggcgatgaccggccagatggcaggagaccatacccgactggaatttcataatatcgagaccgggattataacggaacggcgttacctctccagcgtgccaagtaacttcattggccatctgcagagcctcacattcaacggaatggcatatatcgatctgtgcaagaacggggatattgactactgtgagctaaacgctcgcttcggtttccgcaacataattgccgaccccgtcactttcaagacgaagtcgtcatacgtagcattagcaaccctgcaggcttacacttccatgcacctctttttccagtttaaaaccacatctctggacgggttaatcctttataactctggggatgggaacgacttcattgtggtggaactagtgaaaggataccttcactacgtctttgacttgggcaatggtgcaaacctcatcaagggaagcagcaataagccattgaacgacaatcaatggcataacgtgatgatttcccgcgacacctcaaaccttcatacggttaagatcgacacaaaaatcacaactcagatcacggccggagctcggaacctggacttaaaaagtgacctttacataggcggagtggctaaagaaacatataagtccctgcctaaactcgtccatgctaaggagggtttccagggctgccttgcaagcgtcgatctcaacgggcgtctccctgaccttattagcgacgctctattctgcaatggccagatagaaagaggctgtgagggcccttccacgacttgccaagaggactcctgttctaaccagggagtatgcttgcagcagtgggatgggttctcgtgcgattgcagcatgacttcattctcgggccctctctgcaacgaccccggtactacttatatcttctcaaaaggaggcggtcagattacatacaaatggcccccaaacgaccgtccgagtacacgagccgatagactcgccattggattttccacagttcagaaggaagcggtcctggtgcgcgtcgacagttcatctggcctcggagactaccttgaactgcatatccatcaaggaaagatcggggttaagtttaatgtggggactgatgacattgccattgaggaatccaacgccattattaatgatggcaagtaccacgtggtccggtttaccagatcagggggtaatgctactcttcaggtggattcatggccggtcattgaaagataccctgccggaaacaacgacaatgagcgtcttgccatcgcgaggcaacgcatcccatataggctaggcagagtggtggatgagtggctgctcgataagggacggcagcttactattttcaacagccaggccacaattatcattggcggaaaagaacagggccaaccttttcaggggcagctgagtggcttgtactacaatggtctgaaagtattaaatatggctgctgaaaacgacgcaaacatcgcaatcgtggggaacgttcggctggttggtgaggtaccttctagcatgaccactgaaagtactgccactgccatgcagtctgagatgagcacttctataatggaaacgaccactactctcgccacctccaccgccaggcggggaaagcctcctaccaaggagcctatttcccagacaacagatgatatattggtggctagcgcagagtgtccatcagacgacgaagatatcgacccgtgtgaaccttcaagtggcggtctggcaaaccctacccgtgcgggaggtagagaaccctatccaggttctgccgaagtgatcagggaatcgtcatctaccaccggtatggttgttggcatagtggcagccgcagcactttgtattttaatactcctgtatgccatgtataaataccgaaatagggacgagggcagttaccatgtagatgagtcccggaattatatcagcaatagcgcacagtccaacggcgctgtggtgaaggagaagcaacccagctcagccaaatctagcaataagaataaaaaaaacaaggacaaagagtattacgtgtag

SEQ ID NO: 232297 - DNA, 1191 bp, synthetic construct
  misc_feature 1..1191: note = Description of Artificial Sequence: Synthetic coding sequence
  source 1..1191: mol_type = other DNA
gccctcgaaatctgggagcagccccctgccccacggctcctctttcctgggctcccatttcgcacgagccctagccccgcagctttctaccgatcgccagcatcccttcgaggcggtcacgcgggaacgacgtatatcttctctaaaggcggtggccagatcacctataaatggccacccaatgacaggccctctacccgggcagataggctggcgattggcttctctaccgtgcaaaaggaagcagtgctggtccgggtggattcctcctcagggctgggtgactacttagagcttcacatccaccagggcaagattggagtcaagttcaacgttggtacagatgacatagccattgaggagtcaaacgccattatcaatgatggcaagtaccacgtggtgaggttcactcggtccgggggtaatgctacgctccaggtggattcctggcctgttattgagagataccctgccggacggcaactgacaatttttaatagccaggcaactataattatagggggaaaagagcagggccaacctttccagggacagctaagcggtctttattacaatggcctgaaagttcttaatatggcagccgagaacgacgcaaatattgccatagttggaaacgttaggcttgtcggagaggtaccatcttccatgacgactgagagtaccgctaccgccatgcagtctgagatgagtacttcgataatggagacaacgaccacgttggctacaagtaccgctcggaggggtaagccgcctaccaaggaacccatctctcagactacagacgatattctggtcgccagcgcagaatgccctagcgacgatgaggacatagatccttgcgaaccctcttcaggcggactcgcaaaccccacacgtgctggcggacgggagccatatcccggaagcgctgaggttataagggaatctagttccacaacaggaatggtggtggggattgttgccgctgccgctttgtgcattctgatccttctgtatgcaatgtacaagtatcgtaatcgagacgagggaagctatcacgtggatgagtctcggaattatatcagcaattccgctcaatccaatggtgccgtagtcaaagaaaaacagccaagcagtgctaagagttcgaataaaaacaaaaagaacaaggacaaggagtattacgtatag

SEQ ID NO: 232298 - DNA, 5139 bp, synthetic construct
  misc_feature 1..5139: note = Description of Artificial Sequence: Synthetic coding sequence
  source 1..5139: mol_type = other DNA
atggctagcggatcccggtggcggccaacgccccctcctctgctgttgttgctgcttctggcactggcagcccgagctgatggcctggaatttgggggtggtcccggtcaatgggcgcgatatgctaggtgggcaggcgcagcttcaagtggagaactgtcatttagcctgcgtactaatgcaacgcgggctctgctgttgtatctggatgacggcggtgactgtgattttctggagctgctgttagtcgacggtcggcttcgattacgctttaccctgtcctgcgctgagcccgcaacattgcaactggatactccagtggccgacgatagatggcacatggtcctactaactcgagatgcccgacggactgctctggccgtggacggggaggcacgggctgcagaagtccgttcgaaacgccgagaaatgcaagtggcttctgacctattcgtagggggtatacctccagacgtcaggttgagcgccttgactctgtcgacggtgaagtacgagccgccattccgaggattgctcgcaaatttgaaactgggagagcgacctcctgcactgttgggctcccagggactgaggggagccacagctgacccactgtgcgccccagcccgaaatccgtgtgccaatggtggtttgtgcaccgtgctcgcacctggcgaggtgggctgtgactgttcacacacaggcttcggaggcaaattctgttccgaagaagaacatccaatggagggcccagcccatctcaccctgaattctgaagtcggatccctgctctttagcgaaggcggagctggccgtggaggtgccggtgacgtccatcagccgactaaagggaaggaggaattcgtcgcaacattcaaaggcaatgagtttttctgttatgatctttcccacaacccaatacagtctagcaccgatgagatcacgttggctttccggacactccagaggaatgggctaatgttgcatacaggtaaatccgcggactacgtgaacctttcactgaaatcgggggcagtgtggcttgtcatcaatctgggatctggtgccttcgaggcactcgtggagcctgtgaatggcaagtttaacgacaatgcgtggcacgacgtgagggtgacccgcaatcttcgccaacacgccggtatcggccatgcaatggtaaataagctgcactatctcgttactatatctgtggatggcatactgacaacaactggctacacacaggaagactacactatgctggggagcgacgatttcttctacatcggagggtccccgaacactgcagaccttccagggtctccggtgagcaacaatttcatgggatgtctcaaggatgtcgtgtacaaaaacaatgacttcaaactggaactgagtcgcctggccaaagaaggcgaccccaagatgaaactgcaaggcgatttaagtttcagatgtgaggatgtcgccgctctggaccccgtcaccttcgaatccccagaggcctttgtggcactccctaggtggagcgccaagaggactggatccattagtctggacttccgtactacggaacctaatggcctgctccttttctcccagggcaggcgagccggtggaggcgctggctcccattcctctgcccaaagggctgactatttcgccatggagctgctggacggacacctgtatctattgttggatatggggagcggcggaattaaacttagggctagctcgagaaaagtgaatgatggcgagtggtgccatgtggacttccagcgggacggaaggaaggggtcgatttccgtgaatagccggtccacccctttcctggctaccggcgattccgagattctcgacctcgagtctgagctgtacttgggtggccttcccgaaggcggacgcgtagatctgcccctccctccagaggtgtggaccgccgctctccgggctggttatgtgggctgcgtacgggacctattcatagatgggaggagtagagacctgcggggactggcagaagctcagggagccgtgggcgtggcccctttttgcagcagagagactctgaagcagtgtgcctccgccccttgtagaaatggcggagtgtgtcgagagggatggaaccggttcatatgcgactgcatcggcacaggctttctcggtcgcgtgtgtgaacgtgaagctacagtgctgtcatacgatggctccatgtatatgaagatcatgctgcctaacgccatgcataccgaggcggaagacgtcagtctgagatttatgtctcaaagggcctacggacttatgatggccacaacctctcgcgaatcagctgacactcttaggttagaactggacggaggccagatgaaactgacagtcaatctcgactgtctgcgggtggggtgcgctcccagcaagggaccagaaactctttttgccggacataaattgaacgataacgaatggcacaccgtgcgcgtcgtgagacgtggtaaaagtctgcagctctccgtggacaatgtgacagtggaggggcagatggccggtgcccacatgaggttagagtttcacaacatcgaaactggtattatgactgagagacgcttcatcagtgtcgtgccatccaactttatcggtcatctgtcagggttggttttcaatggacagccctacatggaccaatgcaaagatggggacattacatattgcgaattgaacgctagattcgggctcagggcaattgtggcagaccccgtgactttcaaatcacgcagttcttacctcgccctggccaccctgcaagcatatgcctcgatgcacctgttcttccagttcaagaccaccgctccagacgggctgctcctgtttaactcaggcaatggcaatgattttatcgtcatcgaactcgttaaagggtatatacattacgtattcgatctgggtaatggcccaagcctcatgaaaggcaacagcgataagccagtgaacgacaaccaatggcacaacgtcgtagtgagtagggaccccggtaacgtccacacacttaagatcgactcccgaactgtaactcagcactcaaacggagcccgtaatctcgaccttaagggagaactctatattggaggactgtccaaaaacatgttctcaaaccttccaaagctggtggcgtcaagagatggattccagggatgcttggcctctgtcgatctgaatggcagattgcctgatttgatcgcagacgcactgcatcgcatcgggcaggtcgagcggggttgcgatgggccatcgacaacctgtacagaggaaagctgcgccaatcaaggtgtgtgcctgcagcagtgggatggtttcacatgtgactgcacaatgacatcatacgggggtccagtttgtaacgatcccggaacaacctatatcttcggtaaaggtggagcgttgataacttacacatggcctcctaatgatagaccctccacaagaatggaccgactggccgtcggcttcagtacacatcagcggagcgccgtgctcgttcgcgtcgacagtgcttcggggttgggcgattatctccaactccatatcgatcaggggaccgttggtgttatcttcaacgttggcaccgacgatatcaccatcgacgagccgaatgccatcgtgagcgacggaaagtatcacgttgtccggttcactcgatctggaggcaatgctactctacaggtcgactcttggcctgtgaacgagagataccccgcaggcaacttcgacaatgagaggttggctattgccagacagcgcattccttatagactcgggagggttgtagacgagtggctactcgataagggccgacaactgaccattttcaattcccaggccgcaatcaagattggcggtcgggatcaaggccgaccatttcaggggcaagtcagtgggttatactacaatggattaaaagtgctggccctagcagccgagagcgatcctaatgttcggacggaggggcatctgagactcgtcggggaagggccaagtgtgttgctgagcgctgaaactactgctaccacactcctagctgacatggccaccaccatcatggaaaccactacaacaatggccacaaccactactagaagggggaggtcccctacactgcgcgacagtactacgcagaacactgatgacctgctcgtggcatctgctgagtgtcccagcgacgacgaggacctggaggagtgtgagccatccaccgggggtgagctgatactacccatcatcaccgaagactctctggacccaccccctgtcgccacaaggagtccttttgtcccccctcctccgacattttatcccttcttaacaggagtcggcgcaactcaagacacactgccacctcccgctgccaggcgcccaccgtctggcggtccctgccaggccgagcgcgatgacagcgattgcgaagagccgattgaggcaagcggcttcgcatccggtgaggtcttcgactcttctctgccacctaccgatgacgaggacttttatacgaccttcccactggtaaccgataggactacacttctttccccgaggaaaccagcacctaggccaaatcttagaacggatggagcaaccggcgctccaggggtactgttcgcaccttctgcgccagctcccaacctgcccgctggaaaaatgaaccaccgcgaccccctgcagcctctattggagaacccccctctggggccaggggctccaaccagttttgagccacgaaggcctccgcctctgcgtcctggcgtgactagcgctccaggatttcctcacttgcccacagccaatccgactgggcctggcgaaaggggacctccaggcgctgtggaggtcatccgtgagtcctccagcacaacaggcatggtggtcggcattgtggctgccgcagctctctgtatattgatactgctctacgcaatgtacaagtaccgcaacagagacgagggttcctatcaggttgatcaatcacgcaactacatctctaatagcgctcagtccaatggagccgtggtgaaggagaaggccccagctgcccctaaaacccccagcaaggccaaaaaaaataaggacaaagaatactatgtgtaa

SEQ ID NO: 232299 - DNA, 4928 bp, synthetic construct
  misc_feature 1..4928: note = Description of Artificial Sequence: Synthetic coding sequence
  source 1..4928: mol_type = other DNA
atggcatctgggagcaggtggagaccaacacctcctccactccttttgctcctgctgttggccttagctgcccgagcggacggccttgagttcggaggtggtcccggacagtgggctagatacgctcggtgggctggcgcagcaagttccggcgaactcagtttctccctgagaaccaacgcaacccgggcactccttctatatctcgacgatggcggtgactgcgacttcctggaactgttgcttgtagacggccgtctgaggctgcgattcaccctgtcgtgcgcggaacccgctactctgcagttggatacccccgttgccgacgacagatggcacatggtgctgctgacgagagatgcgcgtaggaccgctttggctgtcgatggagaggccagagccgctgaagtgcgctcaaagcgacgagagatgcaggttgccagcgatctgttcgtaggaggcatccctcctgacgtgcggctcagtgctctcacccttagcactgttaagtatgaaccaccgttcaggggtctcctcgcaaatctgaagctgggcgaaaggccacctgctctcctcggctcacagggcctacggggagccactgccgacccactttgtgccccagcacgcaacccatgtgctaacggaggcctgtgcaccgtgctcgccccaggagaggtcggttgcgactgcagtcacaccgggtttggcggaaagttctgctctgaagcgccatccccattccagggtcccgcacacctgaccctgaatagtgaaggcaaagaggagttcgttgcaactttcaagggaaatgaatttttttgttatgatctttcacataatcctatacagagctccaccgacgagatcaccctggccttcagaaccctccagagaaatggactcatgttacacaccggaaaatccgcagactatgtgaatctatccctgaaatctggcgctgtctggctggtgattaatctggggtcaggcgcattcgaggcccttgtagagcctgtgaacggcaaatttaatgataacgcttggcacgatgttagagtgaccagaaacctcagacagcacgctggaattgggcacgccatggtgacgataagcgtggacggtattttgactaccaccggatacactcaggaagattataccatgctgggttctgacgactttttttatataggaggttccccaaacaccgctgatctgccaggatctcctgtaagtaataactttatggggtgcctgaaggacgtggtctacaaaaacaatgactttaaacttgagctctctcgcctggcaaaagagggggatcccaagatgaagctacagggcgatctatcctttagatgtgaagacgtcgccgcactcgatcctgttactttcgagtctccagaagcttttgtcgctctcccgcgttggagcgccaaacgtaccggttctatatccctcgacttccgcacaactgagcctaacggcttactcctgttttctcaggggaggcgggctggtggaggcgctgggagtcactccagtgcacagagagcggattacttcgcaatggaactgctagacggccatttgtatttgttattggacatgggatcggggggaattaagctgagggcctcatctcggaaggtgaatgatggcgaatggtgccatgtcgactttcaacgagacggcaggaagggatccatctccgttaattcccgcagcacgcctttccttgccacaggcgactccgagattctggacttggagtctgagttgtatctgggcggtctacccgaagggggtcgagtggatctgcccctgccacccgaggtgtggaccgctgcattgagagctgggtacgttggatgcgtgcgtgatctcttcattgacggaagatcacgcgaccttcggggtctggccgaagcacagggggcagtcggggtggcacccttctgttcccgcgagacactcaaacagtgcgcgagcgctccctgtaggaacggcggtgtatgccgggagggctggaatagatttatctgcgactgcattgggaccggatttttgggcagagtgtgtgaaagagaggccacagtactctcctacgacgggtcaatgtacatgaaaatcatgctgccaaacgcaatgcatacagaagcagaggacgtttcccttcgattcatgagccagagagcatacggcctaatgatggccaccacatctcgagaatccgcagacacgttgcgtttggagcttgacggaggtcagatgaagttaactgtcaatttaggaaaaggcccagaaacactgttcgctggacataaattgaatgacaatgagtggcacacagttcgggtggtccggcgaggaaaaagtttacagctatccgtggataacgtgaccgtcgaaggacaaatggcaggagctcacatgaggctcgagttccacaatatcgaaactggcataatgacagaacgcagattcatctcagtcgtcccttccaattttattgggcaccttagcggcctcgtgttcaatggacagccatacatggatcagtgcaaagatggagatattacatattgtgaactgaatgccagatttggcctgagggctattgtcgcggatccggttaccttcaagagccggtcctcttacctggcactggccacattgcaggcctatgcaagcatgcacttgttttttcagtttaaaaccacagcccctgacggtctccttttgttcaacagtggtaacggcaacgactttattgttatcgagctggtgaagggatatatacactacgtgttcgacttagggaatgggccttcgctgatgaagggcaacagcgacaagccggtcaatgataatcagtggcacaatgtggtcgtgagcagggacccgggaaatgtgcatacacttaagatcgattccagaaccgtaacacaacactccaatggtgcaagaaatctcgatctgaagggcgaattatacattgggggtttgagcaaaaatatgttcagtaacttgccgaagctggttgcttctcgagatggcttccagggatgcctggcatccgtggacctgaatggaaggcttcccgacttgatcgccgacgcattacacaggattggccaagtagaacggggatgcgacggcccatccactacttgtaccgaggagagttgtgctaatcagggagtgtgcctgcaacagtgggacgggttcacctgcgattgcactatgaccagctacggaggtccagtgtgtaatgaccctggaactacttatatttttggcaaggggggagcccttataacctacacctggccaccaaacgaccgacctagcacgcggatggaccgcttggcagtcgggttctccacccaccagcgaagtgcagtcttggtccgtgtagactctgcaagcggtctcggagattacctccagctacacattgaccaaggaaccgtgggggtaatatttaatgtgggcactgacgacataaccatcgacgagcctaacgcgattgtaagcgatggcaaatatcacgttgtgcggtttacccgaagtggagggaatgccaccttgcaggtcgactcttggcctgtgaatgagagatatcccgcaggaaggcagttaaccatctttaattcgcaggctgccattaagatagggggacgggatcaaggcagaccttttcagggccaggtgagtggactgtactacaatggcctaaaggtgctcgcactcgcggcagaaagtgaccccaacgtgcgaactgaggggcatctgcggctagtcggagagggaccatctgtgcttctcagtgcagagaccactgctaccactctgttagccgacatggctacaactatcatggagaccaccaccacaatggctaccacaactacccgtcgcggacggtctccaacattacgcgattccaccactcagaacacagacgaccttctggtagcatccgctgagtgcccgagcgacgatgaagacctcgaggaatgcgagccttccacaggaggtgagctcatcctgccaattattactgaggacagcttggacccacctcccgtagccacccgcagtcccttcgttccgcctccacctaccttttatccattcttaacaggagttggggctactcaggatactctgccaccgccagctgcacggcgaccaccctcgggcggaccctgtcaggcagaacgggatgactctgattgtgaggagcccatcgaagccagtggcttcgcttcaggagaggttttcgattccagtttaccccctacagacgatgaggacttttacaccacatttccattagtgacggacaggaccactcttctgtcgccaaggaagcctgctccgaggcccaacttaaggacagatggcgctacaggagcccctggtgtgttgttcgcaccatcggctcccgctcctaacctgccagctggaaagatgaaccacagggatcctctacagccactgctcgagaaccccccacttggtccaggcgctcccacttcatttgagcctcgcaggccaccacccttgcgcccaggtgtcacttcggcacctgggtttccccacctacccacggccaatcccacaggcccaggagaacgcggacctccaggggctgtcgaagtgataagggagtcttcatcaactaccgggatggtcgtcggtattgtggccgcagccgctctttgcattctgatcctgctgtacgctatgtataaatatcgaaatagagatgaggggtcataccaggtggaccagtctcggaattatatcagtaattccgcgcaatccaacggtgccgtcgtcaaagagaaagctcccgcagccccaaaaacaccctcaaaggctaagaagaacaaagacaaggagtactacgttta

SEQ ID NO: 232300 - DNA, 5138 bp, synthetic construct
  misc_feature 1..5138: note = Description of Artificial Sequence: Synthetic coding sequence
  source 1..5138: mol_type = other DNA
atggcaagtggttctagatggcgtccaacaccaccaccgctattgcttttgctcttgctggccctcgccgcaagagcagacggtctggaatttggtggtggtccgggacagtgggctcggtatgcaagatgggccggagcggcttcgagcggagaactctctttcagcctccggacaaatgccacccgagctcttctgctctacctggatgacggcggtgattgcgatttcttggaattgctgctggtcgacggtagactcagactgaggttcaccttatcatgcgcagaacccgcaacactccagctggacacgcccgtcgcagatgaccgttggcatatggtgctgctgacccgcgatgctaggagaacagcacttgccgtggatggggaagcgagggccgctgaagttagatctaagagacgggaaatgcaggtggcctcagatctatttgttggaggcataccaccggatgtgagactgtctgcactgacactttccacagtcaaatatgagccccctttccggggtcttctggctaacctgaaattaggggaaaggcccccagccttattggggagccagggactgcggggtgcaacggcagatccattgtgtgcccctgccaggaacccgtgcgccaacgggggtctatgcactgtgcttgcacccggagaggtcggttgtgactgcagccacactgggtttgggggaaagttctgcagcgaggaggagcacccaatggaaggacccgctcatttgactctaaatagcgaggtggggtcgctgctgtttagtgaaggtggggctggacgaggtggcgcaggagacgtgcaccaacccaccaaagggaaagaggagttcgtagccacgtttaaaggcaatgagtttttctgttacgacctgtcccataacccgatccagtcctccacagatgaaattactcttgcctttaggaccctgcagaggaatggcttgatgcttcatactgggaagtctgccgattatgttaacctgagtcttaagagtggggcagtgtggttggttattaacttaggaagcggagcctttgaggcgctggtcgagcctgttaatggcaagttcaacgacaatgcgtggcatgacgtaagagtgacaagaaatttgaggcagcatgccggaatcggtcatgcaatggttaataagctgcattacctggtgactatttcagtggacggtattctgactactaccgggtatactcaggaagactataccatgctcggctcggatgactttttctacatcggaggtagtcctaacactgccgacctgcccggtagcccagtgtccaacaatttcatggggtgtctgaaagatgtggtgtataaaaataacgatttcaagttggaactgtctcggctggcaaaggagggcgatcccaaaatgaagctgcagggggatctctcctttcggtgtgaagatgtggcggcattagaccccgtcacattcgagtctccggaggcattcgtcgcgctccctagatggagcgcgaaacgtactggttctatctcacttgattttcgtaccactgagcctaatggccttctgctgttctcacagggaaggcgcgctggtggcggtgctggctctcatagctccgcacagcgggcagactacttcgccatggaactgcttgacggtcatctgtacttgctgctcgacatgggctctggcggtattaagctgagggccagttccagaaaagtaaatgacggcgaatggtgccacgttgactttcaaagggatgggaggaagggtagtatctcggttaattctcgatcaaccccgtttttagctacaggtgattcagagatccttgacctggagagcgagctctatctaggcggtttgcccgaagggggacgggttgatttgcctcttccacctgaagtgtggacggccgctctccgagccggatatgtgggttgcgtgcgcgacctctttatagatgggaggagccgggacctcagggggctggccgaggcgcaaggcgctgtcggcgtcgcccctttttgttctcgagagacattaaaacagtgcgcatcagccccttgtaggaacgggggtgtatgccgtgagggctggaaccgctttatttgcgactgtatcggtaccggtttcctggggagagtgtgcgagcgggaggctaccgtgctctcctacgatgggtccatgtatatgaagataatgttgcccaacgcaatgcacacagaagctgaggatgtgtctttgagattcatgtcacagcgtgcttatggtctcatgatggcaaccacaagccgtgaatctgcagataccttgaggctggagctcgatggcggtcagatgaagctgaccgtcaaccttgattgtctccgggtagggtgcgctccttctaagggccctgaaaccctgttcgcaggacataagctcaacgacaacgaatggcatactgtgcgggtggttcgacgcggtaagtccttgcagctgtccgtggacaacgtgacagtcgaaggacagatggccggtgcccatatgcgcctagagtttcacaatattgaaactgggattatgacggagagaagatttatctccgtggttccttccaatttcatcggccatctgagtggcctggtctttaatggccagccttacatggatcagtgtaaggacggggacatcacctattgtgagcttaatgcccgtttcggcctaagagcaattgttgcagatccagtcaccttcaaaagtaggagctcttacctggccttggcaaccctgcaggcctatgcttcgatgcacctcttcttccagtttaaaacaactgctccagacggcctccttttgttcaattctggaaatggaaacgacttcattgttatcgagctggtaaagggatacatccattacgtattcgatctgggaaacggtcccagtctcatgaagggaaacagcgataagcccgtcaatgataaccagtggcacaatgtggtagtgagcagagatccaggaaacgtgcataccctgaagatcgacagccgcacagtgactcaacacagcaatggggctagaaacctggacctaaagggtgagctttacatcggagggttgtctaagaacatgttcagcaatctgcccaaacttgtcgcctctagggacggatttcaaggttgcctggcaagcgttgaccttaacggtcgcttgcccgatttgatcgcagacgcgttgcaccggattggccaggtggagcggggatgcgacggcccttccacaacctgcaccgaggagtcttgtgccaatcaaggggtgtgtctgcagcagtgggacgggttcacttgtgattgtaccatgacctcctacggagggcctgtgtgcaacgatcctggaaccacctacatctttggtaagggtggagccctcatcacttatacttggcctccaaacgatcgcccttccacacggatggacagactagctgtgggctttagcacccaccagaggagcgccgtactggtgagagtggacagtgcctctgggttgggcgactatctgcaactgcacatcgaccaaggcacagtaggtgtcatctttaacgtaggcacggatgatatcacaattgacgagcctaacgcaatcgtgtctgatgggaaatatcatgtcgtccgattcacgcgcagcggtggcaatgctactctgcaggttgactcatggccagttaacgagaggtacccagcgggaaactttgataatgagcgattagccattgcccgtcaaaggattccctaccgcttaggaagagttgttgatgaatggctgctggacaaggggagacagctcactatattcaactcccaggctgcgatcaaaatcggagggagagatcaggggaggcccttccaaggacaagttagtggcctctactataacggtcttaaagtcttggcgttggccgctgagtccgaccctaacgttaggaccgagggccacctgcgtctggtgggtgaaggacccagcgtccttcttagtgcggagacaactgctaccacgctgctggctgatatggccacgaccattatggaaaccaccactactatggctaccaccacgactagacgtgggagatccccaacactcagagactccaccactcaaaataccgacgacctgctcgtcgcttccgctgagtgtccatccgatgatgaggatctggaagaatgcgaaccctccaccgggggagagctcattctccccattatcaccgaggattcgctcgacccccctcccgtggcaacacgctcaccgttcgtcccccctccacctactttctatcctttcctcacaggcgttggcgcaactcaggatacgttaccccctcctgcagctaggaggccgcctagtggagggccttgccaggccgagagggatgattccgactgcgaagaacctattgaggcatccgggttcgcttcaggggaggtctttgattcctcgctacccccaacagacgatgaggacttctataccacatttcctctggtgactgatcgaacgaccttgctcagcccaagaaagcccgctcccagacctaatctccgcactgatggtgctactggggctcctggagtattgtttgccccttccgctccagccccaaacctccctgcaggtaagatgaatcacagagatcccctccagcctttactggagaatccgccattaggaccaggggctcctacttccttcgagccccgacgcccaccaccattgcggccaggagtgacaagcgcacccggttttcctcatttgcccactgctaaccccacaggtccgggtgagagagggcctcccggagcagtagaggtgatcagagagagttcgtctactacaggcatggtagtgggtatagtagctgctgctgctttatgcatactgatcttactttacgctatgtacaaataccggaatagggacgagggcagctatcaggtcgaccaaagtagaaactacatttcaaacagcgcacagagcaatggagcggtggtaaaagaaaaggcccctgctgcgccaaagaccccatctaaagccaaaaaaaataaggacaaggaatactacgttta

SEQ ID NO: 232301 - DNA, 4929 bp, synthetic construct
  misc_feature 1..4929: note = Description of Artificial Sequence: Synthetic coding sequence
  source 1..4929: mol_type = other DNA
atggcctccggctccaggtggagacccacgccacctcccctcttattactccttttactagcgctcgcagcgagggcagacggcctggaattcggcggtggaccaggccaatgggctagatatgcacgctgggccggtgctgcctcctccggggaactgtcctttagcctgcgaactaacgcgaccagagccctcctcctatatctggacgacggtggcgattgtgactttctcgagttgttgcttgtcgatgggagactgagattgcgcttcaccctttcttgtgccgagcccgctaccttgcagttagatacgcctgtggccgacgaccgctggcatatggttctgctgactagggatgcacgcagaacagctctggccgttgatggagaagcaagagccgcagaggtgcggagcaagagacgagagatgcaagttgcaagcgacctatttgtaggagggattcctccagatgtcagactgtccgcactgacactctccaccgtgaagtacgaacccccattccgtggcctgctggccaacctgaaactcggggagagacccccagctctgttgggatcacaaggtttgcgcggtgcgaccgctgaccctctctgcgcacctgcacgcaatccatgcgcaaatggtgggctgtgcaccgttctggctcctggcgaagttggctgtgactgctcccatacaggtttcgggggaaagttttgttccgaagaggagcaccccatggagggccctgcccacctgaccctcaatagtgaaggtaaagaagagtttgtggccaccttcaaaggaaatgagttcttctgttacgacttgtcccataaccctattcagtcttcaactgatgagataaccctggcatttcggacgctccaaagaaatggactaatgctccacacaggaaaatcagctgattacgtcaacttatctctaaaatcaggagccgtctggcttgtcatcaatctcggctccggggcatttgaggcactggtggaacctgtcaacggaaaatttaacgacaatgcgtggcatgatgttagggtaacccggaacctgcgccagcacgcgggaattggccatgccatggttactatctcagtcgacggaatcttgactacgactggctacactcaagaagattacacaatgctcggctcagatgattttttttatattgggggaagccctaacaccgctgatttaccgggttctcccgtgtctaacaacttcatgggttgcctgaaggacgtggtgtacaagaacaatgacttcaagcttgaattaagtcgactcgctaaggagggagatccaaagatgaaactccagggggaccttagtttccggtgcgaagatgtggccgcactcgacccggtgaccttcgaaagcccagaagccttcgtagcccttccacgatggtctgccaagaggaccggcagcatctcattagattttagaacgacagaaccaaacgggcttctgcttttcagccaaggccgacgtgctgggggaggagccggaagtcattcatccgctcagagagcagactacttcgccatggaactacttgatggccatctgtacctactacttgacatggggtccggtgggattaagctgcgggcatcatcccggaaagtgaatgatggagaatggtgccatgttgattttcagagagacggcaggaaggggagtatttctgttaactccaggtcaacacccttccttgcgacgggggatagcgagatcttggatctggagagcgaattgtatctgggcggactgcccgagggaggaagggttgatttgccactgccgcctgaggtttggacggccgcacttcgggcaggctatgtgggttgcgtaagggatctttttattgacggaaggagccgagatttgcgagggctcgctgaagcccaaggggctgtgggtgtcgctcccttctgttcaagagaaacactaaaacagtgtgcatcagctccttgccggaacggaggggtgtgcagggagggatggaacaggtttatctgtgactgcatcggaacggggtttctggggagagtgtgcgaacgggaggcaacagtactgtcctacgatggaagcatgtatatgaaaattatgctacctaacgctatgcacactgaggctgaggacgtctcattgagattcatgtcacaacgagcctatggtctcatgatggccactacttccagagagagcgctgacaccttacgcctggaactggacgggggacagatgaagctcaccgtcaacctgggaaaaggcccagaaaccctgtttgcgggacataaacttaatgacaacgagtggcacacagtgcgggtcgtgagaaggggaaagagcttgcagctgagtgtcgacaatgtgactgttgaggggcagatggctggggcacacatgaggttagagttccataacattgagacgggtatcatgaccgagaggaggtttattagcgtggtgcctagcaattttatcggtcacctttcgggacttgtgtttaacggccagccgtacatggaccaatgtaaggacggagatattacatattgcgagctgaatgcccgattcggacttagagcaattgtggccgatccagttaccttcaagtctcgatccagttacctggccctggctacgctgcaagcatatgccagtatgcacttatttttccagttcaagacgaccgctccagatggactgctgctgtttaattccggtaatgggaacgacttcatcgtaattgaacttgtaaaaggttatatacattacgtgtttgacttggggaatgggccttctctgatgaaaggtaacagtgataaaccagtcaacgataatcagtggcacaacgtggtggtgtccagggacccaggaaatgtgcataccctgaagattgactctaggactgtcacccagcacagtaatggagccagaaatctcgatttgaaaggagagttgtatatcgggggactctcgaagaatatgttcagcaacctgcctaaactggttgctagtcgcgatggcttccaggggtgcctggccagcgttgacctgaacggacgcctgcctgatttgattgcggacgcgctgcaccggattggtcaggtcgagaggggatgcgacggccctagcacaacgtgcacggaagagagttgtgccaatcaaggggtgtgccttcagcagtgggacggcttcacctgtgactgtacaatgaccagctatgggggaccagtttgcaacgaccctggaacgacttacatatttggcaaagggggagcgctgattacatatacctggccacccaatgataggccttcgactcgaatggacagactagctgtgggtttcagcactcatcagcgttccgcagtactggtgcgggttgactcagcatccggcctcggcgattacctccagttacacattgaccagggtaccgttggagtcatcttcaatgtgggaaccgatgacattaccattgacgagccgaatgctatagtaagtgacggcaagtaccacgtggtccgctttacgaggtctggcggaaacgcgactctgcaggtggacagctggccagtgaatgaacggtacccggcagggcgacagctcaccatttttaacagccaggcggctatcaaaatcggcggacgagatcaagggcgaccctttcagggacaggtcagcggactttattataatggccttaaggtactggccctggctgcagagtctgaccctaatgtgagaaccgaggggcatctgcggctagtgggggaaggacccagcgttctcctgtcggccgagactactgccactacactcctcgctgacatggccaccaccatcatggaaaccaccacaactatggcaacaacgacaactcgtcgcggaagaagccctactctgcgtgactcaacaacacagaatacggatgatctgctggttgcctctgccgagtgtccatcagatgatgaggacctggaggagtgtgagccaagcactggcggagagcttatacttcccataattaccgaggatagcttggaccccccaccagtggccactcgctctcccttcgtcccaccgcctcccactttctacccgttcctgacaggagtaggagccacgcaggacacccttccccctcccgctgcccgaagaccgccttctggtggcccatgccaggcagaaagggacgattcggattgcgaggagcctattgaggcctccggctttgctagtggagaagtcttcgacagctctctgccccctacagacgatgaggatttctatacaacctttcccctggtgaccgacagaacgacactgttgtctcctcgcaaacccgcacctcgccctaacttgcggactgacggagccaccggcgctccaggggtcttatttgccccttctgcacctgcccctaacttacctgccggaaaaatgaatcacagagatcccctgcagcccttactggagaatcccccactgggccctggggctcctaccagtttcgagcccagacgaccacctccattgaggccgggtgtgacgagcgcgcctggattcccacatctacctacagctaaccctacaggccctggggaacggggtccacctggagctgtcgaagtgataagagagagtagtagtaccaccggaatggtggttggtatcgtagccgctgcggctctctgtatactgatcctgctgtatgcgatgtataagtataggaatcgcgacgaaggctcctatcaggttgaccagtctagaaattacatctctaatagcgcacaatctaacggggcagtagtgaaagagaaagcacccgctgctcccaagaccccatctaaggccaaaaagaataaagacaaagagtattatgtatat

SEQ ID NO: 232302 - DNA, 5117 bp, synthetic construct
  misc_feature 1..5117: note = Description of Artificial Sequence: Synthetic coding sequence
  source 1..5117: mol_type = other DNA
atggcttccggatctcggtggagacctactccaccgcctctactgctgttgctcctgctggctttggccgcaagggcggacggactggaatttggtggcggtcccggtcagtgggcccgatacgcacggtgggcgggagcggcttcaagcggtgaactgtctttcagtctccggacaaacgcgacccgggctcttctcctctacctggatgatggaggtgattgtgacttcctggagctccttctggtggatggacggctgcggctcagatttacacttagctgcgccgagcctgctaccctgcagcttgatacaccggtggcagatgaccgctggcacatggtgctgcttacacgggacgcaaggagaacagctcttgccgtggacggggaggctcgcgctgccgaggtacgttccaagagacgggagatgcaggtggcatctgacctctttgttgggggaattccacccgatgtgcgcctcagtgccttgactctatcaaccgtgaaatatgagcccccttttcgcggactgctggctaacctgaagctcggcgaaagaccacctgctcttctggggagccaaggattgcggggagccactgccgaccccttgtgcgcaccggctagaaacccgtgcgcgaacggcggattgtgtaccgtgttggcacctggcgaggtgggctgtgattgctcacatacaggatttgggggtaagttttgctcggaagaagaacatcccatggagggcccagcccatctaactctgaatagcgaggttggctcccttttatttagtgaaggtggggctggtcggggtggcgcaggggacgtgcaccaaccgacaaaaggaaaggaggaattcgtggcaacattcaaaggcaacgagttcttctgctatgacctgagccacaaccctatccagagctccaccgacgagatcacgttagctttcaggaccctgcagcgaaacggcttgatgttgcatacaggtaaaagtgcagattatgtgaacctatctctgaaaagcggcgctgtatggctggtcatcaacctgggctctggcgctttcgaagccctggtggaacccgtgaatggtaaattcaacgacaacgcatggcacgacgtacgtgtgacacggaatctcagacagcacgccggtatcggacatgcgatggtaactattagcgtggacggcattctcactaccacagggtacacccaggaggactacaccatgctgggaagtgatgattttttttacattggcggtagtccgaacacagcagacctgcctggctccccggtgagcaacaatttcatggggtgcttgaaagacgtagtttacaagaacaatgattttaagctggaattgtcccgcctagccaaggagggtgatccaaagatgaaactacagggagatctcagtttccgctgtgaggatgtcgccgctttagatcccgtcacattcgaaagcccggaggctttcgtggctcttcctaggtggagtgccaagcggacggggtcaattagcctcgacttcagaacgacagagccaaatgggctgctcctttttagtcagggacgcagagcagggggaggtgccggtagccattctagcgcgcagcgtgcagactatttcgctatggaactgctcgatggacacctctatcttttgttggacatgggttccggtggtataaaattacgcgctagcagccgcaaggtgaatgatggagagtggtgccacgtagacttccagcgggatggtcgcaaaggcagtatatcggtcaatagtcggtccaccccattccttgctaccggagacagcgaaattctggacctggaatcggagttgtatctgggcggactacccgaaggcggacgcgtcgacctgcccctaccaccagaggtgtggactgccgctctgagagccggatacgtgggatgcgtgagggacctcttcatcgacggccgttctcgggacctgcgcggtctagcagaagcccagggagcagtaggtgtggctcccttctgttctagggagaccctgaaacaatgtgcttccgcaccttgccgcaacggtggagtatgtcgcgagggctggaatagatttatttgtgactgtattggaaccgggttccttggcagggtgtgtgagagagaggctacagtgttgagctacgacggatccatgtacatgaagattatgctgccgaacgcaatgcatactgaagctgaggatgttagcctcaggttcatgagtcagcgtgcatacgggctcatgatggcgacgaccagtagagaatccgccgacacccttagacttgaattggacggcggacagatgaaactcaccgttaacctggattgcttaagagtcggctgcgcccctagcaagggcccagaaactctttttgctggccacaaattgaatgacaacgagtggcacacggtgagggttgtccggagaggaaaatccttacaattaagtgtggataacgtcactgtggagggccaaatggcaggggctcacatgcggctcgagttccataatattgagaccggcatcatgactgagcggaggttcatcagcgtggtcccgtcaaatttcattgggcatctgagcggccttgtcttcaacggccagccctacatggatcagtgcaaggacggggacatcacttactgtgagttgaacgcgagatttggactcagggctattgtggcggatcctgttacgttcaaatctagatctagctacctggccttggccaccctgcaagcatacgcttccatgcacctcttctttcagttcaaaacgacagcccctgatggactccttttatttaattctggcaacggtaacgacttcatcgtgattgaactcgtaaagggatatatacactacgttttcgacctggggaacggtcctagtctgatgaagggcaactctgacaaacctgtgaatgacaatcagtggcataatgtcgtcgtgagccgagacccaggtaatgtccacactcttaaaatagattccagaactgtaacacaacacagtaatggcgctcgcaatctcgacctcaagggtgagctgtacatcgggggacttagcaagaatatgttctcaaacctccctaagcttgtggcttcccgcgatggcttccagggctgtctggccagtgtggatctgaacggtaggctgcccgacctaatagctgatgctttgcatagaatcgggcaggtggaacggggttgtgatggaccatctaccacatgcacagaggaatcctgtgccaatcagggggtgtgtctgcaacagtgggacggttttacctgcgactgcaccatgaccagctacgggggaccagtatgcaatgatccagggacaacatacatcttcggcaagggaggcgctctaatcacctacacatggcccccaaatgaccgtcctagcacccgcatggacaggctggccgtgggtttctccacgcaccagagatcggccgtgctggtccgggtggacagtgcctccggcctgggcgattaccttcaacttcacatcgatcagggcaccgtgggtgtgatcttcaacgtgggcaccgacgatattaccattgacgagccaaatgccatagtttcagacggtaaataccatgtcgttaggttcacccgatccggtgggaacgccacacttcaggtggactcttggcccgtcaatgagcgttaccccgctggaaatttcgataatgagaggctcgctatcgcgaggcagaggattccatacaggctgggaagagttgttgacgaatggctgctggacaagggcagacagctgacaatttttaactcccaagccgctatcaaaatcggcggtcgggaccagggcagaccattccaggggcaagtgtccgggctttattataatggactgaaagtgctcgcgctcgctgccgaatctgaccctaatgtccggaccgagggacacctgcggttggttggagagggaccaagtgtgcttttgagcgccgaaacaactgcaaccacattgctggcagacatggcgactactattatggaaactaccactacaatggcaacaacgaccactcgaaggggaagaagcccaacacttagagactccaccacgcagaatacggatgatctgctggtcgcttctgcggaatgcccttctgacgacgaagacctggaggagtgcgagccgagcactgggggagagctgatattacctatcataacagaggacagcctggatccccctccagtcgccactcggagtccattcgtgcctccaccaccgaccttctatcctttcctaacaggcgttggagcgacccaggatacacttccccctcctgctgccaggcgccctccaagcgggggaccatgtcaggccgagcgggatgatagtgactgtgaagagcctatcgaagccagcggattcgctagtggagaagtgtttgacagcagtcttccgcctacagacgatgaagacttttacactacgtttccactggtgaccgacagaaccacactgctctctccaagaaagccagcacccagacccaatctcaggaccgatggcgctaccggagcccctggcgtactgttcgccccatcagcccctgctcctaatctccctgccggtaagatgaaccatagggatcccctacaacccctcttggagaatccacccctgggcccaggtgctcctacgtcattcgaaccccgtcgcccaccacccctgaggccaggggtgacatccgccccaggttttccgcaccttcctaccgctaacccaacaggccctggggagcggggaccacccggagcagtggaagtgatcagagagagttcctctactacagggatggtcgtgggcattgttgcagcagcagcgttgtgcatcttgatcctgctatacgcaatgtacaagtaccgtaaccgtgacgaggggagttaccaggtggaccaatcccgcaactatatctctaattcggcccagagtaacggagctgtggtgaaggagaaggcgccagcagcaccaaagacgccgagtaaagcgaaaaaaaataaggacaaagaatactatgtata

SEQ ID NO: 232303 - DNA, 2001 bp, synthetic construct
  misc_feature 1..2001: note = Description of Artificial Sequence: Synthetic coding sequence
  source 1..2001: mol_type = other DNA
atgccgcctggcggatccggtcccggagggtgtcctagaaggccacccgctttggccggacctttgcctcctccgcctccacctccccctccccctcttctcccactgctgcctttacttctgttgctcctgcttggcgcagccgagggagccagagtgtcttcctctctgtctaccactcatcacgtgcaccattttcactcgaaacacgggacggtgcccatcgccatcaacagaatgccttttctcacccggggtggacatgccggtaccacctacatttttggaaaagggggtgctctgatcacatacacctggccccctaatgatagaccgagcacaagaatggataggctcgctgtgggattctcgactcatcagagatccgcagtcctggtgagggtcgacagcgcttccggcctcggtgactacctccagctacacattgatcaaggcaccgtaggagtgattttcaatgttggaactgacgacatcactatcgatgagcctaatgcaattgtgagcgatggcaaataccatgttgtacgcttcacccggagcggcggtaatgccactctgcaggtcgacagctggcctgtgaatgagagatacccagccggaaattttgataacgagaggttggcaattgcaaggcagagaatcccctatcgactggggagagttgtggatgagtggctgctggataaaggtcgacagttgactatcttcaatagtcaggctgctattaaaatcggaggacgcgaccaaggcaggccattccaagggcaggtcagcggcctgtattacaacgggctgaaggtgcttgctctcgcggctgagtccgaccctaatgtgcgcaccgaggggcatttgagactcgttggagagggaccttccgtcctcctgagtgccgaaaccacagcgaccacactcctggctgacatggctactacaataatggagaccacaactacgatggctacaaccactactcgcagaggtagatcccccacactgagggactccaccacacaaaatactgacgatctgttggttgcaagcgccgaatgtcctagcgatgacgaagacctcgaggaatgtgaacctagtaccggaggcgaactgatcctccccattatcaccgaggactcattagatccccctcccgttgctacacgcagccccttcgtgccgccaccacccaccttctacccctttctcaccggcgtcggcgcaacgcaggataccctgccccctcccgctgcgcgacgacctccttccggcggaccgtgtcaggcagagagggatgatagcgattgtgaagagcctatcgaagcctccggcttcgcctcaggagaggtgttcgattcatcactgcccccaacagacgatgaggatttttacacaacatttcctttggtgacagacagaaccacactccttagtcctcgcaagcctgcccctcggcctaacctgcgtacagacggcgctaccggtgccccaggtgtcctgttcgccccaagtgctcctgctccaaacctgccggctggaaagatgaatcatcgggacccactacaacctctccttgagaatccccctctgggccctggagctcctactagtttcgagcctcggaggccgccaccactccgccctggtgtgacgtccgcgccaggctttccacacctgccgacggccaatcccacgggccctggtgagcgcggtcccccaggtgcagtggaggttatccgggaaagtagttctaccacggggatggtggtcggcatcgtggcagcagctgccctttgtatcttaatcctcctgtatgcgatgtacaagtaccgcaaccgcgacgaaggatcatatcaagtcgaccagtctcggaattatatctcaaactccgcccaatcaaatggggcagttgtgaaggaaaaagctcccgctgctcccaaaacacccagtaaagctaagaaaaacaaagataaagaatactatgtgtag

SEQ ID NO: 232304 - DNA, 1299 bp, synthetic construct
  misc_feature 1..1299: note = Description of Artificial Sequence: Synthetic coding sequence
  source 1..1299: mol_type = other DNA
atgcacctgcgcatacatgcccgacgatccccgccacggcgtccagcctggacgctgggcatttggtttctgttctggggctgcatcgtgtcgagtgtctggtcttctagtaatgtggcatcaagctcatccacttcctcaagcccgggatcccacagccagcacgagcatcactttcatggttccaagcatcacagcgtccccattagtatttacagatctcctgtttctctgagggggggtcacgctggggcaacctacattttcggaaagtcgggcggtctgatcctgtatacctggcccgcaaacgaccgcccaagcacgagatcagacaggttagccgtggggttcagtaccaccgttaaagacggaatccttgtaagaatagattcagcaccaggccttggggattttctccagctgcacatcgaacaaggaaagataggggtggtgttcaatattggcaccgtggatatctccattaaagaggagaggacacccgtcaacgacggtaagtatcatgtggttaggtttacccgaaatgggggtaatgcaactttacaagttgacaattggcctgtaaatgaacactacccaactggacgtcaacttaccatcttcaacacccaggcgcaaatcgcaataggcggaaaggataaaggcaggctgttccagggtcagctgagcggactatactacgatggcctcaaggtgctgaacatggcagcggagaacaacccaaacatcaagatcaacggcagcgtccgcctcgttggggaagtgccaagtatcttgggcaccactcagacgacatctatgccacccgaaatgtcaactacagtgatggagactacaacgactatggccacgacaacaacgcgtaagaataggagcaccgctagcatccagcccacatctgacgatttggtgtctagcgctgaatgctccagcgatgatgaggattttgtggagtgcgagccctccactggtagaagtgctaatcctacagaacccggtataagacgcgtgcccggagcctccgaggtgattcgtgaaagcagcagtacaaccggaatggtggtggggatagttgctgctgccgctctgtgtattttgatcctcctttatgctatgtataagtatcgcaatagagacgaagggtcttaccaagtcgatgagactcgcaactacatctcgaattccgctcaatccaatggcaccctaatgaaggagaagcagcagtcaagcaaatctggtcataaaaagcaaaagaataaggatcgagagtactacgtgtag

SEQ ID NO: 232305 - DNA, 4932 bp, synthetic construct
  misc_feature 1..4932: note = Description of Artificial Sequence: Synthetic coding sequence
  source 1..4932: mol_type = other DNA
atgagctccaccctgcactccgtgtttttcacacttaaggtgtcgattctgctggggagtctgctgggcctctgcctcggactggagttcatgggcctccccaaccagtgggcccgatacctaaggtgggatgcgagcactcggtccgacctctcctttcagtttaaaacaaacgtgtcgaccggactgctcttatatttagacgacggaggcgtgtgtgatttcctttgtctgtcactggtagatggcagagttcagctgcgtttttctatggactgtgctgagaccgcggtccttagtaacaaacaagtaaacgattcaagttggcacttccttatggtctcgcgggataggttaaggactgttctgatgctggacggggaagggcagtccggagaactgcagcctcaacgcccttatatggatgtggtctccgatttatttctggggggtgttccaactgacattcgcccatctgccctaacccttgacggggtccaagctatgcccggattcaaagggctcatcctggacctgaaatacggaaatagcgagcctcgcttgctaggctcacgcggtgtccagatggatgcagaaggtccttgcggagagcgcccttgcgagaatggtggcatttgcttcctccttgatggccatccaacatgtgattgttcgaccactggttacgggggtaaattatgtagcgaaggatcctctggggacccttgcctgtctcacctcatgatgtccgagcaggcacgcgaggaaaacgtcgctacatttcgtgggagtgagtacctgtgctatgatctgagccagaaccctatccagtcaagctccgatgaaatcaccctctcattcaagacttggcagaggaatggtttgattttacacactggcaagtctgccgattacgtcaaccttgctctcaaggatggtgccgtgagcctggtaattaatctggggtcaggggcatttgaagccatcgtggagcccgtgaacggcaaattcaacgacaacgcatggcatgatgtaaaggtcactcgcaatctgcggcaggtgaccataagcgtcgatgggatcctcacaactacagggtacacacaggaggattacacaatgctggggagcgatgacttcttctatgtaggtggttcaccaagtactgcagacttgcctggttctccagtaagtaataacttcatggggtgtctgaaggaggtcgtgtacaagaacaatgacattcggctggaactcagccggctcgcaagaattgcagataccaaaatgaaaatctatggagaggtggtttttaagtgtgaaaacgtcgctacacttgatcctatcaatttcgagacccctgaggcttacatctcactgccgaagtggaatacaaagcggatggggtccatctcgtttgacttcagaactacagagcctaacggactgatcctctttacccacgggaaaccacaagagcgaaaggacgctcgctcgcagaaaaacacaaaagtagacttctttgcggtcgaactgttagatggaaatctgtacctgctgctcgatatgggttcagggacaattaaggtcaaagcaacacaaaagaaagccaacgatggcgagtggtatcatgttgacatccagcgggacgggagatcgggtaccatttcggtcaattctaggagaaccccatttaccgcgtcgggagaatctgaaatcctggatctggagggggatatgtatctggggggactcccagagaaccgagccggactcatcttaccaacggagctgtggactgctatgttgaactacgggtatgtcggatgcattcgtgacctctttattgacgggcgtagtaagaacatacgccagcttgctgagatgcagaacgctgccggagtgaaatcttcgtgcagtcgaatgtccgctaagcagtgtgactcatatccttgcaagaacaacgctgtgtgtaaagacggctggaatcgcttcatatgcgattgtactggcacaggatattggggacgtacttgtgaacgggaggcctccattctgagctacgatgggagtatgtatatgaaaatcattatgccaatggtgatgcacacggaagcagaagatgtgtcctttcggttcatgtcccagagagcttacggcctcctggtcgctactacgtcaagggatagcgcggatacactacggttggaattagacgggggtcgcgttaagctcatggtcaatttagattgtattagaataaactgtaatagctcgaaaggccctgaaacattatatgccggtcagaaattaaacgataatgaatggcatacagtgagggtcgtcagaaggggcaaatcactgaagttgacagtcgacgacgacgtggcagaaggaaccatggtgggtgaccacacccgcttagagttccataatatcgaaacaggaatcatgacggaaaagcgctatatctccgtggtaccaagctcgtttatcggacacctgcagtcactgatgttcaacggtttgctctatatcgatctgtgtaaaaatggggacatcgactattgcgagctcaaggcacgctttggacttagaaacattatcgcagacccagtcacatttaagactaagagttcatacctttccctagctacactccaggcgtatacatccatgcacttgttctttcagtttaagacaacgtccccagatggtttcatcctgttcaatagtggtgatggcaatgatttcattgccgtggagctggttaaaggatacatacattatgtgttcgatctgggcaatgggcctaatgtcattaagggtaactcagacaggccacttaatgataaccagtggcataacgtggtgattacccgcgacaactcgaatacccactcccttaaggtcgataccaaggttgtcacccaagtcattaatggcgctaagaacctcgacctgaagggcgacctctatatggccggacttgctcaggggatgtatagtaatctcccaaagctagtggcctctagggacggtttccagggatgtctcgcatctgtggacttgaacgggaggctgcccgatctgatcaacgacgctctgcatcggagcggacaaattgaacgtgggtgtgaggggccatctacaacttgtcaggaggattcttgtgccaatcagggcgtttgcatgcagcagtgggagggatttacttgcgattgctccatgacaagttactccggcaatcagtgcaacgaccctggagcaacctacatcttcggtaagagcggaggactgatactctatacatggccggctaacgatcgcccaagtacaaggagcgaccggcttgccgtgggtttctctaccaccgtgaaggatgggatccttgtgaggattgacagcgcacctggcctgggagacttcctgcagctgcacatcgaacaaggaaaaatcggcgtcgtgttcaacataggaacagtggacattagcattaaagaagagcggacacccgtcaacgatggcaagtaccatgtagtacgattcacccgtaacggagggaatgctacacttcaggtggacaactggccagttaacgaacattacccgacaggcagacagttgacgatttttaatacccaggcccagatagcaataggcggtaaggacaagggtcgacttttccagggtcagctttctggcttatattacgacgggcttaaggtcttgaatatggcggctgagaacaacccgaacataaaaataaatgggtctgtgcggctcgttggtgaagttccttccatcctgggcaccacgcagactactagcatgccacccgagatgtccaccacagtgatggagaccaccaccacgatggcaactacaacaacaagaaagaaccgatcgacagcctccattcaaccaacgtctgatgatcttgttagttcagcagagtgtagcagcgatgatgaagatttcgtggagtgcgagccaagcacggctcgtggcgagcttgtaataccgcttctggtcgaggaccctctggctacaccaccaattgccacacgagctcctagcatcaccctaccccctacgtttcgaccgctccttaccatcatcgagactacgaaggactcattgtccatgacaagcgaagcaggattgccatgtctctcagaccagggatccgatggatgcgatgacgacggtttggtcatatcggggtatggtagtggggaaacatttgactcgaatctaccaccgacagatgacgaggatttttacaccacttttagtctggtgaccgataagagtctgtccacatcgatcttcgagggtggatataaggcccatgcacccaaatgggagtcaaaggactttcggccaaataaggtttctgaaacttcgcggaccaccacaacctctcttagtcccgaactcattcgtttcactgcttcctcttcttccgggatggtccctaagctgcctgcaggtaagatgaacaatagagacctcaagccacaacccgatattgtgttgctgccactacctaccgcgtacgaactggatagtactaaactgaagtctcctctcatcacatcccccatgttccgcaatgtcccgacggcgaatcccaccgagcccggaatacgccgtgtgccaggcgcatcagaagtaattcgggagagctcctccaccactggaatggttgttggaattgtcgccgctgctgctctgtgtattctaattttgctgtatgcgatgtacaaatacaggaaccgggacgagggatcataccaggttgacgagactcgcaattacatcagcaactcagcgcagtctaatgggacgctgatgaaagaaaaacagcagtcaagcaagtcgggccacaagaagcaaaagaataaggacagggagtactatgtctag

SEQ ID NO: 232306 - DNA, 4179 bp, synthetic construct
  misc_feature 1..4179: note = Description of Artificial Sequence: Synthetic coding sequence
  source 1..4179: mol_type = other DNA
atgtcatctacattgcactccgtattctttacacttaaagtaagtatcctgctgggcagtctgttaggcctgtgtcttggactcgaatttatgggactccctaatcagtgggctaggtacctgcggtgggacgcgtcgactaggagtgacctttcctttcagtttaagaccaatgtatccacagggctcctgctgtacttggatgatgggggtgtttgcgattttctgtgcctgtccttggtggacggcagggtgcaattgaggttctccatggattgcgccgaaaccgcagtgctgagtaacaagcaagtaaatgattccagctggcattttttgatggtgagccgggaccggctgaggaccgtgttgatgctcgatggcgaaggccagagcggggagctgcagcctcagagaccatatatggatgtggtatctgacctgttcctgggtggcgtccctacagacatccggccttccgccctcaccctggacggagtacaggctatgcctggttttaagggtttgatactcgatctgaagtacggaaatagtgagcccaggctgctcggcagcaggggcgttcagatggatgctgaggggccttgcggggagcgcccatgtgagaacgggggaatttgctttcttttagatggccatccaacgtgcgattgtagcaccaccggatacgggggaaagctctgctctgagggactgagccatctgatgatgagtgagcagggtcgctggaaggctcgtgaggagaacgtagccacctttcgaggctcagagtacctgtgttacgatctaagccagaatcctattcagagctccagcgacgagataactctatcgttcaagacctggcagagaaatggcctcatcctgcataccggtaagagtgccgactacgtgaaccttgctctcaaagacggtgctgtttcgcttgtgatcaacctcggctctggtgccttcgaggccatcgtcgagccggtgaatgggaaatttaacgataatgcgtggcatgacgtgaaggtcacgagaaaccttcgtcaagttaccatctcggtggacggaatcctgaccactacaggctacacgcaggaggactatacaatgcttggttcagacgacttcttttatgtgggcggttccccttctaccgcagatctcccagggtctccagtcagtaacaacttcatgggatgtctcaaggaagtcgtgtacaagaacaatgatatacgtctggagctgtccagactggcccgtatagcggacaccaagatgaaaatctacggcgaggtagtcttcaagtgcgagaatgtcgccacgctcgacccgataaactttgagacgcctgaagcgtacatcagcttgcctaagtggaacactaaaaggatgggcagtatctcctttgacttccgcacaacagaacctaacgggctgatactttttacgcacggtaagccacaagaacgcaaagacgcgagaagccagaagaatacaaaagttgattttttcgccgtagaattgctggatggaaatctttacctgctgctagacatgggaagcggcactattaaggtcaaggccacacagaagaaagcaaacgacggagaatggtatcatgtggacatccagagggacggacggagcggcacaatctcagtcaactccagaagaacaccctttaccgcgtctggcgaatctgagattctcgatctcgaaggcgacatgtatctgggaggcctcccggaaaatcgggctggcttgatactgccgaccgagctttggaccgcaatgctcaattatggttacgtcggttgcataagagatttgtttatcgacggccgttccaagaatattcgacagttggccgaaatgcagaacgctgccggagtgaaatccagttgctctcgaatgagtgctaaacagtgcgactcctatccctgtaaaaacaacgctgtttgcaaagacgggtggaacaggtttatatgtgactgcactggaacgggctactgggggaggacgtgtgagcgggaagctagcatcctgtcgtatgacgggagtatgtatatgaagatcattatgcccatggtgatgcacaccgaggcagaggatgtgagctttagatttatgagtcagagggcatatgggttgctcgtggctaccacctcccgggactctgccgacactctgcgccttgaattagacggcggtagggtcaagctgatggtgaaccttggaaagggtccggagacgctgtacgctggccaaaagctcaatgataacgaatggcataccgtccgagtggtaaggagagggaaatctttgaagctgaccgtcgatgacgatgttgccgagggaactatggttggagaccacacccgacttgaattccacaatattgagaccggcattatgaccgaaaaacggtatatcagtgtggtgccttcttcatttattggccacttgcagtcccttatgttcaacggattgctctacattgacttgtgcaagaacggagatattgattactgcgagctgaaggctagattcggactgaggaacattatcgcagaccccgtcacattcaagacaaagtcgtcctatctctccctagctacactgcaggcgtatacaagcatgcacctgtttttccagtttaagactacgagtcccgacggcttcatcctctttaattcaggagatggtaatgacttcattgccgtggagctggtgaaagggtacatacattatgtgttcgatttgggaaatggccctaacgtaatcaagggcaattctgacagaccattgaatgataaccagtggcacaatgttgtgatcacaagggataattcgaatacccactcgctcaaggtggacacaaaagtcgtgacccaggtcattaatggagccaagaacctagacctaaagggcgacctgtatatggctggtctcgcacaggggatgtacagtaatcttcctaaactggttgcttcacgtgacggctttcaggggtgtttggcctccgtggatctaaatggccgtctgcctgatttaattaatgatgcgctgcatcgctctggacagatcgaaagggggtgcgaggggccttccaccacgtgtcaagaggacagctgtgccaaccagggtgtctgcatgcaacaatgggaaggttttacttgcgattgttctatgacatcatactccggcaatcagtgtaacgaccctggcgcaacctacatcttcggcaaatctggcggattgattctctacacctggcctgccaatgatcgaccgtcaaccaggagcgacagactggccgtcggattctcaactaccgttaaggacggaatcctggtccgaatcgatagtgctcccggtctgggcgattttctacagttgcacatcgagcaaggcaaaatcggcgtcgtgtttaacattggcacagttgacatttctataaaggaagagagaacccccgttaatgatggcaaataccacgtcgtcagattcacaaggaacgggggaaatgctacactgcaggtggataactggcccgtgaacgaacactaccctacaggaaacaccgacaacgagaggtttcagatggttaagcagaagattccctttaaatacaatcggcctgtggaagagtggctacaggagaaaggcagacaactgacaatttttaacacccaagcccaaattgccatcgggggaaaagacaaaggcaggttatttcagggacagctttcaggcctgtactacgacggactaaaggtgctgaacatggccgcagaaaacaaccctaatatcaaaataaatggctctgtgcgacttgtcggggaggtccctagtatcctggggactactcagactacctccatgccgccagaaatgtctaccacagtgatggagaccacgactaccatggccaccaccaccacgcggaagaataggtccacagccagcatccagcctacttccgacgacctcgtttccagcgccgagtgtagttccgacgatgaggactttgtggagtgtgagccttctactggcaggagcgcccgaagcagcaacgccgcacgcagtctacgggctgctcttacctggacatggagactcacctatacttttactcccattatcttcattagttgtgtcgtccactcctag

SEQ ID NO: 232307 - DNA, 3186 bp, synthetic construct
  misc_feature 1..3186: note = Description of Artificial Sequence: Synthetic coding sequence
  source 1..3186: mol_type = other DNA
atgctggggtcggatgattttttttatgtgggcggttcaccatccacagctgatttacccggatcccctgtgagcaacaattttatgggatgtctcaaggaagtcgtatacaaaaataacgacattcggttagaattgtctcgtctggccagaatagcagacaccaagatgaaaatctacggtgaagtcgtgttcaagtgtgaaaacgtcgctacgctggatccaattaattttgaaacccccgaagcttatattagccttcccaaatggaatacaaagaggatgggatctatctctttcgattttcgaaccacggagcctaacggcctaatcctgtttacccatggcaagcctcaggagcggaaggatgcaaggtcacaaaagaacaccaaggttgacttctttgctgtcgagctgctagatggcaacctgtatctgctgctagatatgggttccgggaccatcaaagtaaaggcaacccagaagaaggccaatgacggagagtggtaccatgttgacattcagcgggacggcagaagcgggaccattagtgtcaattctcgcaggactccgttcaccgcctccggcgagagtgaaatcctggacctcgagggcgatatgtacttaggcggactgcctgagaatagggccggactgatcctgccaactgagttgtggactgcgatgctaaattatgggtacgttgggtgtataagggatctgttcatagacggccgttccaagaatattcgccagcttgctgagatgcagaatgccgctggggttaaaagtagttgttccagaatgtccgctaagcagtgcgatagttatccctgcaaaaacaacgccgtttgcaaggacggttggaatagattcatctgtgactgtaccggaaccgggtattggggaaggacgtgtgagcgcgaagcgtccatcttgtcttatgacgggagcatgtatatgaaaattataatgcccatggtgatgcacactgaagccgaagacgtttcgtttaggtttatgagtcagagggcctatggtctcctcgtagcaactacaagccgcgattcggctgatacccttcggctggagttggatggtggcagggtgaagctcatggttaaccttgattgtatccgcatcaattgtaactcaagcaaaggcccagagaccttgtacgcaggtcagaagttgaacgataacgagtggcacaccgtacgagtggtgcggaggggcaagtctctgaagctgaccgttgatgatgacgtcgccgaagggactatggtgggggaccatacaagacttgagtttcacaatatcgagaccggaattatgaccgaaaagcgatatatcagcgtagtaccctcatcattcatcgggcacctgcagagcctcatgttcaacggccttctttacatcgatctgtgcaaaaatggggacatcgactactgtgagctgaaggcaagattcggactgcggaatatcatagccgacccagtcaccttcaaaaccaaaagtagctacctttcactagcgactctccaggcatatacttctatgcatctgtttttccagttcaaaaccacatctccggacggctttattttgtttaattccggcgacggcaacgattttatcgctgttgagctggtaaaggggtatattcattacgtattcgacctgggcaatggtccaaacgttatcaaaggcaacagtgatcgacccctaaacgacaatcagtggcataatgtagttatcacccgtgacaactccaacactcacagtctgaaggtcgacactaaggtcgtcacccaggtcatcaacggagccaagaatttggacctgaagggcgatctgtacatggcaggcctcgctcagggaatgtactcaaatttaccaaagttggtggcaagtcgcgacggcttccagggctgtctggctagcgtggatctgaatgggagactccctgacctgattaacgacgctctgcaccgatctgggcagattgagcgcggttgcgagggcccatccaccacctgccaagaagactcttgcgctaatcagggagtctgtatgcagcagtgggagggattcacctgcgactgctctatgacatcctattccgggaaccaatgcaatgaccccggagccacatatatattcggcaaatcaggcggtctgattttgtacacttggcccgctaacgatcgcccaagcactcgctccgatcgcctggcagtcgggttttccactactgtgaaggatggcatcctcgttcgcatcgactcggccccagggctgggcgacttcctccaactgcacatcgagcaaggcaaaattggcgtggtgtttaacataggcacagtcgatatcagcataaaggaagagcgaacccctgttaatgatggtaaataccacgttgttcgattcaccagaaatggaggcaatgccaccttacaagtagataattggccggtaaacgagcattaccctaccgggaggcaactgaccatatttaacactcaggcccagatagctatcgggggaaaagataagggcaggctgttccaaggccagctgagcggactctactacgacggcttaaaagtgttgaatatggctgccgagaataatccaaacattaaaatcaacggctcggtgcgacttgtgggcgaggtgcccagtatcttagggactacacaaactacaagtatgcctcccgagatgtcaaccacagttatggaaactacaaccacaatggcgacaactactaccagaaaaaaccggtcaaccgctagtattcagcccacctcagatgacctagtctccagcgctgaatgctcaagtgacgatgaagacttcgtggagtgcgagccttctaccgcaaacccaactgagcccggaatccgaagggttcccggtgcaagcgaagtcatacgtgagtcgagctcaaccaccggaatggtggttggcatagtggccgctgccgcactgtgtattctgatcctcttatatgcaatgtacaagtatcggaacagggacgaagggagctaccaggtggacgaaaccaggaattacattagcaacagcgctcagagtaacggtacactgatgaaggaaaagcagcagagttcaaagtctggacataagaagcagaagaataaagatagagaatattacgtctag

SEQ ID NO: 232308 - DNA, 1380 bp, synthetic construct
  misc_feature 1..1380: note = Description of Artificial Sequence: Synthetic coding sequence
  source 1..1380: mol_type = other DNA
atgcacctccgcatccacgctcggaggagccccccacgaaggcctgcctggactctgggaatatggtttctgttttggggttgtatcgtgtcctccgtttggagttcttccaacgtcgcttcatcaagttcaacctctagctcccccggatcacatagtcagcacgaacatcattttcatgggtcaaagcatcacagcgtgcccatctcaatttatcggagcccagtgagcctaagggggggtcatgcaggagctacttacatatttggtaagtcaggtggcttgatcttatatacctggccagcaaatgaccgcccttctactcgaagcgaccgtctggcagtcggctttagcacaacagtgaaggatggtatcttggtccgaatcgattctgctcctgggctgggcgattttctccaactccacatcgagcaaggaaagatcggtgtcgtctttaatattggtaccgtggatatcagcatcaaagaagagaggacacctgtgaatgacggcaagtaccacgtcgtgaggtttacgcgcaacggcggtaatgccaccctgcaggttgataattggccagtgaatgaacattaccctacaggtaatactgacaacgagaggttccaaatggtcaagcagaagattccttttaagtataaccggcctgtggaggaatggctgcaggagaaaggtcggcagttaactatttttaatacacaggcacagatcgccatcgggggaaaggacaaaggtcgtctctttcaagggcagctctccggcttgtattacgacgggctgaaggtactgaatatggcggctgagaataaccccaacatcaaaatcaatgggtctgtacgcctggtgggcgaggtccccagcatcctcgggactactcagacgacaagtatgccaccggaaatgagcacaaccgtgatggaaaccacaacaacaatggcaacgaccacgacccgcaaaaatcggagcaccgcctctatccaacctacctctgacgacctggtttcgtccgctgaatgctcgtctgatgacgaggactttgtggagtgtgagccaagcactgccaatcctaccgagcctggtatacggagagttccgggtgcttccgaggtcatccgagaaagttcttcgaccacaggcatggtggtcggtatcgtggccgctgccgctttgtgtatactgattctgctgtatgccatgtacaagtaccggaacagggacgaaggatcttaccaggtcgacgaaactcgcaactacatcagcaattctgcacagtctaatggcacgctgatgaaggaaaaacagcagagttccaagtcgggccacaagaaacagaaaaacaaagatagggagtattacgtgtag

SEQ ID NO: 232309 - DNA, 3186 bp, synthetic construct
  misc_feature 1..3186: note = Description of Artificial Sequence: Synthetic coding sequence
  source 1..3186: mol_type = other DNA
atgctcggttccgatgatttcttttatgtcggaggctcaccaagcaccgctgacttgccagggagcccagtcagtaataactttatggggtgcctgaaggaagttgtgtacaagaataacgatattcgcctggagctgagtaggctggcgaggatcgccgacaccaaaatgaagatctacggtgaagtcgtgtttaagtgcgaaaacgtggctactcttgaccccattaacttcgaaacgcccgaggcctacattagcctgccaaagtggaacacaaaaaggatgggctctatttcattcgatttccgtactactgagccaaacggacttatcctcttcacacatggaaaacctcaagagcgcaaagacgccagaagccagaagaatacaaaagtggacttcttcgccgtagagctcctggacgggaacctgtatctgttgcttgacatgggctcagggactatcaaggtaaaggccacacagaaaaaggcaaatgatggagagtggtatcacgtggacatccagcgcgatggaaggtccggcacaatcagcgtgaactcaaggcgtaccccttttacagcgtctggcgaatctgagatcctcgatcttgaaggcgatatgtatctgggaggcctgccagaaaatcgcgcaggtttaattctgccaactgagctctggacagccatgctgaactatggatatgtgggatgtattagggatctgttcattgacgggcgttcaaaaaatatccggcagttagctgagatgcagaacgcggctggtgtgaagtccagttgctctcgaatgtccgctaaacagtgcgattcctacccatgcaagaataacgccgtttgcaaggacggttggaaccgcttcatatgtgactgtaccggcaccggatactggggcaggacttgcgagagggaagctagcatacttagttacgacgggtcaatgtacatgaagataattatgccgatggtgatgcatactgaggccgaagacgtgtccttcagatttatgtcacagagggcctacggactgcttgtggctaccaccagccgtgactccgcagacaccctgcggttggaattagatggagggcgagtcaagcttatggtgaatctcgactgtattcgcatcaactgtaacagctccaaggggcctgagaccttatacgcaggacagaagctgaatgataacgagtggcacacagtgcgcgtggtgagacggggaaagagcctgaagctgaccgttgacgacgacgtcgctgagggaacaatggtgggggatcacactaggctggaattccacaacatagaaacagggataatgactgaaaaaaggtacataagcgtggtgcccagcagcttcattggacatttgcagagtctgatgtttaacggcctcctttatatcgatctttgcaagaacggagacattgactactgtgaactgaaagcacgatttggactgcggaacattattgccgaccccgttacgtttaagacaaagtctagttacctgtccctggctacgctgcaagcatatacatcaatgcatctgttcttccagttcaaaactacatcacctgacggctttatcctgttcaacagcggtgacggaaacgatttcattgctgtggaattggtgaagggctatatacactacgtcttcgacttgggaaacggtcccaacgttattaagggaaacagcgaccggcctctcaacgacaaccagtggcacaatgtggtaattactcgggacaactctaatacccattcactgaaggtggataccaaggttgtaacgcaagtgatcaacggtgccaagaatctggaccttaaaggggacctttacatggccggtctcgcacagggcatgtattctaacctgccgaaactcgtggccagtagggacggctttcagggttgtctcgccagcgtggacctaaatgggcgactccccgacctaatcaatgatgctctgcatcggtccggccagatagaacgtggctgcgagggtccctctactacatgtcaggaggacagctgtgctaatcagggagtgtgtatgcagcaatgggaagggttcacatgtgactgttctatgacgtcctactcggggaaccagtgcaatgacccaggagccacatacatctttggcaaatcaggcggactcatcctatacacctggcccgcaaacgatcgcccatcaacacgaagcgatagactagcagtgggttttagcaccaccgtgaaagatggtatcctggtgaggattgactctgcgcctggacttggcgactttcttcagttgcatattgagcaggggaaaataggggtcgtatttaacattggaacagtagacatatctataaaagaggagagaacacccgtcaatgatggcaagtatcacgtcgttagattcacaaggaatggcggaaatgccactctgcaggtggataactggccagtgaacgagcactatccaactggcaggcaacttactatctttaatacacaggcccagattgccataggcggaaaagacaaggggagactcttccagggccagcttagtggactctactacgatggcctgaaagttctgaatatggccgctgaaaacaatccaaatattaagatcaatggaagcgtgcggctcgtcggcgaagtcccctccatactgggcacaacacagaccacctccatgcccccagaaatgagcacgacagtgatggagaccacaactactatggcaactaccactacacgaaaaaaccggtctaccgccagcattcagccgacttcggacgatcttgtgtcttccgctgaatgttcctctgatgatgaggatttcgtggaatgcgaaccatcaaccgcgaaccctacagaaccagggattcgcagggtgcctggggcttccgaagtgatcagagaaagttcgtctacaaccggtatggtggtaggaatcgtcgccgctgctgccctgtgcatcctgatcctgctctacgccatgtacaagtataggaacagggacgaagggagctaccaagtggatgagacacgaaactatatctccaactctgcacagagcaacggaacactgatgaaggaaaagcaacagagttctaaaagtggacacaaaaaacagaagaataaagaccgcgagtactatgtttag

SEQ ID NO: 232310 - DNA, 1914 bp, synthetic construct
  misc_feature 1..1914: note = Description of Artificial Sequence: Synthetic coding sequence
  source 1..1914: mol_type = other DNA
atgcacctgcggattcatgctcgcagaagtccgccaagaaggcccgcttggacacttggaatatggttcctcttctggggctgcatagtgagcagcgtctggtcttcatccaacgttgcctcatccagctctacatcatcctcccccggatctcactcacagcacgaacatcacttccatggtagtaaacaccactcagttcccattagcatctaccgctctccagtcagtctgcgagggggacatgctggtgccacgtacattttcgggaagagcggcggactgatcctatatacctggccagcgaatgatcgcccatctacgagaagtgataggctcgctgttggtttttcaaccacagtgaaggacgggattttagtgcggatagactccgcacccggattgggtgatttcctccagttacatattgaacaaggaaaaataggcgtcgtcttcaacatagggactgtggacatttctataaaggaagaaaggacacccgtcaacgatgggaagtatcacgttgtgcgttttactaggaatggcggaaacgcaacgttacaggtcgacaattggccggtcaatgaacattatcccactgggagacagctgactatcttcaacacccaggcgcagatcgccataggcggaaaagacaagggcagactgttccaagggcagcttagcgggctgtactatgacggcctgaaagtgctcaacatggcagcagagaacaatcccaatataaaaatcaacggctccgttcgtctggtgggcgaggttcctagcatccttggaactacgcaaacaaccagcatgccacccgaaatgagcactaccgtgatggagacaacaactaccatggcaacgaccaccacaagaaagaaccgcagtacagcctctatccaaccaacctccgacgacctggttagctcggctgagtgtagctccgacgacgaagattttgttgagtgtgagccctcaaccggtggggaactggtgattcctctgctggtggaggatcctttggctaccccgccaattgccacacgtgcacctagtataactctacctcctacatttaggcccttactcacaattattgagactacgaaagactcgttatcgatgacaagcgaggccggactgccctgtctgagtgaccaaggctctgacggatgtgatgacgacgggctcgtgatttctggctacggatccggggaaacattcgattccaacctgccaccaacagatgatgaagacttctatacaacttttagtttagtcactgacaaatctctgagcacctcaattttcgagggtggctataaggctcatgctccaaaatgggaatctaaggacttcaggcccaataaggtgtcagaaacaagcaggacgacaactaccagtctgagccctgagctgattcgattcaccgccagctcttctagtggaatggtgcctaagcttccggctggtaaaatgaataatcgtgacctgaagcctcaaccggacatcgtgctgctgcctctgcctactgcctatgaactcgactctacgaagctcaaatcaccgctgattacatctcccatgttccgaaatgtgcccactgctaaccctacagagcctggaatacgtagggtccccggtgcgtccgaggtaatccgagaaagttcgtctacgaccgggatggtggtggggatagtggctgcagccgcactgtgtattctgattcttctgtacgcaatgtacaagtatcgtaatagagacgagggctcctatcaagtcgatgaaacccgtaattacatcagtaacagtgcccagtcaaacggtactctgatgaaggagaagcagcaatcaagcaagagtgggcataagaaacaaaagaacaaggacagggagtattacgtgtag

SEQ ID NO: 232311 - DNA, 429 bp, synthetic construct
  misc_feature 1..429: note = Description of Artificial Sequence: Synthetic coding sequence
  source 1..429: mol_type = other DNA
atgggcctcaaacttaacggcagatacataagcctgatcctggccgtacagatcgcttacctcgtccaggccgttcgcgctgccggaaagtgcgacgccgtgttcaagggtttcagcgattgtctcttgaagctgggcgactcaatggccaattatccccagggactcgatgacaaaacaaatattaagactgtgtgcacctattgggaggacttccactcctgcaccgtcacagcccttacagactgccaggagggcgctaaggacatgtgggacaagctgcgcaaagagagcaagaacttgaatatccaggggagcttatttgagctctgcgggtccggcaacggggctgccggttccctattgccagcattccccgttcttcttgtaagtctgtcagctgcactggccacctggttgtcattctag

SEQ ID NO: 232312 - DNA, 8840 bp, synthetic construct
  misc_feature 1..8840: note = Description of Artificial Sequence: Synthetic coding sequence
  source 1..8840: mol_type = other DNA
atggctagtgagaagcctgggcctggcccaggtctggagcctcagcccgtgggactgatcgccgtgggggcagccggtggcggaggagggggttccggagggggtggaactggaggttctggaatgggcgagttacgcggagccagcgggtccggcagtgtaatgcttcccgcagggatgataaacccttctgtacctatcagaaatattcggatgaaattcgctgtgctaattggtctgatccaggtcggcgaggtcagcaaccgcgacatcgtggaaaccgtgcttaatttgctagtaggcggagaattcgatttggaaatgaattttatcatccaggacgctgaatcaatcacatgtatgacagagctcctagagcattgcgacgttacttgccaggctgaaatctggagtatgttcactgctattttgcggaagtccgtgcggaatctccagactagcactgaggttgggctcatagaacaggttttgctgaaaatgagcgccgttgatgatatgatcgcagatctcttagtcgatatgctgggggtactggcgtcctattccattaccgttaaagagcttaagctcctcttctctatgcttcgaggagaaagtggaatatggcctaggcacgctgtgaagctcctgagtgttctgaatcagatgcctcagaggcatggcccagacactttcttcaacttcccaggctgttcagccgctgcaatcgccctgcctcctatcgccaagtggccttaccagaacggtttcacactgaatacatggttccgcatggaccctctcaataacataaacgtggataaggacaaaccctatctgtattgcttcaggacttccaagggggtcgggtacagcgcacatttcgtggggaactgtcttattgtcacctccctgaagagcaaaggcaagggcttccagcactgcgtgaaatatgacttccaaccccgaaagtggtacatgattagcatcgtccatatctataataggtggcgcaacagcgaaatacggtgttacgtgaatggacagctcgtaagttatggagacatggcctggcatgtcaacactaacgactcgtacgataagtgctttctgggttccagcgagactgccgacgcaaatcgcgtcttctgcggccagctgggggctgtttacgtgttttccgaggcgctgaatccagctcagattttcgccatccatcagctcgggcctgggtataaaagcacatttaagtttaagtcagaaagtgacatccacttggccgaacaccataaacaggttctctacgatggaaagctggcctcatctatcgcctttacctacaatgccaaagcaaccgacgcccagctctgcctagagagttcgcccaaagagaacgcttccatatttgtacactcaccccacgctctgatgctgcaggacgtgaaagctatcgtgacacacagtatccactccgctatccactctatcggtgggatccaggtcttgttcccacttttcgcacagctcgacaaccgtcaactcaacgactcgcaagtggagaccaccgtgtgtgcaacccttttggcgttcttggtggaactcttgaagtcctctgtggctatgcaggagcagatgttgggaggaaaggggtttttggtgatcgggtacctgctggaaaagtcctctcgtgtgcacatcaccagagccgtgctggaacagttcctgtcatttgcaaagtatctggacggcctcagtcacggtgccccattacttaagcaactgtgcgatcacattctgtttaatcccgctatttggattcacacccctgcaaaagtgcagctatctctgtatacctacttatctgccgagtttatcgggacagccaccatctacacaactatcagacgtgtcggtactgtgctgcagctgatgcacaccctgaaatattattactgggtgataaaccccgctgactcttcgggcataacccctaagggcctcgacggcccaaggccctcgcagaaggaaattattagtctaagagcatttatgttgttattcctgaaacagttgattctgaaggatcgtggggtcaaggaagacgagctccagagtatcctgaattatctgctgaccatgcacgaggatgaaaacatacatgacgtcctgcagctgctggtcgcactcatgtcagagcatcccgcatctatgatccccgcatttgaccaacgaaacgggatcagagtgatttacaaactcctcgcctctaaatctgagtccatttgggtacaggctctgaaggtcctgggttatttcctgaaacacctgggccataagcggaaagtagagataatgcatactcacagcctgtttacgctgcttggcgaacggctgatgctgcataccaacacagtgactgttacaacttataacacgctgtacgagatcttaaccgaacaggtgtgcactcaggtggtgcacaaacctcatcccgagcccgacagcactgtcaagatccaaaacccaatgatcctcaaggtcgttgccacacttctaaagaatagcacaccctccgctgagctgatggaagtacgtcgcctatttttatctgatatgattaagttattcagtaacagccgcgagaatagacgctgtttgttgcagtgtagtgtgtggcaggattggatgttctcactgggatacattaaccctaaaaattccgaagagcagaagattacagaaatggtttacaatattttcaggattttattgtaccacgccattaagtacgaatgggggggttggcgcgtgtgggttgacaccctaagcatcgcccacagtaaagttacatatgaggctcataaagagtatttagccaaaatgtatgaagaataccagcggcaagaagaagagaatataaaaaagggaaagaaaggcaatgtttctactatatccggtctctcctctcagacgactggggctaaggggggaatggagataagagagatcgaagacctgtctcaaagccaaagccccgagagcgaaacagactatccggtatcaaccgatacacgggacctcctcatgtcaaccaaggtctctgacgatatactgggaaactctgatcggccaggaagcggagtgcacgttgaagttcacgacctcttggtggacataaaggcagaaaaagtggaggctactgaggtgaagctggacgacatggatctgagtccagaaacactggttggcggagaaaacggcgctttagtggaagtcgaaagcttgctggacaacgtatattccgccgcagtggagaagctacaaaataacgtacacggcagtgtagggataatcaaaaagaatgaggaaaaggataatgggcctctgattacactggctgacgagaaagaagatcttccaaactcctccacctcgtttctctttgataagatccctaagcaggaggagaaacttctgccagaactgagttcaaaccatatcattcctaacatacaggatactcaggtgcacctgggggtgtcagacgacctcggcctactggcccatatgaccggtagtgtggatctgacatgtacgagtagcataatagaggagaaagagttcaagatacacactacctccgatgggatgtcaagcattagcgaaagggacctggcctcgtctactaagggcctggagtatgccgagatgactgcaacaacactggagacagaaagtagctcctcaaagatcgttcccaacattgatgcgggatccatcattagcgatactgagagaagcgacgatgggaaagagtccggcaaggaaatcagaaaaatccaaactaccacaacgacacaagccgtgcaggggagatccatcacccagcaggaccgggatctcagggtcgacctgggattccgaggtatgccaatgactgaggagcaacggagacagttcagccctggaccacgcacgactatgttccgcatccccgagtttaaatggtctcctatgcaccagagacttctcaccgatctcctattcgccctggagacagatgttcacgtctggagaagccactccacgaagtctgtcatggactttgtgaactccaatgagaacataatttttgtacacaacaccatacacctgatctcccaaatggtggacaacatcatcattgcctgtgggggtatcttacccctgctcagcgccgcaacgtcgccgaccgtgagtaaaacggagttagaaaacattgaagtgacacaaggaatgtctgcagagaccgccgtcacctttctgtccaggctcatggctatggttgacgtgctggtgttcgccagcagcttgaatttttcagagattgaagcagagaaaaatatgtctagtgggggactgatgcgccagtgtctgcgcttagtgtgttgcgtagctgtcagaaactgcctggagtgcaggcagcggcagcgggaccgcggaaataaaagctctcacgggagctccaagcctcaggaagtgccccagagcgtgacggccaccgccgcatccaagacgccccttgagaacgtgcctgggaacttgtcaccaatcaaagaccccgaccgcttgttacaggatgtggacatcaatcgattgcgggcagtggtgtttcgggatgtcgatgatagcaaacaggcccagttcctggcactcgctgtcgtctattttatcagtgtgcttatggtgtccaagtacagggacatactggaaccccagagagagaccacaaggactggcagtcagccagggcgtaacatccgtcaggagatcaactcaccgacgtcaaccgtcgtggtgattccatccattccccaccctagtctgaatcatggttttctggccaagctgatacctgagcagagttttggccacagtttctacaaagagacccctgccgcattccctgatacgattaaagagaaagagacccccacccccggagaagatattcaggtcgaatcaagcattcctcatactgatagcgggatcggagaggagcaggtcgcgtcaatactgaacggagccgaacttgagacctccaccgggccagacgcaatgtctgaactcctgtcgacgctgagcagtgaggtaaaaaaatctcaagagtccctaactgagaacccgagtgagactttaaaaccagcgacctcaatctcatctatctcacagaccaagggtattaacgtgaaggagattcttaaatccttggtagctgctcccgtcgagattgctgagtgcgggcctgaaccaatcccgtatcccgaccccgctctcaaacgtgaaactcaggcaattttgcctatgcagtttcatagcttcgatcgttcagtagtggtcccagtcaaaaaacccccacccggaagtctggccgttacaactgtgggggctaccacagcgggatcaggtctgccgaccgggtcgacgtccaacatttttgcagcaaccggtgccacacccaagtctatgataaacaccactggtgctgtggacagcgggagttcttcgtcatcttcaagcagctcttttgttaatggggctacctctaaaaacttgcctgcagtccaaacagtagccccaatgcctgaagacagtgcagaaaatatgagtattacagctaagttagaacgcgcattggagaaagtggccccactgttgcgtgaaatcttcgtggatttcgcccctttcctgtcgcggacactgctgggcagccacggtcaggagctgctgattgagggtctggtctgtatgaaatctagcacctctgttgtggaattagtgatgctgttatgttcacaagagtggcagaatagtatccaaaagaacgccggactcgccttcattgagttaatcaacgagggacgactgctctgtcacgcgatgaaggatcatatcgtgagagtggctaatgaagcagagtttattttgaatcgccagagagctgaggatgtgcacaaacacgcggagtttgaatctcagtgcgcccagtatgccgcagaccgaagagaggaagaaaagatgtgcgaccacctgatctctgctgctaagcacagggaccacgtcacggcaaatcaattaaagcagaagatcttgaatatcctgactaataaacatggagcgtggggtgctgtcagccatagccaactgcacgatttttggcgcctggactattgggaagacgacctgcggaggcgcaggaggtttgtccgaaacgcctttggctctactcacgcagaagcgctgctgaaggccgctattgagtacgggaccgaggaggacgtggtgaagagcaaaaaaaccttcagatcccaggccatagtgaatcagaacgctgaaactgaacttatgctggaaggtgatgatgatgcagtgtctctgctgcaggagaaagagattgataatctcgcgggacccgtcgtcctcagtacacctgcacagctgatagcccctgtggtagttgcaaaggggactttatccatcacaaccaccgaaatctattttgaggtcgacgaggatgactcagctttcaagaagattgatacgaaagtgctcgcctacacagaaggcctgcacggtaagtggatgttctctgagattagggccgtgttctcacgtcggtatttactacagaacacggctctggaggtcttcatggctaaccgcacctcagtcatgtttaacttccccgaccaagccactgtaaaaaaagtggtttacagtctcccaagagtcggtgtcgggaccagttacggattaccacaggcaagacgcatttccctggcaaccccgaggcagttgtacaaatcatcaaatatgacccagcggtggcagcgcagagagatctccaacttcgagtacctgatgttcttaaacacgatagctggaagaacctacaatgacttgaaccagtacccggtcttcccatgggtactgacgaattatgagtctgaggagctcgacctcacgctcccaggcaatttccgcgacctgtctaagcccattggcgctctcaaccccaaacgggctgtcttttacgctgagagatacgagacatgggaagacgatcagtctcctccgtaccactataatacccactattcaaccgccacctcgaccctgtcctggctcgttaggattgagccttttactacattctttctgaacgccaacgatggtaagtttgatcacccagatagaacttttagctccgttgctcggtcctggagaactagccaaagggatacatccgacgtgaaggaactcatacccgaattctattatttgcccgagatgttcgtgaatagcaatgggtataatctcggcgtacgggaggatgaagttgtcgtgaatgacgtggatctgcctccgtgggccaaaaagcccgaagactttgtcaggattaatagaatggctctggagtccgaattcgtatcatgtcagctgcaccagtggatagatcttatcttcgggtacaagcaacgcggaccagaggctgtacgtgcacttaacgtgtttcattacctcacctacgagggctcagtaaacctggactcgattacggatccagtgctgcgcgaggccatggaagcccaaatccagaattttggacagactccaagtcagctcctcatagaacctcatcccccacgctcatctgccatgcacctttgtttcctgccacagagcccccttatgttcaaggaccaaatgcaacaagacgtgatcatggtactgaagttcccttccaatagtcccgtgacacacgtcgccgcaaacacactcccccacctgaccatccccgcagtcgttacagttacctgcagtcgtctgtttgctgtgaacaggtggcacaatacagttggattgagaggtgctccgggatacagcctagaccaggctcaccatttgcccatagaaatggaccctttgatcgctaataacagtggcgttaacaagcgccagattaccgatctggttgatcagagtatccagattaatgcccattgttttgtggtcactgccgataatcgctatatcctaatctgcggcttctgggacaagtcctttagggtatactccactgagaccggaaagcttacccaaatcgtcttcggtcactgggatgtggtgacctgtctggcaaggtctgaatcctacatcggtggggactgctacatcgtttccgggtcacgcgacgccactctgcttctttggtattggagcggcaggcatcatattataggagataacccaaatagcagcgactatccagcgcctagggctgtgttaactggtcacgaccatgaggtcgtctgcgtcagcgtgtgtgcggagctgggacttgtaattagcggcgctaaagagggtccctgcctcgtgcataccatcactggtgacctcctccgtgccctggaggggccagagaattgcttattcccacgcctgataagcgtgagctcagaaggccattgcataatatactatgaacggggaagatttagtaacttttctatcaacggtaagctactggcccagatggagatcaatgactctacaagagctatattgttatcttccgacgggcagaatctggtgaccgggggagataatggcgtcgtcgaggtatggcaggcctgcgattttaaacagctctatatttatcccggttgtgatgcagggatccgagcaatggacttgagccacgatcagcgcacccttatcaccgggatggccagcggctcgatcgttgcctttaacattgatttcaacaggtggcactacgagcatcagaataggtacta

SEQ ID NO: 232313 - DNA, 1575 bp, synthetic construct
  misc_feature 1..1575: note = Description of Artificial Sequence: Synthetic coding sequence
  source 1..1575: mol_type = other DNA
atgttcgtgaactccaatggctacaatctcggagtccgggaggacgaggtggtagtgaacgacgtggacttacccccatgggccaagaaaccggaagacttcgtgcgaatcaataggatggccttggagtctgaattcgtatcatgtcagttacaccagtggatcgatcttatttttggctataaacagagaggccctgaagcggtgcgagctctgaacgtattccactatctgacatatgaaggcagcgtgaacttggacagcattacagatcccgtgctgcgagagattcccgaggcctattttatacgtgaccctcatacgtttttactaactaaggatttcattaaggctatggaggcgcagatccagaactttggacagactccatcccagctgctgatagagccacaccccccacgcagcagtgccatgcacctttgctttttgccccagtcccccttgatgtttaaagatcaaatgcaacaggatgtcatcatggtgctgaaattcccttccaacagcccagtgactcacgtcgctgctaacaccctgccccacctaaccatccctgccgtggtaacagtcacttgtagccgcttgtttgccgtcaacaggtggcataacactgtgggcctcagaggggctcccggatatagccttgaccaggctcaccacttgcccatagaaatggaccccctgatcgccaataactcaggggtgaacaagagacaaattaccgatttggttgatcagagcatacaaatcaatgcccattgcttcgtcgtgacagctgataataggtatattctgatttgcggcttttgggacaaatctttccgcgtatacagtacagaaacaggcaaactcacacagatcgtcttcggccattgggacgtcgtcacgtgtctcgccagaagtgagtcctacatcggaggagactgttacattgtctcaggttccagagatgccacacttctgctgtggtactggtcagggcgacaccacatcataggagataacccaaatagttccgactaccctgccccacgcgctgtgctaaccggccatgatcacgaagtggtttgcgtctctgtatgtgccgagctcggactcgtgatatccggggcaaaagaggggccatgcctggtgcacaccataacaggtgacttgttgagggcgctggaaggtccagagaactgcctgttcccaagattaatctctgtgagttcggagggccactgtattatctactacgagagaggacgcttctctaacttcagtatcaacgggaaactgctcgcgcagatggagattaatgatagtacaagagcaatcctgttgagctccgatggtcagaatcttgtcacaggtggcgacaacggtgtggtcgaggtgtggcaggcctgtgattttaagcagctttacatctaccccggatgcgatgccggaataagagctatggacctgtctcatgatcaaaggacgctcatcacgggcatggcctcgggttcaatcgtggcttttaatatcgattttaaccgttggcattatgagcaccagaatagatactag

SEQ ID NO: 232314 - DNA, 8831 bp, synthetic construct
  misc_feature 1..8831: note = Description of Artificial Sequence: Synthetic coding sequence
  source 1..8831: mol_type = other DNA
atggcttccgagaagcctggacccggacctggattggaaccgcagcccgttggcctgatcgcagtcggcgctgccggaggtggcggagggggatctggtggaggagggactggcggttctggaatgggtgagcttaggggtgccagtggctccggaagcgttatgctccctgccggtatgattaatccatctgtgccaattaggaacatccggatgaaatttgcagtgctgatcggcctgatccaggtgggagaggtgagcaaccgcgacattgtcgagaccgttctgaatctccttgtaggaggtgagttcgacttggagatgaatttcattatccaggacgctgagtcaataacctgtatgactgaactgttagaacactgcgatgtgacttgccaagcagagatctggagcatgttcaccgccatcctgcgcaaaagcgtgcggaacctgcagacgtctacagaggtgggccttattgagcaggttctcctgaagatgtccgccgttgacgacatgatcgcagacttactggtggatatgctgggcgtccttgcgagttatagtatcaccgttaaagaactcaagctgctgttcagcatgctcaggggcgaatccgggatctggcctagacatgccgtgaagctccttagcgtgttgaaccaaatgcctcagagacatggtccagataccttcttcaatttccccggttgctccgccgctgcaattgctctccctccaatcgctaaatggccataccagaatgggtttaccctgaatacctggtttcgcatggaccctcttaataatattaatgtcgataaagacaagccttatctctactgcttccgcacatctaaaggcgtaggctactctgcgcactttgtgggcaattgtcttatcgtgaccagcctgaagtctaaaggtaaggggttccagcactgtgttaagtacgatttccagcccagaaaatggtacatgataagcatcgtacacatctacaaccggtggcgcaactccgagatacggtgttacgttaacggccagctcgtgagttatggagatatggcttggcatgtaaacaccaacgattcttatgacaaatgtttccttggctcatccgagaccgctgatgccaacagagtgttctgcggtcagctgggcgctgtatatgtcttctcagaagccctaaatcccgcacaaatcttcgcaatacatcagttaggacctggctataagtcaacatttaagtttaaaagcgagtccgatatccatttagcagaacatcataagcaggtgctgtacgatggtaagctggcatcttcaatcgcctttacttacaacgcaaaggccactgatgcccagctttgcctcgaatcttccccaaaagagaatgcatctatctttgtgcactccccccacgctctcatgttacaagacgtgaaagctatcgttacccacagtatccactccgccattcactcaattggaggaatccaggtgcttttccctcttttcgcacagttggataacagacagctcaatgattcacaggtcgagaccacggtgtgtgccaccctccttgcctttctggtcgagctgctgaagagctccgtggccatgcaggagcagatgctgggagggaagggttttctggtcattggctatctgctcgagaagtcatctagggtacacatcacccgcgcagtattggagcagtttctcagcttcgccaaatatttagacggtctctcccacggggctcccctgcttaaacagctttgcgaccacattctctttaatccagccatttggatccacacacccgcaaaagtccaactatcactatatacatatctttcggcagagttcatagggacagccacgatttatacaacgattaggcgggtcgggacggtgcttcaactgatgcacacccttaaatattactactgggtcataaatccagccgactcatccggaatcacaccaaagggactggacggcccacgtccttcacagaaagaaataatctctctcagggctttcatgctgctgttcttgaagcagctgatccttaaggacagaggagtgaaggaagatgagttgcagagcatactcaattacctgttgaccatgcatgaggacgaaaatatccatgatgtgctgcagctattggtcgccttgatgtccgaacatcctgcatcaatgattcctgcgtttgatcagagaaatggtattagggtaatttataagcttctcgcatcaaagtctgagtccatctgggttcaggccctaaaggtgctggggtatttcttgaagcacctgggccataagcggaaggttgaaataatgcatacacattccctgttcacccttctgggcgagcggttaatgctccatactaatacggttactgtaaccacctacaatactctctatgagatcctgactgaacaggtgtgcacccaggtagttcataagcctcaccccgagcctgactcaacggtcaagatccagaacccaatgattcttaaagtggtggctactctcctcaaaaattctactcctagcgccgaactgatggaagtcagacgcctgttcctttctgatatgattaaattgttttcaaattcacgggagaaccgaagatgccttcttcagtgctctgtgtggcaggactggatgttctcgttggggtacattaaccctaagaactctgaggagcagaaaattacagaaatggtctacaacatttttcgcattttgctgtaccatgccataaaatacgaatggggcggttggcgggtatgggtggataccctgtctatcgcccacagtaaggtgacatacgaagcccataaagagtacttagcaaaaatgtatgaagaatatcagcggcaggaagaagagaacattaaaaagggcaaaaagggcaatgtaagcacaatatccgggctgtcctcacagactactggggcaaaaggcggaatggaaatcagagagatagaggacttaagtcaatcgcagtctcccgagtctgagacagactatcccgtgtccacggacactagagatttgctcatgagcactaaagtctctgacgacattctgggaaatagcgaccggccaggaagcggtgtccacgtcgaagtccatgacttactagttgacataaaggccgaaaaggtggaggccacagaggtgaaactggatgacatggacctcagcccagagactctcgttggaggcgagaacggcgcactggtggaagtggaatctcttctggataatgtgtactctgccgcagttgagaaacttcagaataatgtgcatggctccgtcggtataattaaaaagaatgaagaaaaggacaatgggcctcttattaccctggcggatgagaaggaggatctaccgaactcttcgaccagcttcctcttcgataaaattccaaagcaggaagagaagctgttgcccgaacttagctctaatcacattatccccaacatccaggatacgcaggtacacttgggggtgtcggatgacctcgggcttctggcacatatgaccggcagtgtggatcttacatgcacctcttctattatcgaggaaaaagagttcaaaattcatactacctctgatgggatgagcagtatctcagagagagacctggcgtccagtaccaagggccttgagtacgccgaaatgacggcaaccacactcgagaccgagtctagctcctccaaaatagtgccgaacatcgacgccggttctatcatatccgacactgagcggtccgacgacggcaaagagagcgggaaagagatcagaaaaattcaaactacaaccacaactcaggccgtgcaaggcaggtccatcacccagcaggatagagacctgagagtagacctgggtttcaggggaatgcccatgacggaagagcagagacgccagttcagccccggaccgagaaccaccatgttccgaattcctgagtttaaatggtctccaatgcatcagcgcctcctgactgatttactcttcgcactggagacggacgtccacgtctggagaagtcattctaccaaaagcgtcatggattttgtcaatagcaacgagaacatcattttcgtgcacaataccatccacctgattagccagatggtcgacaatatcattattgcatgcggcggaatactgcctctcttgtccgctgccacttcacctaccactgaactggagaacatagaggtaacgcaggggatgtccgccgagacggccgtgaccttcctctctcgactcatggccatggttgatgtcctagtttttgcctctagcctcaacttctctgagatcgaggctgagaaaaacatgagctcaggaggccttatgcgccagtgcctgcgcctcgtatgttgcgtggcagttcgaaattgtttagaatgtaggcagaggcagcgtgacagagggaacaagtcgagccacggaagctctaagccacaggaagtgcctcagagcgtaacagccactgccgcatccaagacgccccttgaaaatgttcctggaaacctatctcctattaaggacccagatcgcctactgcaggacgtggacatcaacagacttcgtgccgtcgtgtttagagatgttgacgacagtaagcaggcgcagtttctggcactggcggtcgtgtatttcatcagtgtgctcatggttagtaagtaccgggacatcctggaaccacagagagaaacaacacgtactggtagccagcccggaagaaacattcgccaggagattaactcccccacaagtacagttgtggttatcccttccatcccacatccgtctctcaaccatgggttcctcgctaagctgattccagagcaatcctttggtcattcattctataaggagacacccgctgccttccctgatacaattaaggagaaggagacacctactcccggagaggatatccaggttgagtcaagcatcccacacaccgattccggaattggcgaagagcaggttgccagcatattaaacggagccgaactggaaaccagtacaggtcccgacgctatgagtgagcttttgtccaccctaagcagcgaagttaagaagtcccaggagtcattaaccgagaaccccagtgagacattgaaaccagcaacgagcatttccagcatctcgcagaccaagggcataaatgtcaaagaaattttgaagagtttggtggctgccccagtggagatcgccgaatgtggacctgaacccatcccttatcctgatccggctctgaaacgagaaacccaagccatcttgccaatgcagttccattcgttcgataggtcagtagtagtccccgtcaagaaacctccacccggaagcctagctgtgactacagtaggtgccactactgccggatccggccttcctacaggatctacatctaatattttcgcggctacaggtgccactcctaaatcaatgattaataccacaggggctgtcgactctggttccagtagctcctccagttcctcctcttttgtgaacggagctacctcaaagaacctacccgctgtgcaaacggttgcaccaatgcccgaggactcagccgaaaatatgagcatcactgctaaactcgaaagggctctggagaaagtagcccctttgctccgggagattttcgtggatttcgcaccttttctctcaaggaccttgctcggctcacacggacaggagctgctaatcgagggcctggtttgtatgaaatcaagcacctcagtcgtcgaacttgtgatgctattgtgttctcaggaatggcagaactccattcagaaaaacgctggactggctttcatcgaactaatcaatgaaggcaggctgctctgccacgcgatgaaggatcacatagtcagggtggccaatgaagccgagttcatattaaatagacaacgtgcagaggacgtgcacaagcatgcagagtttgagtcgcagtgtgctcaatatgccgctgatcggcgagaagaagaaaaaatgtgtgaccacctgatctctgcagcaaaacacagggatcacgttacagccaaccagttgaagcagaagatcctcaacatcttgaccaataaacacggcgcttggggtgccgtcagtcacagtcagttacacgatttttggcgcctggattattgggaagacgatctccgcagaagacgcagattcgtcagaaacgccttcggcagtacccatgccgaggcactgcttaaggctgcgatcgagtacgggacagaggaagacgtggtcaagagcaagaaaactttcagatcacaagccatcgtgaatcaaaacgccgaaacagagctaatgctcgaaggcgacgacgatgccgtgtctttgttacaggagaaagagatagacaaccttgctggccctgtggtgctatccacacccgctcaactgatcgctccagtggttgtcgccaagggtactctaagcataacaaccacagaaatctactttgaggtggacgaggatgactcagcctttaaaaagatcgacacaaaagtgctggcgtacactgaaggcctgcatggaaagtggatgtttagcgaaattcgcgcagtgttttctagaaggtacctgcttcaaaacaccgctctggaggtgttcatggcaaatcgaaccagcgtgatgttcaacttcccagaccaggcaactgtgaagaaggtggtgtactccctgccaagagtcggggtgggcacaagctacggattgcctcaggcccgtaggatttccctcgccacccctcgccagttgtataaatccagtaacatgacacagcggtggcagaggcgcgagattagcaactttgaatatctcatgtttcttaacacgattgcaggcaggacatataacgacctcaatcagtacccagtctttccctgggttctaaccaactacgagtccgaagagctggatctcacgctacctgggaatttccgcgatctgagcaaacccatcggtgccctcaatcctaagagagctgtgttttatgcagagcgatacgaaacatgggaggatgaccagagccccccttaccattacaacactcattatagcactgcgactagcactcttagctggttggtccgaattgaacctttcactaccttcttcttgaacgccaacgatggaaaattcgatcatcctgatcgcaccttttcgagtgttgcacgcagttggcgcacctcccagagggacactagtgatgtgaaggagctgatccccgagttctactacttgcccgagatgtttgtcaattccaatggctataatctgggcgttagagaagacgaagttgtagtgaatgacgtggacctccccccttgggccaagaaaccagaggacttcgtgagaatcaatagaatggctcttgaatccgagttcgttagctgtcagctccaccaatggatagaccttatcttcggttacaagcagcggggtcccgaggccgtgagggctcttaacgtctttcactaccttacctatgaaggctctgtgaatctcgactcgatcaccgatcccgtgctgcgtgaagcaatggaggcccaaattcaaaacttcgggcagaccccaagtcagctgctgattgaaccccatccgcctcgaagttctgcgatgcacttgtgtttcctgccccagagccccctgatgtttaaggatcaaatgcagcaagatgtaatcatggtcctaaagtttccctctaacagccccgtaacccatgtagcagctaatacactgccgcacctgacaatccccgctgtggttactgtgacctgctctcgcttgttcgcagtcaaccggtggcataacactgtaggtctgcggggagcccctggctattctctggaccaggctcaccacctgcctatcgagatggacccactcattgcgaataattcaggcgtaaacaagcgacagattaccgacttagtggaccagtctatacagattaacgcacactgcttcgtggtaaccgcggataatagatacatcctgatctgcgggttctgggataagtcctttcgtgtgtacagtacagagacaggcaaattaactcagattgtctttgggcattgggacgtagttacgtgcctagccaggagtgagtcttatattgggggagactgctacatcgtttccggctcaagggacgccactctgctgctctggtactggtcagggcgacaccatatcatcggtgataacccaaacagtagtgactatcctgctccgagagccgtgcttaccggccacgaccatgaggtggtatgcgttagtgtatgtgcagagctgggtctagtgatatctggagccaaagaaggcccttgcctggtacacaccatcaccggcgatttgctcagagctcttgaaggtcccgagaactgcctgttccccaggcttatctccgtgtcctccgagggccactgcattatatattatgagcggggaaggttttccaattttagtatcaacgggaagctgctcgcccagatggaaatcaatgactccaccagagccatcctactttcctcagatgggcagaatttggtgaccggcggtgacaatggggtcgtggaggtctggcaggcatgcgatttcaaacagctatacatttacccaggctgcgatgccggaattcgcgcaatggaccttagtcatgaccagcggactctaattaccgggatggcttctggctccattgtagcctttaacattgacttcaaccggtggcactacgaacaccaaaatcggtatta

SEQ ID NO: 232315 - DNA, 8840 bp, synthetic construct
  misc_feature 1..8840: note = Description of Artificial Sequence: Synthetic coding sequence
  source 1..8840: mol_type = other DNA
atggcgtctgagaagccaggcccaggtccaggccttgagccacagccagtaggcctgatagccgttggtgccgctggcggtggaggaggcggaagcggtggaggcggtaccggtggatctggaatgggagagctcaggggcgcaagcggctccggctctgtaatgcttcccgcagggatgatcaatccgagtgtaccaattagaaatattcgcatgaagttcgcagtcctgatcggcctgatccaagtcggagaggtctctaatagagacatcgtggaaaccgtgttaaacctcctggtgggaggggaatttgaccttgagatgaactttatcatccaggatgccgaatctatcacctgtatgactgagctgctggagcattgcgacgttacgtgtcaggctgagatctggtcgatgtttaccgccattctccgtaagagcgtccggaacctccagacatctaccgaggtcgggctgatcgaacaggtgctgctaaaaatgagtgctgtggatgatatgatcgctgacctgctcgtggatatgctgggagttcttgcttcctatagtattacggtcaaggaactgaaactgctattctctatgctgagaggcgagtccgggatctggccaaggcatgccgtgaaactgctgtctgtgctcaaccagatgccacagaggcatggccctgacacattcttcaattttccaggctgtagcgctgctgcaatcgcactacccccaatagcaaaatggccataccagaatggattcacattaaatacatggttccgtatggaccctctgaacaatatcaatgtcgacaaagacaagccctacctgtactgctttagaacgagcaaaggtgtgggctactccgcccacttcgttggcaactgcttgatcgtgacatccctcaagtctaaagggaagggattccagcattgcgtgaaatacgattttcaaccaaggaagtggtatatgatttctatagtccatatttacaaccggtggaggaattctgagatccggtgttacgtaaatggacaacttgtgtcgtatggggacatggcctggcacgtaaatacaaacgactcttacgacaagtgcttcctgggctcttctgagaccgccgacgccaacagagttttttgtgggcaactgggagccgtgtatgtgttctcagaagcccttaatccggctcagatctttgccatccatcagctgggcccaggttataaatccactttcaagttcaaatccgagagcgatatccacctagctgagcatcacaagcaagtgctttacgatggtaagttagccagtagcattgccttcacatacaatgctaaggccacagacgcccagttgtgcctggaatcttctcctaaagagaatgcaagcatttttgtgcactctccacacgccttgatgctccaggacgtgaaagccatcgtgacccattcaatccattccgcaatacactctattggcggtattcaggtcctttttcctctattcgcccagttggataacagacaacttaatgactcgcaagtggagaccacggtgtgcgccacattgcttgcttttcttgtggagctgttaaagagttctgtcgccatgcaagaacagatgctaggcggaaaggggttcctggtaattggctaccttctggaaaagtcaagccgtgtgcacatcactcgagccgtcctcgagcagtttctgagtttcgccaagtatttagatgggttgtcccacggcgcacctctcctcaagcagctttgcgatcatatactgttcaatcccgctatctggatccacaccccagccaaggtgcagctttctctgtatacctatctgtccgcagagttcattggaacagccacgatctacaccacaatccggagagtgggaacagtacttcagctgatgcatactcttaaatattactactgggtcataaaccccgctgacagctccggcatcacgccgaaaggactggatggcccacgaccttcgcagaaggagataattagtttgcgagccttcatgttgttgttcctgaagcaactgattctgaaggatcgcggtgtgaaggaggatgagctacagtcaattctcaactacctgctcacaatgcacgaggatgagaacatccacgacgtattacagttactggttgctctgatgtccgaacatccagcgagcatgatcccagcttttgaccagagaaatggaattagagtgatatacaaattgctggcttcaaagagcgagtcaatctgggtgcaagccctgaaggttcttggctattttctgaaacatctcggacacaagagaaaagttgaaatcatgcacactcacagtctctttaccttgctaggggaacgcctaatgctccacacaaataccgtcactgtcaccacatacaataccctctatgaaatcctgaccgagcaggtgtgtacccaagtagtccataagcctcatcctgaacctgattccactgtcaaaatccagaaccctatgatcctgaaagtggtggccaccctgctgaagaattctactcccagcgccgagctgatggaagttagacggctcttcctttctgatatgatcaaattattcagcaattccagggaaaatcgtcgatgcctcttacagtgctctgtatggcaggactggatgttttcacttggctacattaatcctaagaactcagaggaacagaaaatcactgaaatggtgtataacatttttcggattctgctttaccacgccattaaatacgagtggggaggctggcgggtctgggtggacactctttcaattgcccactccaaagtcacatacgaagcccacaaggagtacctcgcaaaaatgtatgaggagtatcagcgacaggaggaggaaaacatcaagaagggcaaaaaggggaatgtgtccacaatcagcgggctgtcttctcagacgacgggcgcaaagggcggaatggagattagggagatcgaggatctttcccagagccaaagtccggagtctgagactgactaccctgtttcaaccgacacacgagatctcctcatgagcaccaaagtcagcgatgatatcctcgggaatagtgatcggcctggctctggggtgcatgttgaagtacatgatttacttgtcgatattaaggccgaaaaggtggaagctaccgaagtgaaactggacgacatggacctcagtcccgaaaccctggtgggcggtgagaatggggctctggtggaagtcgagtcactgctcgacaacgtgtattctgcagctgtggaaaagttgcagaacaacgtgcacgggtctgtgggaatcatcaaaaaaaatgaggagaaagataacggccctcttattactctggccgacgagaaagaggacttgccaaacagctctacctctttcttattcgataaaatccccaagcaggaggagaaactgctgccagaactttcgagtaaccacattattcccaacatacaggacacacaagttcacttgggggtgtcagacgacctagggttactggcccatatgaccggcagcgtggatttaacttgcacatcttccatcattgaggagaaagagttcaaaattcatactacaagcgacggtatgtctagcatctccgaaagggatctagcctccagcacaaagggccttgagtatgccgaaatgaccgcaactactcttgaaaccgaaagttcctctagcaaaatcgtgccaaatatagatgccggaagtattatctccgatacagaacgctcagacgacggaaaagaatccggaaaggaaattcgcaagatccagaccaccaccacgactcaagctgtccaggggcgatccattacacagcaggaccgcgacctgcgtgtcgatctgggctttcggggaatgccaatgacggaagagcaaaggcggcagtttagtcctggcccacggaccacaatgttcaggatcccagagtttaaatggagtcctatgcaccagcgtttactcactgatctgctgttcgctctagagaccgatgtgcacgtgtggcgtagtcatagcactaaatcagtaatggatttcgtcaattccaacgaaaacattatctttgtacataatacaattcaccttatttcacagatggtggacaatataatcatcgcatgtggtggtattctgccgctactcagcgctgccacctctcctaccggctctaagactgaactggaaaatatcgaggtcacccagggtatgtcagcggaaaccgcagttacttttctttcccgtctcatggctatggtcgacgtcctcgtgtttgcctccagcctaaatttcagcgagattgaggcagaaaagaatatgtcttctggtggactgatgagacaatgtctgaggctagtctgttgcgtggccgtaaggaactgccttgagtgtcgccagagacagcgagaccgtggaaataaatcctctcacggtagcagcaagccccaagaggtgccccaaagtgttactgccacagccgcttctaaaacacctttagaaaacgtgcccggtaatcttagtcccatcaaagacccagatcgactgctgcaggacgtagacataaatcgcctccgcgctgttgtctttagggacgttgacgactctaaacaggcgcaatttctggcccttgccgtggtttattttattagtgtgctgatggtgagtaagtacagagatatcctggagccccagcgagagacaactcgtactggtagccaacctggacgtaacattcgacaggagataaacagccctacaagcacagtggtcgttattcccagtatacctcacccttctctcaatcatggatttttggcaaagctgatccccgagcaaagtttcggtcactctttttataaggaaacaccagctgctttccccgatactattaaagagaaggagacccctacccctggcgaagatatccaggtggagtcttcaatcccccatactgacagcggcataggtgaggaacaggtggcctctatccttaacggggctgagttggagactagtaccgggcctgacgccatgagcgagctgctgagcactctgtcgagcgaagtcaagaaaagccaggaaagtttgactgaaaatccttccgagacactgaaaccagctacctctatttcctccatcagtcagaccaaaggcattaatgtcaaagaaatcctaaagtccctcgttgccgctccagtggagattgcagagtgtgggcctgaacctataccttatccggacccagccctgaaacgcgagacacaggctattctgcctatgcagttccattcttttgatcggtctgtggtggttcctgttaagaagcccccaccgggaagcctagcagtcaccacagtgggggctaccacagctggaagtgggctgcctaccggttccacatctaatatattcgccgctactggcgcaacaccaaagtcaatgattaacactacaggggctgttgactccggctcatcatcatcatcctcatccagctctttcgtaaatggagcaacttccaagaacctgccggcagtgcagactgtggcgcctatgcctgaagattcagccgaaaacatgtccatcactgctaaactcgagcgtgcccttgaaaaagtggcgcctcttttgcgggaaatctttgtcgatttcgcccctttcctgagcagaaccctgctgggctctcatgggcaggagctcctgattgagggcctcgtgtgtatgaaatcttccacttcagtagtggagctggtaatgttgctgtgttctcaggagtggcagaacagtatccagaaaaacgccggtctggccttcattgagctgatcaacgagggtcggctgctttgtcacgccatgaaggaccatatcgttagagtggccaatgaagctgagttcatcctgaacaggcaacgagcagaggacgtgcacaagcacgcagagtttgagtcccaatgcgcccagtatgctgcagaccgaagagaagaagagaagatgtgtgaccacttaataagtgcagcaaagcaccgggaccatgtgactgccaaccagctgaagcagaaaattctgaatattttgacaaacaagcatggagcatggggtgcagtcagccatagccagctgcatgacttctggcgcttggactattgggaagacgatctcaggcggagacggagattcgtcaggaatgcattcggttcaacccatgctgaagccctcctaaaggctgccattgaatacggaaccgaagaggatgtagtcaaaagtaaaaagacattcaggagtcaagccatcgtcaaccagaatgccgagacagagcttatgctcgagggggacgacgatgccgtgtccctgttacaagaaaaggagatcgacaacctcgccggacccgtggtgctctccacccccgcacagcttatagccccagtggtggtggccaaaggtaccctctccattaccaccaccgagatttatttcgaagtggatgaagacgattccgcctttaaaaaaatagacaccaaagtcttggcatacacagaggggctgcacggcaagtggatgttttctgagattagagctgtgttctctcgccgatacttgctgcagaataccgctttggaggtttttatggcaaatcggactagtgtgatgttcaactttcccgaccaggcgactgtaaagaaagtggtctactctttacccagagtcggagtgggaaccagttacggactacctcaggcaagacgcatttccctcgccacccccagacagctgtacaagtctagcaatatgacacagcgatggcaacggagagagatttctaacttcgaatatttgatgttcttgaacaccatcgcagggcgtacgtacaacgatctgaatcaatatccggtgttcccttgggtcctcacgaactacgagtccgaggaactggaccttacattgccaggaaatttcagggacctttcgaagcccatcggcgcactgaaccccaaaagagcggtgttttacgcagaaagatatgagacctgggaggatgaccaatctccaccctatcattacaacactcactactccaccgctaccagtaccctttcttggctggtccgaatcgagccttttacgacattctttctcaacgcaaatgacgggaagttcgatcatccggatcggactttctccagcgtggctcgctcttggcggacaagtcagcgggatacctccgatgttaaagaactaataccagaattctattatctgcccgaaatgtttgtgaactcaaatggatataacctgggtgtaagagaggatgaggtagtggtgaacgacgtggatctgccaccttgggctaagaaacccgaagactttgttagaattaatagaatggcactggaatcagagttcgttagctgccagctccaccagtggattgacctcatctttggttataaacagcgaggcccagaagccgtaagggccttaaatgtgttccactaccttacttacgagggctctgtgaacctcgactccattaccgatccggtgctaagagaagccatggaggcccagattcagaatttcggccagaccccctctcagctgctgatcgaaccccaccctccacggagctccgcaatgcacctgtgttttcttccacagtcacctctaatgttcaaggatcaaatgcaacaggacgtgataatggtcctaaaatttccctctaattcaccagtaacccatgtggccgcaaatactctcccccaccttacgatcccggctgtcgtgactgtcacctgctcccggctcttcgccgttaacaggtggcacaacactgtgggattacgcggagctcccggatacagcttagaccaggcgcatcacctgccaattgagatggatccgctaatcgctaataattccggagtaaataagaggcagatcacagatctggtcgaccaatcaattcaaatcaacgcgcattgctttgtggtgaccgcagacaacaggtacattctcatctgcggcttctgggacaagtctttccgggtgtatagcaccgaaactggcaagctgacacagattgtgttcggccactgggacgtcgtcacctgcctagccagaagtgagtcttacattggaggggactgctatattgtttcaggttccagggatgcaacgctgttattatggtactggagtgggaggcaccacattataggagacaatcccaactcctctgattatcccgctcccagagcagtcctcaccgggcatgaccacgaggtggtctgtgtgtcagtttgcgctgagttaggcctggtcatctccggagccaaagaaggcccatgtttagtgcacactataactggcgacctgctgcgcgctctggaagggccagaaaactgtctgtttcccaggttgatatctgtctcttccgaagggcactgcattatatattatgagcggggtagattcagcaacttctccattaatggtaaactcctggctcagatggaaattaatgattcgacacgagccattttactctcgagcgacggccagaatctcgtgactgggggtgataacggggtggtcgaagtttggcaggcgtgtgacttcaagcaactctacatctatcctggttgtgacgccggaattagagcaatggacctgtcacatgaccagcggaccctgatcacggggatggcttcaggcagcatcgtagcattcaatatcgacttcaatagatggcattacgagcaccagaacagatacta

SEQ ID NO: 232316 - DNA, 1575 bp, synthetic construct
  misc_feature 1..1575: note = Description of Artificial Sequence: Synthetic coding sequence
  source 1..1575: mol_type = other DNA
atgttcgtgaactccaatggctataacctaggggtgcgtgaggacgaagtggttgtgaatgatgtagacctgcccccttgggcaaagaaacccgaagatttcgtgaggattaaccgcatggctctcgagagcgagtttgtgtcctgtcaattacatcagtggatagatctaatcttcggatataagcaacggggacccgaagcagttcgcgcactcaacgtcttccactacctcacatatgaaggcagcgtaaatctggatagtatcaccgatcccgtgctgcgcgagatccctgaggcttacttcatccgtgaccctcataccttccttctgaccaaggatttcatcaaggccatggaggcccagattcaaaatttcggtcagactcccagccagctgctgattgagccgcacccaccaagatcaagcgctatgcacctctgcttcctaccccagtctcctctaatgttcaaagatcagatgcagcaggatgttatcatggtgctgaagttcccatctaactcccctgtgacccacgtcgctgccaacacactgccgcacttgaccattccagccgtggtcaccgtcacttgctcgcggctgtttgctgtgaatagatggcacaatacggttggactgcgtggcgctccaggctattcgctggatcaggcccaccacttgcccatcgagatggatcccctgattgctaataattctggggtcaacaaaaggcagattactgacttggtggaccagtccattcaaattaatgcccattgttttgttgtgaccgctgataatcggtatatccttatctgcggcttttgggataagagctttcgggtctatagcacagaaactggaaagttgactcagatcgtatttggacattgggatgtggtgacatgcctggctagatctgagagttatatcggcggagattgttacattgtgtctggcagtcgcgacgctaccttgctgctgtggtactggtctggccgacatcatattatcggtgataaccccaactcatccgactatccagcccctagggctgttctcaccggtcacgatcacgaagtggtgtgtgtgtccgtctgtgccgagctggggctcgtgatatctggagctaaagaaggtccatgtctcgtccatacaataacaggtgatcttctacgcgctcttgaagggcctgaaaattgccttttccccagactgatttctgttagctcagaggggcactgcatcatctactatgaaagagggagattctcaaacttttccatcaacggaaagttactcgcacagatggagataaatgactcaactagagctatcctcttatcttcagatggacaaaatttggttactggaggtgataatggtgttgtggaggtttggcaagcgtgcgactttaaacagctgtacatctatcccggttgcgatgctggaatcagggcaatggatctaagccacgaccagcgcactctgatcaccggcatggcctccggttctattgtggctttcaacatcgatttcaatagatggcattacgaacaccagaatcggtactag

SEQ ID NO: 232317 - DNA, 4727 bp, synthetic construct
  misc_feature 1..4727: note = Description of Artificial Sequence: Synthetic coding sequence
  source 1..4727: mol_type = other DNA
atgcatcaacgtcttttaaccgacttgctcttcgccctggaaaccgacgtacacgtgtggagatctcactccaccaagtctgtaatggattttgttaattccaacgaaaatataattttcgttcacaacacgattcacctaatcagccagatggtggataatatcattattgcatgcggaggcatccttcccctgctgtcagctgccacatcaccaactactgaattggagaacattgaagtgactcaggggatgagcgccgagactgccgtgactttcttgtcccgccttatggccatggtggacgtgctggtgttcgctagctctctcaacttttcagagattgaagccgagaagaacatgtcctcagggggattgatgcggcagtgtctacggttggtgtgttgcgtggctgtacggaattgcctggagtgtcgacagcgacagcgtgataggggcaataaaagtagccatggttccagcaagccccaagaggtgccgcaaagtgtcacagccacagcagcatccaagaccccactcgagaacgtacccggtaatttgagcccaatcaaagatcccgatcgcctgttgcaggatgtggacattaaccgattgcgagcagtggtgtttagagatgtggatgactcgaagcaagctcagttcctggcgcttgcagtagtttatttcatttcagtccttatggtgtctaagtatagagacattcttgaaccccagagagagacgactcgcacgggatctcagcctggcagaaacattcgacaggaaatcaattcccctaccagtactgaaaccccggcagctttccctgacaccattaaggagaaggagacccccacccccggtgaagacatccaggttgagtcctctattcctcacactgactctggcataggggaggagcaggtcgcatctatactcaacggggctgaactcgagaccagcacaggaccagatgccatgtccgaattgcttagtacactttcttctgaggtgaaaaagtcccaggagagcctcaccgagaatccttccgagaccctcaagccagctacaagcatctccagcatttcacagacgaaaggaatcaacgttaaggaaattctcaagtccttggtggcggctcccgtggagatagccgaatgtgggccagagcctattccttaccctgatcccgctctgaagcgggagacccaagccattttgccaatgcaattccattcatttgatcggagtgttgtggtacctgtcaagaagcccccaccaggatctctggcagtgacaactgtgggggctacgaccgccggttccggactgccaaccgggtccacttctaacatttttgccgcaacaggtgctacgcccaagagcatgattaatacgacaggcgctgttgacagtggatcctcatcttctagctcttcttcatcattcgtgaacggcgcaactagcaaaaacctgccagctgtgcagacagtggcgccaatgccagaggatagcgccgagaacatgtcaattaccgcaaaattagaacgggcactcgaaaaggtcgcccctctcctccgggagatttttgtggatttcgctcctttcctatcacgcaccctgctgggcagccatggacaagaactcttgatcgagggactggtttgtatgaagagtagtacgagcgtggtggagctggtcatgctcctctgctctcaggagtggcagaatagtattcagaaaaatgccggtctcgcttttatcgaactgattaacgaaggcaggttgttgtgtcatgcaatgaaggaccacatcgtacgcgttgctaacgaggccgagttcattctaaatcgccagagggccgaggatgttcacaaacacgctgaattcgaatctcaatgcgcacagtatgctgcggacagacgggaagaggaaaaaatgtgcgatcatctgatcagcgctgctaagcatagagaccatgtgacggccaatcaattgaaacagaagatacttaacatccttacgaacaaacacggcgcttggggagcagtttctcattcccagctgcacgacttctggaggcttgattattgggaggacgacctgcgccgaaggaggaggttcgttcgcaatgctttcgggtccacgcacgcagaggctctcctgaaggctgccatcgaatatggtaccgaagaggacgtggtcaagtctaagaaaaccttccgcagccaggcgatcgtaaaccaaaatgcagaaacagagttgatgctggagggagacgatgacgctgtgagcctgctccaagaaaaggagatcgacaaccttgctgggccagtggttctgagcactcctgctcagctgatagcacccgtcgttgtagcaaaggggaccctgagtatcactacgactgagatctactttgaggtcgacgaggatgactctgcttttaagaagatcgacacgaaggtgctcgcatacacagaagggttacatggaaaatggatgttctctgagatccgggcagtgttctccagaaggtatctactccagaacaccgccctggaagtgtttatggccaatcggacatctgttatgttcaacttcccggatcaggccaccgtgaaaaaagttgtttactctcttccaagagtaggcgtgggaaccagttatggccttcctcaggctcgccgaatttccctcgcaacccccagacagctgtataagtcgtctaacatgacacaacgctggcagcggagagaaatatcgaacttcgagtacctcatgtttctgaacaccattgcgggaagaacatacaacgatctcaaccagtacccagtctttccatgggtcctcaccaactacgagtctgaagagctggatctgactctgcccggaaacttccgggacctgtccaagccaatcggcgctctgaaccctaaaagagctgtcttttacgctgagaggtatgagacatgggaagacgatcagtctccaccttaccactacaacacccactatagcaccgcgacaagtaccctctcctggctggtgagaatagagcctttcaccactttttttttgaacgcaaatgatggcaagttcgatcacccagataggaccttctcctccgtcgcccgttcatggcggacttcccaacgagacacgagcgacgtgaaggaacttatccccgaattctactacttacccgaaatgttcgtgaactccaacggatacaatctcggagtgcgagaggacgaggttgtcgtgaatgatgtggacctgccaccctgggctaagaaacccgaagactttgttagaatcaatagaatggctctggagagcgaatttgtgagctgccagttacatcaatggattgatctcatctttggttacaagcaaagggggcctgaggccgttagagccctgaacgtgttccactacctcacctacgaaggtagcgttaacctggactccataacagatccagtgctccgtgaagctatggaagcccaaatccaaaactttggccagacgccttcccagctactgatagagccacacccgccacggagttccgcgatgcatctttgcttcttgccgcagtcaccgcttatgtttaaggatcagatgcagcaggacgtgatcatggtgttgaaatttccctccaattcccctgtgacccacgttgctgccaataccttacctcacctgaccattcccgcagtggtgactgtgacatgctcccggttatttgctgtgaacagatggcacaacactgttggtctgaggggtgcgccaggatactctttggaccaggctcatcacctgccaatcgagatggaccctttgatagctaataattcaggtgtgaataaaaggcagataacagaccttgttgatcaaagcattcagatcaacgcccattgcttcgtcgtgacagcagacaatcgatacattctcatttgcggcttctgggacaagtccttccgtgtctactccacggaaactggaaaattgacccagatagtcttcgggcattgggacgttgtgacttgccttgcgagatccgagtcctatatcgggggtgattgttacatcgtttctgggtctagggatgctacattgctcctctggtactggtctggacgacatcacatcattggcgacaacccgaattcaagcgagtgtgactatcctgcaccacgtgcagtattgactggccacgaccatgaggtggtgtgtgtgtctgtctgtgcagagctgggattagtgatttcgggtgcaaaggaggggccttgcctagttcacaccatcactggcgacctgctacgggctctggaggggccagaaaattgcttgtttcccagacttatctctgtgtctagcgaaggtcactgcatcatatattacgaaagggggcgatttagtaatttttccataaacggaaagctgctggctcagatggaaatcaatgactcaactcgcgcaatactcctgagtagcgacggacagaatctagttacaggtggagacaatggagtcgtggaagtatggcaagcttgcgacttcaagcagctttatatctatccaggctgcgatgctgggatccgggcaatggacttgtcgcacgaccagcggacactcatcaccggaatggctagtggatcaatcgtagccttcaacatcgattttaatcgctggcattatgaacaccagaaccgctacta

SEQ ID NO: 232318 - DNA, 2220 bp, synthetic construct
  misc_feature 1..2220: note = Description of Artificial Sequence: Synthetic coding sequence
  source 1..2220: mol_type = other DNA
atgtttagcgaaatccgtgctgttttctctaggaggtatctgctccagaataccgcacttgaggttttcatggcaaaccgtaccagcgtgatgtttaactttccagatcaggccaccgttaaaaaagtagtttattcattgcccagagttggcgtgggcacttcatatgggctgccacaagcacggagaattagcctagctacgcccaggcagttgtataaaagcagcaatatgactcagagatggcagaggcgagaaatctctaattttgagtatctgatgtttctcaacacaatagccggtaggacctacaacgacctgaaccagtatcctgtgttcccttgggtgctcacaaactacgagagcgaggagcttgacctaaccttacctgggaacttcagagacctgtcaaagcccatcggtgccttgaacccgaagcgtgcagttttctatgcggaacgttatgaaacctgggaggacgatcagtcacctccttaccactacaatacccattactcaacagccaccagcaccctgtcttggctggtgaggattgaacccttcactaccttcttcttgaatgccaacgacgggaaatttgatcatcctgacagaaccttttcaagcgttgcacggtcctggagaacatcccagcgggacacctccgatgtgaaggaactcatacctgagttttattacctgcccgagatgttcgtgaattcgaacggctataatctcggggtgcgcgaagacgaggtggtggttaacgacgtggatctacctccctgggccaagaagcccgaggacttcgtgagaatcaatagaatggctttggagtcagaatttgtcagctgtcagctgcatcagtggatcgacctcatatttgggtacaaacagcgtggacctgaggcagtacgagcgttaaacgttttccactacctgacctacgagggctcagttaatctggatagtatcacagacccagtgctcagggaggccatggaggcacaaattcaaaattttggccagactccttctcagctgctcatcgagccgcatcctcccaggtctagcgccatgcatctgtgtttcctgccccagtcaccattgatgtttaaggaccagatgcagcaggacgtcattatggttctgaagttcccgtccaacagtcctgtgactcacgtggccgctaataccctcccacacctcaccatccccgctgtagtcacagtgacttgtagtcggttgtttgcagtgaatcgctggcacaacaccgtcggtctccgcggagccccaggatattcccttgatcaggcccaccacctaccaatcgagatggatcccctgattgccaataactcaggagtgaataagagacagatcaccgacctcgttgaccagagcatacaaataaacgcacactgtttcgtggtgacagccgataacagatatatactcatttgcggtttctgggataagagtttccgtgtctatagcaccgagaccgggaagcttacacagatagtatttggtcactgggacgtcgtgacttgtctagcgcgatctgagtcatatattggcggtgattgctacattgtcagtggatcaagagatgcgacccttctcctctggtattggtctggtcggcaccacatcatcggggataaccccaattctagtgactacccagcgccaagggccgttcttaccggccatgaccacgaagttgtgtgcgtcagcgtctgtgcagagctcggcctcgtgatttccggtgctaaagaagggccatgtctggtgcacactatcactggagacctcttgagagcattggagggcccagagaattgcctgtttccccgtctcattagcgtctcctcagaagggcactgcattatttattatgagagaggccgtttctccaacttcagcatcaatggaaaacttctggcacaaatggagatcaatgatagcacgagggctattcttctcagttctgacgggcagaacctcgtgacaggcggagacaatggcgttgtggaagtctggcaagcttgtgatttcaagcagctatatatctatcctggttgtgacgctggcatccgtgcaatggacctgtcccatgaccaacgaacactaattacaggcatggcatcaggctctattgttgctttcaatatcgatttcaacagatggcactatgaacaccagaatcggtattag
